United States Patent Application Publication US 2011/0183924 A1 - sequence listing, part 187

SEQ ID NO: 451996 - DNA, 4406 bp, Homo sapiens
actataatatatatctatttattatatgtctttcggttaattcctgatctgaggagcgctgtttttcactcccatgcgaaagtcaccagcgggtagggcctgattgctacttttcatgcatagttttagacacaagagggcattgtgacgtcgcgcccagcggcacccagtcgtaggccgagtcccgcagccccacgtgggggccccgcgctcccattggccagcgccggacgaagctgccacattattttgttacttttcagtccctatttggaactgctctcgcggcagttcagacctcgtgctcgtccccttcgcctgtctgtgtgtggtatccgtaggtccggggcactttttttttggtgtgtgtgtgtgtgcgtgcgcgcgtgtgtgtgtgttgggtgtgtgtgttttgggggtttgccggggcgcggagaggagagccgggccgaggggaaggaaggaagccgtagagctccccggtctcgggctgcgtctcccctccagcgctctcctgcctgtgcgctccgacgcggcagcggcggtggcgctgagcgctcctcggtggggacgcggtgctcaagctgggagcagcgagaaccctttgcggaggcttcccgtgcccgctggacttaggatgccagggcgtttgatttgcacctactgagcccggagttcctccccggccctgggaagggcttgcagcggcggcggcggcggcggcagcggcagtagcagacggaacagcaggctctcctctccgagggggggcgtcgaagcgcccgcgccgggctcccgccctcaccctccggcgctcctgcggccccaagccaccacctcgtagcccgcctccttcctcttctcgccgcgagccccaggcccggacgcctctaggatcggacccgcgcgccccggatgcttggggctgccccggcgcgcccccctacaggcgcgacccgctgagtgacccggagggggcccgagctcgccccaggaggggcccccggcctcgggaccccgcgccggacctgctggggagccgacgatgtccgcgcagtcccaggcattgacgcgctcgacgcagcccagggaaggcggccggccgctgcccgccgagccctaggcgcacaaagcccgcgcccgccgcccggccccggcgcccgccgacgactttgccgcctgctccgcggctctttgtctccacttggggcgggcgcccgactctgggatttcgctgcgagaacgagctgggggggccgggggcgagctctcggtttcccggccgccccccgctcgggctcggctcccccctcccccgcacctccccggcccgggctctcggcgcttccacgctctcggaatcacgacccctccctgccatgtatccgcagggcagacatccggctccccatcaacccgggcagccgggatttaaattcacggtggctgagtcttgtgacaggatcaaagacgaattccagttcctgcaagctcagtatcacagcctcaaagtggagtacgacaagctggcaaacgagaagacggagatgcagcgccattatgtgatgtactatgagatgtcctatggcttgaacattgaaatgcacaagcagacagagattgcgaagagactgaacacaattttagcacagatcatgcctttcctgtcacaagagcaccagcagcaggtggcgcaggcagtggagcgcgccaagcaggtcaccatgacggagctgaacgccatcatcgggcagcagcagctccaggcgcagcacctctcccatgccacacacggccccccggtccagttgccaccccacccgtcaggtctccagcctccaggaatccccccagtgacagggagcagctccgggctgctggcactgggcgccctgggcagccaggcccatctgacggtgaaggatgagaagaaccaccatgaactcgatcacagagagagagaatccagtgcgaataactctgtgtcaccctcggaaagcctccgggccagtgagaagcaccggggctctgcggactacagcatggaagccaagaagcggaaggcggaggagaaggacagcttgagccgatacgacagtgatggagacaagagtgatgatctggtggtggatgtttccaatgaggaccccgcaacgccccgggtcagcccggcacactcccctcctgaaaatgggctggacaaggcccgtagcctgaaaaaagatgcccccaccagccctgcctcggtggcctcttccagtagcacaccttcctccaagaccaaagaccttggtcatttctgctcctcctcctccccctgaacaatgctggcagttgctacaaatagatttattggaggcttatggctccggttcccccacagacccgctcatgagtctctgtttgttcttcccttttcttttgccctgtccctcaccttgggtcgggggtgctggagtggaccacaatgttgtgctgggggatgggggggtctctctttgccgattgtgcagtgcacaagatttgtgaaaaatgtaaataacagactcctattgcggactgatcagtgggagaggaggccccttcccaccggaaactctgagtgtgtatttcgcctgctgtatttgtaatccactcgtggtggtggctttttttttttttttttttaaataaacagatgctctcacctgggaagaggagacagggaggggaaccaattgaagaaagaggagaaaagtcttagagtgtggaaaaggcaaccaggttggccgtaaggtgcctgctggaatgcgtgtgcctccacacgggtctgggcatccggactgataaccagccggccagactgagggatggaaggcactgagatgggggcccgtccaggcggacacccgcagaaatggagctttctgtggtctcttgcactctggctgcctcttgccctctctgtgtctctctttcttggtctctccctctctcctcctcagcctggtctttctctttggtgcacacttagttattgttgtgagcaatggaagttcaaaggaactccctctccagctcttctgaatcttgggacacagcctaaaaaggacaaaaagttagaagacagcatagcaactcagctcagggagctaccagagaaaaatagcaactgatgtgggtgcttttttttttttttaatttgaataaaaagaattagaagtgatgtccttttataaaatgccttctcccccttcccgcctacagtctcttcctctccccttagaggggggaaagtgtataaacctacagggttgtgagtctgaaaagaggatccccctcacccccaccctgggcagagcagtgggggttggggggtgggagagggggacacagatcctggcacactgtggatatttcttgcagattgcagtctcttgtggcccaaacaggttaggtagactatcgcctctggcaggtgccaccttttggtaccaacatgttctgaggtgttaggatttgggttgggttttttttgtttgttttttttttccttttggtctttttttttttctccttttaaagaaaagctaaaggccgctgtgagtcctggtggcaggctctccatggatgtagcatatcgaagataatttttatactgcatttttatggattattttgtaatgtgtgattccgtctgctgaggaggtgggaggggctccagggaaagccacccaccttcagtgaggttgctccccagctgagcgcaccgggcatgggatgtggaggctggcgacacaccctgtgcctctccaaggctgggcgcgtggggcgtccagagtctctctgggtctcagatgtccatctgccacctcttgttaaggctctagccagaagggagggtgagggtagaagaaagttattcccgaagaaaaaaagaatgaaaagtcattgtactgaactgtttttatatttttaaaagttactatttaaaggttggtttgattgttgcgtcttaattgcctctcctcccagtttgccagtcccgccccccgccccccgggaaaacagccaggccactgttgctgtcacattctggagcctgggccagggccatttcccatcgatgtgagctcttctcatctcacagcattccctgcgctgcttccacccccttctccccttccagatacccagcatcgcagcagggatttcacaatcccatactgtgtcgcctcccatccaagcgccagggagggtggggggtaggagctaagacttcctctggacagatgggcagggcagagttcactgaggtgaaggaagaccacaggttaacaccaaagtattgtacagctgtcaatgcaaaacttttttggaaaaaaattaaacgtaatgaacttgaagcgaaactgcaaagtgtctgt

SEQ ID NO: 451997 - DNA, 3519 bp, Homo sapiens
actataatatatatctatttattatatgtctttcggttaattcctgatctgaggagcgctgtttttcactcccatgcgaaagtcaccagcgggtagggcctgattgctacttttcatgcatagttttagacacaagagggcattgtgacgtcgcgcccagcggcacccagtcgtaggccgagtcccgcagccccacgtgggggccccgcgctcccattggccagcgccggacgaagctgccacattattttgttacttttcagtccctatttggaactgctctcgcggcagttcagacctcgtgctcgtccccttcgcctgtctgtgtgtggtatccgtaggtccggggcactttttttttggtgtgtgtgtgtgtgcgtgcgcgcgtgtgtgtgtgttgggtgtgtgtgttttgggggtttgccggggcgcggagaggagagccgggccgaggggaaggaaggaagccgtagagctccccggtctcgggctgcgtctcccctccagcgctctcctgcctgtgcgctccgacgcggcagcggcggtggcgctgagcgctcctcggtggggacgcggtgctcaagctgggagcagcgagaaccctttgcggaggcttcccgtgcccgctggacttaggatgccagggcgtttgatttgcacctactgagcccggagttcctccccggccctgggaagggcttgcagcggcggcggcggcggcggcagcggcagtagcagacggaacagcaggctctcctctccgagggggggcgtcgaagcgcccgcgccgggctcccgccctcaccctccggcgctcctgcggccccaagccaccacctcgtagcccgcctccttcctcttctcgccgcgagccccaggcccggacgcctctaggatcggacccgcgcgccccggatgcttggggctgccccggcgcgcccccctacaggcgcgacccgctgagtgacccggagggggcccgagctcgccccaggaggggcccccggcctcgggaccccgcgccggacctgctggggagccgacgatgtccgcgcagtcccaggcattgacgcgctcgacgcagcccagggaaggcggccggccgctgcccgccgagccctaggcgcacaaagcccgcgcccgccgcccggccccggcgcccgccgacgactttgccgcctgctccgcggctctttgtctccacttggggcgggcgcccgactctgggatttcgctgcgagaacgagctgggggggccgggggcgagctctcggtttcccggccgccccccgctcgggctcggctcccccctcccccgcacctccccggcccgggctctcggcgcttccacgctctcggaatcacgacccctccctgccatgtatccgcagggcagacatccggctccccatcaacccgggcagccgggatttaaattcacggtggctgagtcttgtgacaggatcaaagacgaattccagttcctgcaagctcagtatcacagcctcaaagtggagtacgacaagctggcaaacgagaagacggagatgcagcgccattatgtgatgtactatgagatgtcctatggcttgaacattgaaatgcacaagcagacagagattgcgaagagactgaacacaattttagcacagatcatgcctttcctgtcacaagagcaccagcagcaggtggcgcaggcagtggagcgcgccaagcaggtcaccatgacggagctgaacgccatcatcgggcagcagcagctccaggcgcagcacctctcccatgccacacacggccccccggtccagttgccaccccacccgtcaggtctccagcctccaggaatccccccagtgacagggagcagctccgggctgctggcactgggcgccctgggcagccaggcccatctgacggtgaaggatgagaagaaccaccatgaactcgatcacagagagagagaatccagtgcgaataactctgtgtcaccctcggaaagcctccgggccagtgagaagcaccggggctctgcggactacagcatggaagccaagaagcggaaggcggaggagaaggacagcttgagccgatacgacagtgatggagacaagagtgatgatctggtggtggatgtttccaatgaggaccccgcaacgccccgggtcagcccggcacactcccctcctgaaaatgggctggacaaggcccgtagcctgaaaaaagatgcccccaccagccctgcctcggtggcctcttccagtagcacaccttcctccaagaccaaagaccttggtcataacgacaaatcctccacccctgggctcaagtccaacacaccaaccccaaggaacgacgccccaactccaggcaccagcacgaccccagggctcaggtcgatgccgggtaaacctccgggcatggacccgatagcctcggctctgcgcacgcccatctccatcaccagctcctatgcggcgcccttcgccatgatgagccaccatgagatgaacggctccctcaccagtcctggcgcctacgccggcctccacaacatcccaccccagatgagcgccgccgccgctgctgcagccgctgcctatggccgatcgccaatgtgagcttggagctgttggttttgaccctcaccccccgatgcgggccacaggcctcccctcaagcctggcctccattcctggaggaaaaccagcgtactcattccatgtgagtgctgatgggcagatgcagcccgtgcccttcccccacgacgccctggcaggccccggcatcccgaggcacgcccggcagatcaacacactcagccacggggaggtggtgtgtgccgtgaccatcagcaaccccacgaggcacgtctacacaggtggcaagggctgcgtgaagatctgggacatcagccagccaggcagcgtccagagtctctctgggtctcagatgtccatctgccacctcttgttaaggctctagccagaagggagggtgagggtagaagaaagttattcccgaagaaaaaaagaatgaaaagtcattgtactgaactgtttttatatttttaaaagttactatttaaaggttggtttgattgttgcgtcttaattgcctctcctcccagtttgccagtcccgccccccgccccccgggaaaacagccaggccactgttgctgtcacattctggagcctgggccagggccatttcccatcgatgtgagctcttctcatctcacagcattccctgcgctgcttccacccccttctccccttccagatacccagcatcgcagcagggatttcacaatcccatactgtgtcgcctcccatccaagcgccagggagggtggggggtaggagctaagacttcctctggacagatgggcagggcagagttcactgaggtgaaggaagaccacaggttaacaccaaagtattgtacagctgtcaatgcaaaacttttttggaaaaaaattaaacgtaatgaacttgaagcgaaactgcaaagtgtctgt

SEQ ID NO: 451998 - DNA, 2005 bp, Homo sapiens
tcctcctcctggcgcatgtctgcaactactctatagaatatctgatcatttatctggcatgcaacaatgttgtgctgggggatgggggggtctctctttgccgattgtgcagtgcacaagatttgtgaaaaatgtaaataacagactcctattgcggactgatcagtgggagaggaggccccttcccaccggaaactctgagtgtgtatttcgcctgctgtatttgtaatccactcgtggtggtggctttttttttttttttttttaaataaacagatgctctcacctgggaagaggagacagggaggggaaccaattgaagaaagaggagaaaagtcttagagtgtggaaaaggcaaccaggttggccgtaaggtgcctgctggaatgcgtgtgcctccacacgggtctgggcatccggactgataaccagccggccagactgagggatggaaggcactgagatgggggcccgtccaggcggacacccgcagaaatggagctttctgtggtctcttgcactctggctgcctcttgccctctctgtgtctctctttcttggtctctccctctctcctcctcagcctggtctttctctttggtgcacacttagttattgttgtgagcaatggaagttcaaaggaactccctctccagctcttctgaatcttgggacacagcctaaaaaggacaaaaagttagaagacagcatagcaactcagctcagggagctaccagagaaaaatagcaactgatgtgggtgcttttttttttttttaatttgaataaaaagaattagaagtgatgtccttttataaaatgccttctcccccttcccgcctacagtctcttcctctccccttagaggggggaaagtgtataaacctacagggttgtgagtctgaaaagaggatccccctcacccccaccctgggcagagcagtgggggttggggggtgggagagggggacacagatcctggcacactgtggatatttcttgcagattgcagtctcttgtggcccaaacaggttaggtagactatcgcctctggcaggtgccaccttttggtaccaacatgttctgaggtgttaggatttgggttgggttttttttgtttgttttttttttccttttggtctttttttttttctccttttaaagaaaagctaaaggccgctgtgagtcctggtggcaggctctccatggatgtagcatatcgaagataatttttatactgcatttttatggattattttgtaatgtgtgattccgtctgctgaggaggtgggaggggctccagggaaagccacccaccttcagtgaggttgctccccagctgagcgcaccgggcatgggatgtggaggctggcgacacaccctgtgcctctccaaggctgggcgcgtggggcgtccagagtctctctgggtctcagatgtccatctgccacctcttgttaaggctctagccagaagggagggtgagggtagaagaaagttattcccgaagaaaaaaagaatgaaaagtcattgtactgaactgtttttatatttttaaaagttactatttaaaggttggtttgattgttgcgtcttaattgcctctcctcccagtttgccagtcccgccccccgccccccgggaaaacagccaggccactgttgctgtcacattctggagcctgggccagggccatttcccatcgatgtgagctcttctcatctcacagcattccctgcgctgcttccacccccttctccccttccagatacccagcatcgcagcagggatttcacaatcccatactgtgtcgcctcccatccaagcgccagggagggtggggggtaggagctaagacttcctctggacagatgggcagggcagagttcactgaggtgaaggaagaccacaggttaacaccaaagtattgtacagctgtcaatgcaaaacttttttggaaaaaaattaaacgtaatgaacttgaagcgaaactgcaaagtgtctgt

SEQ ID NO: 451999 - DNA, 1354 bp, Homo sapiens
tcagtcggtcccctctcaagacctgcgggggggcagaagcaggaagcagcattttgagggcagaagcaggaagcaggagctaccagagaaaaatagcaactgatgtgggtgcttttttttttttttaatttgaataaaaagaattagaagtgatgtccttttataaaatgccttctcccccttcccgcctacagtctcttcctctccccttagaggggggaaagtgtataaacctacagggttgtgagtctgaaaagaggatccccctcacccccaccctgggcagagcagtgggggttggggggtgggagagggggacacagatcctggcacactgtggatatttcttgcagattgcagtctcttgtggcccaaacaggttaggtagactatcgcctctggcaggtgccaccttttggtaccaacatgttctgaggtgttaggatttgggttgggttttttttgtttgttttttttttccttttggtctttttttttttctccttttaaagaaaagctaaaggccgctgtgagtcctggtggcaggctctccatggatgtagcatatcgaagataatttttatactgcatttttatggattattttgtaatgtgtgattccgtctgctgaggaggtgggaggggctccagggaaagccacccaccttcagtgaggttgctccccagctgagcgcaccgggcatgggatgtggaggctggcgacacaccctgtgcctctccaaggctgggcgcgtggggcgtccagagtctctctgggtctcagatgtccatctgccacctcttgttaaggctctagccagaagggagggtgagggtagaagaaagttattcccgaagaaaaaaagaatgaaaagtcattgtactgaactgtttttatatttttaaaagttactatttaaaggttggtttgattgttgcgtcttaattgcctctcctcccagtttgccagtcccgccccccgccccccgggaaaacagccaggccactgttgctgtcacattctggagcctgggccagggccatttcccatcgatgtgagctcttctcatctcacagcattccctgcgctgcttccacccccttctccccttccagatacccagcatcgcagcagggatttcacaatcccatactgtgtcgcctcccatccaagcgccagggagggtggggggtaggagctaagacttcctctggacagatgggcagggcagagttcactgaggtgaaggaagaccacaggttaacaccaaagtattgtacagctgtcaatgcaaaacttttttggaaaaaaattaaacgtaatgaacttgaagcgaaactgcaaagtgtctgt

SEQ ID NO: 452000 - DNA, 2884 bp, Homo sapiens
  misc_feature (2754)..(2754): n is a, c, g, or t
  misc_feature (2757)..(2757): n is a, c, g, or t
actataatatatatctatttattatatgtctttcggttaattcctgatctgaggagcgctgtttttcactcccatgcgaaagtcaccagcgggtagggcctgattgctacttttcatgcatagttttagacacaagagggcattgtgacgtcgcgcccagcggcacccagtcgtaggccgagtcccgcagccccacgtgggggccccgcgctcccattggccagcgccggacgaagctgccacattattttgttacttttcagtccctatttggaactgctctcgcggcagttcagacctcgtgctcgtccccttcgcctgtctgtgtgtggtatccgtaggtccggggcactttttttttggtgtgtgtgtgtgtgcgtgcgcgcgtgtgtgtgtgttgggtgtgtgtgttttgggggtttgccggggcgcggagaggagagccgggccgaggggaaggaaggaagccgtagagctccccggtctcgggctgcgtctcccctccagcgctctcctgcctgtgcgctccgacgcggcagcggcggtggcgctgagcgctcctcggtggggacgcggtgctcaagctgggagcagcgagaaccctttgcggaggcttcccgtgcccgctggacttaggatgccagggcgtttgatttgcacctactgagcccggagttcctccccggccctgggaagggcttgcagcggcggcggcggcggcggcagcggcagtagcagacggaacagcaggctctcctctccgagggggggcgtcgaagcgcccgcgccgggctcccgccctcaccctccggcgctcctgcggccccaagccaccacctcgtagcccgcctccttcctcttctcgccgcgagccccaggcccggacgcctctaggatcggacccgcgcgccccggatgcttggggctgccccggcgcgcccccctacaggcgcgacccgctgagtgacccggagggggcccgagctcgccccaggaggggcccccggcctcgggaccccgcgccggacctgctggggagccgacgatgtccgcgcagtcccaggcattgacgcgctcgacgcagcccagggaaggcggccggccgctgcccgccgagccctaggcgcacaaagcccgcgcccgccgcccggccccggcgcccgccgacgactttgccgcctgctccgcggctctttgtctccacttggggcgggcgcccgactctgggatttcgctgcgagaacgagctgggggggccgggggcgagctctcggtttcccggccgccccccgctcgggctcggctcccccctcccccgcacctccccggcccgggctctcggcgcttccacgctctcggaatcacgacccctccctgccatgtatccgcagggcagacatccggctccccatcaacccgggcagccgggatttaaattcacggtggctgagtcttgtgacaggatcaaagacgaattccagttcctgcaagctcagtatcacagcctcaaagtggagtacgacaagctggcaaacgagaagacggagatgcagcgccattatgtgatgtactatgagatgtcctatggcttgaacattgaaatgcacaagcagacagagattgcgaagagactgaacacaattttagcacagatcatgcctttcctgtcacaagagcaccagcagcaggtggcgcaggcagtggagcgcgccaagcaggtcaccatgacggagctgaacgccatcatcgggcagcagcagctccaggcgcagcacctctcccatgccacacacggccccccggtccagttgccaccccacccgtcaggtctccagcctccaggaatccccccagtgacagggagcagctccgggctgctggcactgggcgccctgggcagccaggcccatctgacggtgaaggatgagaagaaccaccatgaactcgatcacagagagagagaatccagtgcgaataactctgtgtcaccctcggaaagcctccgggccagtgagaagcaccggggctctgcggactacagcatggaagccaagaagcggaaggcggaggagaaggacagcttgagccgatacgacagtgatggagacaagagtgatgatctggtggtggatgtttccaatgaggaccccgcaacgccccgggtcagcccggcacactcccctcctgaaaatgggctggacaaggcccgtagcctgaaaaaagatgcccccaccagccctgcctcggtggcctcttccagtagcacaccttcctccaagaccaaagaccttggtcataacgacaaatcctccacccctgggctcaagtccaacacaccaaccccaaggaacgacgccccaactccaggcaccagcacgaccccagggctcaggtcgatgccgggtaaacctccgggcatggacccgatagcctcggctctgcgcacgcccatctccatcaccagctcctatgcggcgcccttcgccatgatgagccaccatgagatgaacggctccctcaccagtcctggcgcctacgccggcctccacaacatcccaccccagatgagcgccgccgccgctgctgcagccgctgcctatggccgatcgccaatgtgagcttggagctctttggagctgttggttttgaccctcaccccccgatgcgggccacaggcctcccctcaagcctggcctccattcctggaggaaaaccaacagaaatccaatctagagctgctccgcatctccctgntgntcatcgagtcgtggctggatgccttcctctaggtcctttaggaggtgatagtcatcgctgtccgaggtgtcatacaccaggttgttggcgaacatactcctgaggaaccgcacgggctccagccacg

SEQ ID NO: 452001 - DNA, 2497 bp, Homo sapiens
actataatatatatctatttattatatgtctttcggttaattcctgatctgaggagcgctgtttttcactcccatgcgaaagtcaccagcgggtagggcctgattgctacttttcatgcatagttttagacacaagagggcattgtgacgtcgcgcccagcggcacccagtcgtaggccgagtcccgcagccccacgtgggggccccgcgctcccattggccagcgccggacgaagctgccacattattttgttacttttcagtccctatttggaactgctctcgcggcagttcagacctcgtgctcgtccccttcgcctgtctgtgtgtggtatccgtaggtccggggcactttttttttggtgtgtgtgtgtgtgcgtgcgcgcgtgtgtgtgtgttgggtgtgtgtgttttgggggtttgccggggcgcggagaggagagccgggccgaggggaaggaaggaagccgtagagctccccggtctcgggctgcgtctcccctccagcgctctcctgcctgtgcgctccgacgcggcagcggcggtggcgctgagcgctcctcggtggggacgcggtgctcaagctgggagcagcgagaaccctttgcggaggcttcccgtgcccgctggacttaggatgccagggcgtttgatttgcacctactgagcccggagttcctccccggccctgggaagggcttgcagcggcggcggcggcggcggcagcggcagtagcagacggaacagcaggctctcctctccgagggggggcgtcgaagcgcccgcgccgggctcccgccctcaccctccggcgctcctgcggccccaagccaccacctcgtagcccgcctccttcctcttctcgccgcgagccccaggcccggacgcctctaggatcggacccgcgcgccccggatgcttggggctgccccggcgcgcccccctacaggcgcgacccgctgagtgacccggagggggcccgagctcgccccaggaggggcccccggcctcgggaccccgcgccggacctgctggggagccgacgatgtccgcgcagtcccaggcattgacgcgctcgacgcagcccagggaaggcggccggccgctgcccgccgagccctaggcgcacaaagcccgcgcccgccgcccggccccggcgcccgccgacgactttgccgcctgctccgcggctctttgtctccacttggggcgggcgcccgactctgggatttcgctgcgagaacgagctgggggggccgggggcgagctctcggtttcccggccgccccccgctcgggctcggctcccccctcccccgcacctccccggcccgggctctcggcgcttccacgctctcggaatcacgacccctccctgccatgtatccgcagggcagacatccggctccccatcaacccgggcagccgggatttaaattcacggtggctgagtcttgtgacaggatcaaagacgaattccagttcctgcaagctcagtatcacagcctcaaagtggagtacgacaagctggcaaacgagaagacggagatgcagcgccattatgtgatgtactatgagatgtcctatggcttgaacattgaaatgcacaagcagacagagattgcgaagagactgaacacaattttagcacagatcatgcctttcctgtcacaagagcaccagcagcaggtggcgcaggcagtggagcgcgccaagcaggtcaccatgacggagctgaacgccatcatcgggcagcagcagctccaggcgcagcacctctcccatgccacacacggccccccggtccagttgccaccccacccgtcaggtctccagcctccaggaatccccccagtgacagggagcagctccgggctgctggcactgggcgccctgggcagccaggcccatctgacggtgaaggatgagaagaaccaccatgaactcgatcacagagagagagaatccagtgcgaataactctgtgtcaccctcggaaagcctccgggccagtgagaagcaccggggctctgcggactacagcatggaagccaagaagcggaaggcggaggagaaggacagcttgagccgatacgacagtgatggagacaagagtgatgatctggtggtggatgtttccaatgaggaccccgcaacgccccgggtcagcccggcacactcccctcctgaaaatgggctggacaaggcccgtagcctgaaaaaagatgcccccaccagccctgcctcggtggcctcttccagtagcacaccttcctccaagaccaaagaccttggtcataacgacaaatcctccacccctgggctcaagtccaacacaccaaccccaaggaacgacgccccaactccaggcaccagcacgaccccagggctcaggtcgatgccgggtaaacctccgggcatggacccgatagtataatgggtaggcaccatgggctgggttaatctgattggggggagggggtctgctcttggccaggg

SEQ ID NO: 452002 - DNA, 2193 bp, Homo sapiens
actataatatatatctatttattatatgtctttcggttaattcctgatctgaggagcgctgtttttcactcccatgcgaaagtcaccagcgggtagggcctgattgctacttttcatgcatagttttagacacaagagggcattgtgacgtcgcgcccagcggcacccagtcgtaggccgagtcccgcagccccacgtgggggccccgcgctcccattggccagcgccggacgaagctgccacattattttgttacttttcagtccctatttggaactgctctcgcggcagttcagacctcgtgctcgtccccttcgcctgtctgtgtgtggtatccgtaggtccggggcactttttttttggtgtgtgtgtgtgtgcgtgcgcgcgtgtgtgtgtgttgggtgtgtgtgttttgggggtttgccggggcgcggagaggagagccgggccgaggggaaggaaggaagccgtagagctccccggtctcgggctgcgtctcccctccagcgctctcctgcctgtgcgctccgacgcggcagcggcggtggcgctgagcgctcctcggtggggacgcggtgctcaagctgggagcagcgagaaccctttgcggaggcttcccgtgcccgctggacttaggatgccagggcgtttgatttgcacctactgagcccggagttcctccccggccctgggaagggcttgcagcggcggcggcggcggcggcagcggcagtagcagacggaacagcaggctctcctctccgagggggggcgtcgaagcgcccgcgccgggctcccgccctcaccctccggcgctcctgcggccccaagccaccacctcgtagcccgcctccttcctcttctcgccgcgagccccaggcccggacgcctctaggatcggacccgcgcgccccggatgcttggggctgccccggcgcgcccccctacaggcgcgacccgctgagtgacccggagggggcccgagctcgccccaggaggggcccccggcctcgggaccccgcgccggacctgctggggagccgacgatgtccgcgcagtcccaggcattgacgcgctcgacgcagcccagggaaggcggccggccgctgcccgccgagccctaggcgcacaaagcccgcgcccgccgcccggccccggcgcccgccgacgactttgccgcctgctccgcggctctttgtctccacttggggcgggcgcccgactctgggatttcgctgcgagaacgagctgggggggccgggggcgagctctcggtttcccggccgccccccgctcgggctcggctcccccctcccccgcacctccccggcccgggctctcggcgcttccacgctctcggaatcacgacccctccctgccatgtatccgcagggcagacatccggctccccatcaacccgggcagccgggatttaaattcacggtggctgagtcttgtgacaggatcaaagacgaattccagttcctgcaagctcagtatcacagcctcaaagtggagtacgacaagctggcaaacgagaagacggagatgcagcgccattatgtgatgtactatgagatgtcctatggcttgaacattgaaatgcacaagcagacagagattgcgaagagactgaacacaattttagcacagatcatgcctttcctgtcacaagagcaccagcagcaggtggcgcaggcagtggagcgcgccaagcaggtcaccatgacggagctgaacgccatcatcggggtacgtggactccccaatctgcctcttacccagcagcagctccaggcgcagcacctctcccatgccacacacggccccccggtccagttgccaccccacccgtcaggtctccagcctccaggaatccccccagtgacagggagcagctccgggctgctggcactgggcgccctgggcagccaggcccatctgacggtgaaggatgagaagaaccaccatgaactcgatcacagagagagagaatccagtgcgaataactctgtgtcaccctcggaaagcctccgggccagtgagaagcaccggggctctgcggactacagcatggaagccaagaagcggaaggcggaggagaaggacagcttgagccgatacgacagtgatggggaagggaagggaagaaagaagagaaggaagggaaggaagagaaaaagagaaagagaag

SEQ ID NO: 452003 - DNA, 2811 bp, Homo sapiens
actataatatatatctatttattatatgtctttcggttaattcctgatctgaggagcgctgtttttcactcccatgcgaaagtcaccagcgggtagggcctgattgctacttttcatgcatagttttagacacaagagggcattgtgacgtcgcgcccagcggcacccagtcgtaggccgagtcccgcagccccacgtgggggccccgcgctcccattggccagcgccggacgaagctgccacattattttgttacttttcagtccctatttggaactgctctcgcggcagttcagacctcgtgctcgtccccttcgcctgtctgtgtgtggtatccgtaggtccggggcactttttttttggtgtgtgtgtgtgtgcgtgcgcgcgtgtgtgtgtgttgggtgtgtgtgttttgggggtttgccggggcgcggagaggagagccgggccgaggggaaggaaggaagccgtagagctccccggtctcgggctgcgtctcccctccagcgctctcctgcctgtgcgctccgacgcggcagcggcggtggcgctgagcgctcctcggtggggacgcggtgctcaagctgggagcagcgagaaccctttgcggaggcttcccgtgcccgctggacttaggatgccagggcgtttgatttgcacctactgagcccggagttcctccccggccctgggaagggcttgcagcggcggcggcggcggcggcagcggcagtagcagacggaacagcaggctctcctctccgagggggggcgtcgaagcgcccgcgccgggctcccgccctcaccctccggcgctcctgcggccccaagccaccacctcgtagcccgcctccttcctcttctcgccgcgagccccaggcccggacgcctctaggatcggacccgcgcgccccggatgcttggggctgccccggcgcgcccccctacaggcgcgacccgctgagtgacccggagggggcccgagctcgccccaggaggggcccccggcctcgggaccccgcgccggacctgctggggagccgacgatgtccgcgcagtcccaggcattgacgcgctcgacgcagcccagggaaggcggccggccgctgcccgccgagccctaggcgcacaaagcccgcgcccgccgcccggccccggcgcccgccgacgactttgccgcctgctccgcggctctttgtctccacttggggcgggcgcccgactctgggatttcgctgcgagaacgagctgggggggccgggggcgagctctcggtttcccggccgccccccgctcgggctcggctcccccctcccccgcacctccccggcccgggctctcggcgcttccacgctctcggaatcacgacccctccctgccatgtatccgcagggcagacatccggctccccatcaacccgggcagccgggatttaaattcacggtggctgagtcttgtgacaggatcaaagacgaattccagttcctgcaagctcagtatcacagcctcaaagtggagtacgacaagctggcaaacgagaagacggagatgcagcgccattatgtgatgtactatgagatgtcctatggcttgaacattgaaatgcacaagcagacagagattgcgaagagactgaacacaattttagcacagatcatgcctttcctgtcacaagagcaccagcagcaggtggcgcaggcagtggagcgcgccaagcaggtcaccatgacggagctgaacgccatcatcggggtacgtggactccccaatctgcctcttaccgtgtgtatagcccttttattcctctcatttatcataaccagagattgaccctgaccttagctggcctcaaagaatggcggccccagggctccggcttctacaagcaccccaagggcttggacccatgtagggctgtttcccccttggctcccagttgcctcctagtcctcaaactaaaggggagccagacacgcctcaaatccacctcttcagccatctgcctcatcttccactggcttttggtgtccttgccattgaggagggtgggggcctagggtcaccttcaaggccaggccagctggccagtacctggccacctcctcacacttaccccggggcctgtctgcctcctccctggcagaagtctgcccttctttggccacctgggatcagaacagtctctgctgtactgttgatgtgcatcgtgctgtggaatttgggtttacgtcttgctgtcccatgcgcgaagctgcctggctgagcattcatcatgtacgcttgtgaactccagctggggagctgagactggttttcctgactttctagaagtcccgtctcccctttacacaggaagacatacccaagagtgctctgtgaggcccacttccggactggccccttagtggaaaagggaagctgggtctacctggcttgtatctttaatgcatttcttaggttcaagtggcatctttctcctgcttgctgctttggtgtgaggctagtgacatttaagataagcacctgaggaagaagagtctttttagtgtgactttgggcaaggctcttacccttggggtgtacctgtccacctttcatctctgaaatgaagagggtggacaggatcactgcttcccagtccacggaggagcttctggacggtacagatacaggggcacttgccccagaggtcttttccataggtctggggatgggactggaaatctgtgttcctaacgatttctagatcattctgaagtgtagttaggcttgggaagcagtagactgattcaactctaacattctgggaacc

SEQ ID NO: 452004 - DNA, 5980 bp, Homo sapiens
actataatatatatctatttattatatgtctttcggttaattcctgatctgaggagcgctgtttttcactcccatgcgaaagtcaccagcgggtagggcctgattgctacttttcatgcatagttttagacacaagagggcattgtgacgtcgcgcccagcggcacccagtcgtaggccgagtcccgcagccccacgtgggggccccgcgctcccattggccagcgccggacgaagctgccacattattttgttacttttcagtccctatttggaactgctctcgcggcagttcagacctcgtgctcgtccccttcgcctgtctgtgtgtggtatccgtaggtccggggcactttttttttggtgtgtgtgtgtgtgcgtgcgcgcgtgtgtgtgtgttgggtgtgtgtgttttgggggtttgccggggcgcggagaggagagccgggccgaggggaaggaaggaagccgtagagctccccggtctcgggctgcgtctcccctccagcgctctcctgcctgtgcgctccgacgcggcagcggcggtggcgctgagcgctcctcggtggggacgcggtgctcaagctgggagcagcgagaaccctttgcggaggcttcccgtgcccgctggacttaggatgccagggcgtttgatttgcacctactgagcccggagttcctccccggccctgggaagggcttgcagcggcggcggcggcggcggcagcggcagtagcagacggaacagcaggctctcctctccgagggggggcgtcgaagcgcccgcgccgggctcccgccctcaccctccggcgctcctgcggccccaagccaccacctcgtagcccgcctccttcctcttctcgccgcgagccccaggcccggacgcctctaggatcggacccgcgcgccccggatgcttggggctgccccggcgcgcccccctacaggcgcgacccgctgagtgacccggagggggcccgagctcgccccaggaggggcccccggcctcgggaccccgcgccggacctgctggggagccgacgatgtccgcgcagtcccaggcattgacgcgctcgacgcagcccagggaaggcggccggccgctgcccgccgagccctaggcgcacaaagcccgcgcccgccgcccggccccggcgcccgccgacgactttgccgcctgctccgcggctctttgtctccacttggggcgggcgcccgactctgggatttcgctgcgagaacgagctgggggggccgggggcgagctctcggtttcccggccgccccccgctcgggctcggctcccccctcccccgcacctccccggcccgggctctcggcgcttccacgctctcggaatcacgacccctccctgccatgtatccgcagggcagacatccggctccccatcaacccgggcagccgggatttaaattcacggtggctgagtcttgtgacaggatcaaagacgaattccagttcctgcaagctcagtatcacagcctcaaagtggagtacgacaagctggcaaacgagaagacggagatgcagcgccattatgtgatgtactatgagatgtcctatggcttgaacattgaaatgcacaagcagacagagattgcgaagagactgaacacaattttagcacagatcatgcctttcctgtcacaagagcaccagcagcaggtggcgcaggcagtggagcgcgccaagcaggtcaccatgacggagctgaacgccatcatcgggcagcagcagctccaggcgcagcacctctcccatgccacacacggccccccggtccagttgccaccccacccgtcaggtctccagcctccaggaatccccccagtgacagggagcagctccgggctgctggcactgggcgccctgggcagccaggcccatctgacggtgaaggatgagaagaaccaccatgaactcgatcacagagagagagaatccagtgcgaataactctgtgtcaccctcggaaagcctccgggccagtgagaagcaccggggctctgcggactacagcatggaagccaagaagcggaaggcggaggagaaggacagcttgagccgatacgacagtgatggagacaagagtgatgatctggtggtggatgtttccaatgaggaccccgcaacgccccgggtcagcccggcacactcccctcctgaaaatgggctggacaaggcccgtagcctgaaaaaagatgcccccaccagccctgcctcggtggcctcttccagtagcacaccttcctccaagaccaaagaccttggtcataacgacaaatcctccacccctgggctcaagtccaacacaccaaccccaaggaacgacgccccaactccaggcaccagcacgaccccagggctcaggtcgatgccggcctcggctctgcgcacgcccatctccatcaccagctcctatgcggcgcccttcgccatgatgagccaccatgagatgaacggctccctcaccagtcctggcgcctacgccggcctccacaacatcccaccccagatgagcgccgccgccgctgctgcagccgctgcctatggccgatcgccaatgtgagcttggagctgttggttttgaccctcaccccccgatgcgggccacaggcctcccctcaagcctggcctccattcctggaggaaaaccagcgtactcattccatgtgagtgctgatgggcagatgcagcccgtgcccttcccccacgacgccctggcaggccccggcatcccgaggcacgcccggcagatcaacacactcagccacggggaggtggtgtgtgccgtgaccatcagcaaccccacgaggcacgtctacacaggtggcaagggctgcgtgaagatctgggacatcagccagccaggcagcaagagccccatctcccagctggactgcctgaacagggacaattacatccgctcctgcaagctgctccctgatgggcgcacgctcatcgtgggcggcgaggccagcacgctcaccatctgggacctggcctcgcccacgccccgcatcaaggccgagctgacgtcctcggctcccgcctgttatgccctggccattagccctgacgccaaagtctgcttctcctgctgcagcgatgggaacattgctgtctgggacctgcacaaccagaccctggtcaggcagttccagggccacacagatggggccagctgcatagacatctcccatgatggcaccaaactgtggacagggggcctggacaacacggtgcgctcctgggacctgcgggagggccgacagctacagcagcatgacttcacttcccagatcttctcgctgggctactgccccactggggagtggctggctgtgggcatggagagcagcaacgtggaggtgctgcaccacaccaagcctgacaagtaccagctgcacctgcacgagagctgcgtgctctccctcaagttcgcctactgcggcaagtggttcgtgagcactgggaaagataaccttctcaacgcctggaggacgccttatggagccagcatattccagtctaaagaatcctcgtctgtcttgagttgtgacatttcagcggatgacaaatacattgtaacaggctctggtgacaagaaggccacagtttatgaggtcatctactaaacaagaactccagcagggctgtcaaactctgggagaaaccgactcggctctgacagggagacccccaggcgaggggccccgaggatggcggaggatgggccgcaggcagccgagcgttcagggctgcgctccggccggctgagagggcacgtgccccgtcacagtctggactcctgggcctggattgatgtgtctcacagactcggaagggttctgctcctcctcctccccctgaacaatgctggcagttgctacaaatagatttattggaggcttatggctccggttcccccacagacccgctcatgagtctctgtttgttcttcccttttcttttgccctgtccctcaccttgggtcgggggtgctggagtggaccacaatgttgtgctgggggatgggggggtctctctttgccgattgtgcagtgcacaagatttgtgaaaaatgtaaataacagactcctattgcggactgatcagtgggagaggaggccccttcccaccggaaactctgagtgtgtatttcgcctgctgtatttgtaatccactcgtggtggtggctttttttttttttttttttaaataaacagatgctctcacctgggaagaggagacagggaggggaaccaattgaagaaagaggagaaaagtcttagagtgtggaaaaggcaaccaggttggccgtaaggtgcctgctggaatgcgtgtgcctccacacgggtctgggcatccggactgataaccagccggccagactgagggatggaaggcactgagatgggggcccgtccaggcggacacccgcagaaatggagctttctgtggtctcttgcactctggctgcctcttgccctctctgtgtctctctttcttggtctctccctctctcctcctcagcctggtctttctctttggtgcacacttagttattgttgtgagcaatggaagttcaaaggaactccctctccagctcttctgaatcttgggacacagcctaaaaaggacaaaaagttagaagacagcatagcaactcagctcagggagctaccagagaaaaatagcaactgatgtgggtgcttttttttttttttaatttgaataaaaagaattagaagtgatgtccttttataaaatgccttctcccccttcccgcctacagtctcttcctctccccttagaggggggaaagtgtataaacctacagggttgtgagtctgaaaagaggatccccctcacccccaccctgggcagagcagtgggggttggggggtgggagagggggacacagatcctggcacactgtggatatttcttgcagattgcagtctcttgtggcccaaacaggttaggtagactatcgcctctggcaggtgccaccttttggtaccaacatgttctgaggtgttaggatttgggttgggttttttttgtttgttttttttttccttttggtctttttttttttctccttttaaagaaaagctaaaggccgctgtgagtcctggtggcaggctctccatggatgtagcatatcgaagataatttttatactgcatttttatggattattttgtaatgtgtgattccgtctgctgaggaggtgggaggggctccagggaaagccacccaccttcagtgaggttgctccccagctgagcgcaccgggcatgggatgtggaggctggcgacacaccctgtgcctctccaaggctgggcgcgtggggcgtccagagtctctctgggtctcagatgtccatctgccacctcttgttaaggctctagccagaagggagggtgagggtagaagaaagttattcccgaagaaaaaaagaatgaaaagtcattgtactgaactgtttttatatttttaaaagttactatttaaaggttggtttgattgttgcgtcttaattgcctctcctcccagtttgccagtcccgccccccgccccccgggaaaacagccaggccactgttgctgtcacattctggagcctgggccagggccatttcccatcgatgtgagctcttctcatctcacagcattccctgcgctgcttccacccccttctccccttccagatacccagcatcgcagcagggatttcacaatcccatactgtgtcgcctcccatccaagcgccagggagggtggggggtaggagctaagacttcctctggacagatgggcagggcagagttcactgaggtgaaggaagaccacaggttaacaccaaagtattgtacagctgtcaatgcaaaacttttttggaaaaaaattaaacgtaatgaacttgaagcgaaactgcaaagtgtctgt

SEQ ID NO: 452005 - DNA, 4805 bp, Homo sapiens
actataatatatatctatttattatatgtctttcggttaattcctgatctgaggagcgctgtttttcactcccatgcgaaagtcaccagcgggtagggcctgattgctacttttcatgcatagttttagacacaagagggcattgtgacgtcgcgcccagcggcacccagtcgtaggccgagtcccgcagccccacgtgggggccccgcgctcccattggccagcgccggacgaagctgccacattattttgttacttttcagtccctatttggaactgctctcgcggcagttcagacctcgtgctcgtccccttcgcctgtctgtgtgtggtatccgtaggtccggggcactttttttttggtgtgtgtgtgtgtgcgtgcgcgcgtgtgtgtgtgttgggtgtgtgtgttttgggggtttgccggggcgcggagaggagagccgggccgaggggaaggaaggaagccgtagagctccccggtctcgggctgcgtctcccctccagcgctctcctgcctgtgcgctccgacgcggcagcggcggtggcgctgagcgctcctcggtggggacgcggtgctcaagctgggagcagcgagaaccctttgcggaggcttcccgtgcccgctggacttaggatgccagggcgtttgatttgcacctactgagcccggagttcctccccggccctgggaagggcttgcagcggcggcggcggcggcggcagcggcagtagcagacggaacagcaggctctcctctccgagggggggcgtcgaagcgcccgcgccgggctcccgccctcaccctccggcgctcctgcggccccaagccaccacctcgtagcccgcctccttcctcttctcgccgcgagccccaggcccggacgcctctaggatcggacccgcgcgccccggatgcttggggctgccccggcgcgcccccctacaggcgcgacccgctgagtgacccggagggggcccgagctcgccccaggaggggcccccggcctcgggaccccgcgccggacctgctggggagccgacgatgtccgcgcagtcccaggcattgacgcgctcgacgcagcccagggaaggcggccggccgctgcccgccgagccctaggcgcacaaagcccgcgcccgccgcccggccccggcgcccgccgacgactttgccgcctgctccgcggctctttgtctccacttggggcgggcgcccgactctgggatttcgctgcgagaacgagctgggggggccgggggcgagctctcggtttcccggccgccccccgctcgggctcggctcccccctcccccgcacctccccggcccgggctctcggcgcttccacgctctcggaatcacgacccctccctgccatgtatccgcagggcagacatccggctccccatcaacccgggcagccgggatttaaattcacggtggctgagtcttgtgacaggatcaaagacgaattccagttcctgcaagctcagtatcacagcctcaaagtggagtacgacaagctggcaaacgagaagacggagatgcagcgccattatgtgatgtactatgagatgtcctatggcttgaacattgaaatgcacaagcagacagagattgcgaagagactgaacacaattttagcacagatcatgcctttcctgtcacaagagcaccagcagcaggtggcgcaggcagtggagcgcgccaagcaggtcaccatgacggagctgaacgccatcatcgggcagcagcagctccaggcgcagcacctctcccatgccacacacggccccccggtccagttgccaccccacccgtcaggtctccagcctccaggaatccccccagtgacagggagcagctccgggctgctggcactgggcgccctgggcagccaggcccatctgacggtgaaggatgagaagaaccaccatgaactcgatcacagagagagagaatccagtgcgaataactctgtgtcaccctcggaaagcctccgggccagtgagaagcaccggggctctgcggactacagcatggaagccaagaagcggaaggcggaggagaaggacagcttgagccgatacgacagtgatggagacaagagtgatgatctggtggtggatgtttccaatgaggaccccgcaacgccccgggtcagcccggcacactcccctcctgaaaatgggctggacaaggcccgtagcctgaaaaaagatgcccccaccagccctgcctcggtggcctcttccagtagcacaccttcctccaagaccaaagaccttggtcataacgacaaatcctccacccctgggctcaagtccaacacaccaaccccaaggaacgacgccccaactccaggcaccagcacgaccccagggctcaggtcgatgccgggtaaacctccgggcatggacccgatagcctcggctctgcgcacgcccatctccatcaccagctcctatgcggcgcccttcgccatgatgagccaccatgagatgaacggctccctcaccagtcctggcgcctacgccggcctccacaacatcccaccccagatgagcgccgccgccgctgctgcagccgctgcctatggccgatcgccaatgtgagcttggagctgttggttttgaccctcaccccccgatgcgggccacaggcctcccctcaagcctggcctccattcctggaggaaaaccagcgtactcattccatgtgagtgctgatgggcagatgcagcccgtgcccttcccccacgacgccctggcaggccccggcatcccgaggcacgcccggcagatcaacacactcagccacggggaggtggtgtgtgccgtgaccatcagcaaccccacgaggcacgtctacacaggtggcaagggctgcgtgaagatctgggacatcagccagccaggcagcaagagccccatctcccagctggactgcctgaacagggacaattacatccgctcctgcaagctgctccctgatgggcgcacgctcatcgtgggcggcgaggccagcacgctcaccatctgggacctggcctcgcccacgccccgcatcaaggccgagctgacgtcctcggctcccgcctgttatgccctggccattagccctgacgccaaagtctgcttctcctgctgcagcgatgggaacattgctgtctgggacctgcacaaccagaccctggtcaggcagttccagggccacacagatggggccagctgcatagacatctcccatgatggcaccaaactgtggacagggggcctggacaacacggtgcgctcctgggacctgcgggagggccgacagctacagcagcatgacttcacttcccagatcttctcgctgggctactgccccactggggagtggctggctgtgggcatggagagcagcaacgtggaggtgctgcaccacaccaagcctgacaagtaccagctgcacctgcacgagagctgcgtgctctccctcaagttcgcctactgcggcaagtggttcgtgagcactgggaaagataaccttctcaacgcctggaggacgccttatggagccagcatattccagtctaaagaatcctcgtctgtcttgagttgtgacatttcagcggatgacaaatacattgtaacaggctctggtgacaagaaggccacagtttatgaggtcatctactaaacaagaactccagcagggctgtcaaactctgggagaaaccgactcggctctgacagggagacccccaggcgaggggccccgaggatggcggaggatgggccgcaggcagccgagcgttcagggctgcgctccggccggctgagagggcacgtgccccgtcacagtctggactcctgggcctggattgatgtgtctcacagactcggaagggttctgctcctcctcctccccctgaacaatgctggcagttgctacaaatagatttattggaggcttatggctccggttcccccacagacccgctcatgagtctctgtttgttcttcccttttcttttgccctgtccctcaccttgggtcgggggtgctggagtggaccacaatgttgtgctgggggatgggggggtctctctttgccgattgtgcagtgcacaagatttgtgaaaaatgtaaataacagactcctattgcggactgatcagtgggagaggaggccccttcccaccggaaactctgagtgtgtatttcgcctgctgtatttgtaatccactcgtggtggtggctttttttttttttttttttaaataaacagatgctctcacctgggaagaggagacagggaggggaaccaattgaagaaagaggagaaaagtcttagagtgtggaaaaggcaaccaggttggccgtaaggtgcctgctggaatgcgtgtgcctccacacgggtctgggcatccggactgataaccagccggccagactgagggatggaaggcactgagatgggggcccgtccaggcggacacccgcagaaatggagctttctgtggtctcttgcactctggctgcctcttgccctctctgtgtctctctttcttggtctctccctctctcctcctcagcctggtctttctctttggtgcacacttagttattgttgtgagcaatggaagttcaaaggaactccctctccagctcttctgaatcttgggacacagcctaaaaaggacaaaaagttagaagacagcatagcaactcagctcagggagctaccagagaaaaatagcaactgatgtgggtgcttttttttttttttaatttgaataaaaagaattagaagtg

SEQ ID NO: 452006 - DNA, 4498 bp, Homo sapiens
aggaagacgggatcagcgcttatgtgatgtactatgagatgtcctatggcttgaacattgaaatgcacaagcagacagagattgcgaagagactgaacacaattttagcacagatcatgcctttcctgtcacaagagcaccagcagcaggtggcgcaggcagtggagcgcgccaagcaggtcaccatgacggagctgaacgccatcatcggggtacgtggactccccaatctgcctcttacccagcagcagctccaggcgcagcacctctcccatgccacacacggccccccggtccagttgccaccccacccgtcaggtctccagcctccaggaatccccccagtgacagggagcagctccgggctgctggcactgggcgccctgggcagccaggcccatctgacggtgaaggatgagaagaaccaccatgaactcgatcacagagagagagaatccagtgcgaataactctgtgtcaccctcggaaagcctccgggccagtgagaagcaccggggctctgcggactacagcatggaagccaagaagcggaaggcggaggagaaggacagcttgagccgatacgacagtgatggagacaagagtgatgatctggtggtggatgtttccaatgaggaccccgcaacgccccgggtcagcccggcacactcccctcctgaaaatgggctggacaaggcccgtagcctgaaaaaagatgcccccaccagccctgcctcggtggcctcttccagtagcacaccttcctccaagaccaaagaccttggtcataacgacaaatcctccacccctgggctcaagtccaacacaccaaccccaaggaacgacgccccaactccaggcaccagcacgaccccagggctcaggtcgatgccgggtaaacctccgggcatggacccgatagcctcggctctgcgcacgcccatctccatcaccagctcctatgcggcgcccttcgccatgatgagccaccatgagatgaacggctccctcaccagtcctggcgcctacgccggcctccacaacatcccaccccagatgagcgccgccgccgctgctgcagccgctgcctatggccgatcgccaatgtgagcttggagctgttggttttgaccctcaccccccgatgcgggccacaggcctcccctcaagcctggcctccattcctggaggaaaaccagcgtactcattccatgtgagtgctgatgggcagatgcagcccgtgcccttcccccacgacgccctggcaggccccggcatcccgaggcacgcccggcagatcaacacactcagccacggggaggtggtgtgtgccgtgaccatcagcaaccccacgaggcacgtctacacaggtggcaagggctgcgtgaagatctgggacatcagccagccaggcagcaagagccccatctcccagctggactgcctgaacagggacaattacatccgctcctgcaagctgctccctgatgggcgcacgctcatcgtgggcggcgaggccagcacgctcaccatctgggacctggcctcgcccacgccccgcatcaaggccgagctgacgtcctcggctcccgcctgttatgccctggccattagccctgacgccaaagtctgcttctcctgctgcagcgatgggaacattgctgtctgggacctgcacaaccagaccctggtcaggcagttccagggccacacagatggggccagctgcatagacatctcccatgatggcaccaaactgtggacagggggcctggacaacacggtgcgctcctgggacctgcgggagggccgacagctacagcagcatgacttcacttcccagatcttctcgctgggctactgccccactggggagtggctggctgtgggcatggagagcagcaacgtggaggtgctgcaccacaccaagcctgacaagtaccagctgcacctgcacgagagctgcgtgctctccctcaagttcgcctactgcggcaagtggttcgtgagcactgggaaagataaccttctcaacgcctggaggacgccttatggagccagcatattccagtctaaagaatcctcgtctgtcttgagttgtgacatttcagcggatgacaaatacattgtaacaggctctggtgacaagaaggccacagtttatgaggtcatctactaaacaagaactccagcagggctgtcaaactctgggagaaaccgactcggctctgacagggagacccccaggcgaggggccccgaggatggcggaggatgggccgcaggcagccgagcgttcagggctgcgctccggccggctgagagggcacgtgccccgtcacagtctggactcctgggcctggattgatgtgtctcacagactcggaagggttctgctcctcctcctccccctgaacaatgctggcagttgctacaaatagatttattggaggcttatggctccggttcccccacagacccgctcatgagtctctgtttgttcttcccttttcttttgccctgtccctcaccttgggtcgggggtgctggagtggaccacaatgttgtgctgggggatgggggggtctctctttgccgattgtgcagtgcacaagatttgtgaaaaatgtaaataacagactcctattgcggactgatcagtgggagaggaggccccttcccaccggaaactctgagtgtgtatttcgcctgctgtatttgtaatccactcgtggtggtggctttttttttttttttttttaaataaacagatgctctcacctgggaagaggagacagggaggggaaccaattgaagaaagaggagaaaagtcttagagtgtggaaaaggcaaccaggttggccgtaaggtgcctgctggaatgcgtgtgcctccacacgggtctgggcatccggactgataaccagccggccagactgagggatggaaggcactgagatgggggcccgtccaggcggacacccgcagaaatggagctttctgtggtctcttgcactctggctgcctcttgccctctctgtgtctctctttcttggtctctccctctctcctcctcagcctggtctttctctttggtgcacacttagttattgttgtgagcaatggaagttcaaaggaactccctctccagctcttctgaatcttgggacacagcctaaaaaggacaaaaagttagaagacagcatagcaactcagctcagggagctaccagagaaaaatagcaactgatgtgggtgcttttttttttttttaatttgaataaaaagaattagaagtgatgtccttttataaaatgccttctcccccttcccgcctacagtctcttcctctccccttagaggggggaaagtgtataaacctacagggttgtgagtctgaaaagaggatccccctcacccccaccctgggcagagcagtgggggttggggggtgggagagggggacacagatcctggcacactgtggatatttcttgcagattgcagtctcttgtggcccaaacaggttaggtagactatcgcctctggcaggtgccaccttttggtaccaacatgttctgaggtgttaggatttgggttgggttttttttgtttgttttttttttccttttggtctttttttttttctccttttaaagaaaagctaaaggccgctgtgagtcctggtggcaggctctccatggatgtagcatatcgaagataatttttatactgcatttttatggattattttgtaatgtgtgattccgtctgctgaggaggtgggaggggctccagggaaagccacccaccttcagtgaggttgctccccagctgagcgcaccgggcatgggatgtggaggctggcgacacaccctgtgcctctccaaggctgggcgcgtggggcgtccagagtctctctgggtctcagatgtccatctgccacctcttgttaaggctctagccagaagggagggtgagggtagaagaaagttattcccgaagaaaaaaagaatgaaaagtcattgtactgaactgtttttatatttttaaaagttactatttaaaggttggtttgattgttgcgtcttaattgcctctcctcccagtttgccagtcccgccccccgccccccgggaaaacagccaggccactgttgctgtcacattctggagcctgggccagggccatttcccatcgatgtgagctcttctcatctcacagcattccctgcgctgcttccacccccttctccccttccagatacccagcatcgcagcagggatttcacaatcccatactgtgtcgcctcccatccaagcgccagggagggtggggggtaggagctaagacttcctctggacagatgggcagggcagagttcactgaggtgaaggaagaccacaggttaacaccaaagtattgtacagctgtcaatgcaaaacttttttggaaaaaaattaaacgtaatgaacttgaagcgaaactgcaaagtgtctgt

SEQ ID NO: 452007 - DNA, 4138 bp, Homo sapiens
atgatacaatcgagctcggtacctgaacattcgtgtccacggggagaccgtgttgagctggagtggagcctgttgaagggcagggctggagtagaaagcatggactttggggtttggcctggcttcaggtcctggccagtagaaggacagggtggtttgggctcagtcaggggtggggaaagtgtggcctcttactgaccagttggcttctctcttggttgcaggacagtgatggagacaagagtgatgatctggtggtggatgtttccaatgaggaccccgcaacgccccgggtcagcccggcacactcccctcctgaaaatgggctggacaaggcccgtagcctgaaaaaagatgcccccaccagccctgcctcggtggcctcttccagtagcacaccttcctccaagaccaaagaccttggtcataacgacaaatcctccacccctgggctcaagtccaacacaccaaccccaaggaacgacgccccaactccaggcaccagcacgaccccagggctcaggtcgatgccgggtaaacctccgggcatggacccgatagcctcggctctgcgcacgcccatctccatcaccagctcctatgcggcgcccttcgccatgatgagccaccatgagatgaacggctccctcaccagtcctggcgcctacgccggcctccacaacatcccaccccagatgagcgccgccgccgctgctgcagccgctgcctatggccgatcgccaatgtgagcttggagctgttggttttgaccctcaccccccgatgcgggccacaggcctcccctcaagcctggcctccattcctggaggaaaaccagcgtactcattccatgtgagtgctgatgggcagatgcagcccgtgcccttcccccacgacgccctggcaggccccggcatcccgaggcacgcccggcagatcaacacactcagccacggggaggtggtgtgtgccgtgaccatcagcaaccccacgaggcacgtctacacaggtggcaagggctgcgtgaagatctgggacatcagccagccaggcagcaagagccccatctcccagctggactgcctgaacagggacaattacatccgctcctgcaagctgctccctgatgggcgcacgctcatcgtgggcggcgaggccagcacgctcaccatctgggacctggcctcgcccacgccccgcatcaaggccgagctgacgtcctcggctcccgcctgttatgccctggccattagccctgacgccaaagtctgcttctcctgctgcagcgatgggaacattgctgtctgggacctgcacaaccagaccctggtcaggcagttccagggccacacagatggggccagctgcatagacatctcccatgatggcaccaaactgtggacagggggcctggacaacacggtgcgctcctgggacctgcgggagggccgacagctacagcagcatgacttcacttcccagatcttctcgctgggctactgccccactggggagtggctggctgtgggcatggagagcagcaacgtggaggtgctgcaccacaccaagcctgacaagtaccagctgcacctgcacgagagctgcgtgctctccctcaagttcgcctactgcggcaagtggttcgtgagcactgggaaagataaccttctcaacgcctggaggacgccttatggagccagcatattccagtctaaagaatcctcgtctgtcttgagttgtgacatttcagcggatgacaaatacattgtaacaggctctggtgacaagaaggccacagtttatgaggtcatctactaaacaagaactccagcagggctgtcaaactctgggagaaaccgactcggctctgacagggagacccccaggcgaggggccccgaggatggcggaggatgggccgcaggcagccgagcgttcagggctgcgctccggccggctgagagggcacgtgccccgtcacagtctggactcctgggcctggattgatgtgtctcacagactcggaagggttctgctcctcctcctccccctgaacaatgctggcagttgctacaaatagatttattggaggcttatggctccggttcccccacagacccgctcatgagtctctgtttgttcttcccttttcttttgccctgtccctcaccttgggtcgggggtgctggagtggaccacaatgttgtgctgggggatgggggggtctctctttgccgattgtgcagtgcacaagatttgtgaaaaatgtaaataacagactcctattgcggactgatcagtgggagaggaggccccttcccaccggaaactctgagtgtgtatttcgcctgctgtatttgtaatccactcgtggtggtggctttttttttttttttttttaaataaacagatgctctcacctgggaagaggagacagggaggggaaccaattgaagaaagaggagaaaagtcttagagtgtggaaaaggcaaccaggttggccgtaaggtgcctgctggaatgcgtgtgcctccacacgggtctgggcatccggactgataaccagccggccagactgagggatggaaggcactgagatgggggcccgtccaggcggacacccgcagaaatggagctttctgtggtctcttgcactctggctgcctcttgccctctctgtgtctctctttcttggtctctccctctctcctcctcagcctggtctttctctttggtgcacacttagttattgttgtgagcaatggaagttcaaaggaactccctctccagctcttctgaatcttgggacacagcctaaaaaggacaaaaagttagaagacagcatagcaactcagctcagggagctaccagagaaaaatagcaactgatgtgggtgcttttttttttttttaatttgaataaaaagaattagaagtgatgtccttttataaaatgccttctcccccttcccgcctacagtctcttcctctccccttagaggggggaaagtgtataaacctacagggttgtgagtctgaaaagaggatccccctcacccccaccctgggcagagcagtgggggttggggggtgggagagggggacacagatcctggcacactgtggatatttcttgcagattgcagtctcttgtggcccaaacaggttaggtagactatcgcctctggcaggtgccaccttttggtaccaacatgttctgaggtgttaggatttgggttgggttttttttgtttgttttttttttccttttggtctttttttttttctccttttaaagaaaagctaaaggccgctgtgagtcctggtggcaggctctccatggatgtagcatatcgaagataatttttatactgcatttttatggattattttgtaatgtgtgattccgtctgctgaggaggtgggaggggctccagggaaagccacccaccttcagtgaggttgctccccagctgagcgcaccgggcatgggatgtggaggctggcgacacaccctgtgcctctccaaggctgggcgcgtggggcgtccagagtctctctgggtctcagatgtccatctgccacctcttgttaaggctctagccagaagggagggtgagggtagaagaaagttattcccgaagaaaaaaagaatgaaaagtcattgtactgaactgtttttatatttttaaaagttactatttaaaggttggtttgattgttgcgtcttaattgcctctcctcccagtttgccagtcccgccccccgccccccgggaaaacagccaggccactgttgctgtcacattctggagcctgggccagggccatttcccatcgatgtgagctcttctcatctcacagcattccctgcgctgcttccacccccttctccccttccagatacccagcatcgcagcagggatttcacaatcccatactgtgtcgcctcccatccaagcgccagggagggtggggggtaggagctaagacttcctctggacagatgggcagggcagagttcactgaggtgaaggaagaccacaggttaacaccaaagtattgtacagctgtcaatgcaaaacttttttggaaaaaaattaaacgtaatgaacttgaagcgaaactgcaaagtgtctgt

SEQ ID NO: 452008 - DNA, 3328 bp, Homo sapiens
gcagtgacggtttctcaccttttcagagcgtactcattccatgtgagtgctgatgggcagatgcagcccgtgcccttcccccacgacgccctggcaggccccggcatcccgaggcacgcccggcagatcaacacactcagccacggggaggtggtgtgtgccgtgaccatcagcaaccccacgaggcacgtctacacaggtggcaagggctgcgtgaagatctgggacatcagccagccaggcagcaagagccccatctcccagctggactgcctgaacagggacaattacatccgctcctgcaagctgctccctgatgggcgcacgctcatcgtgggcggcgaggccagcacgctcaccatctgggacctggcctcgcccacgccccgcatcaaggccgagctgacgtcctcggctcccgcctgttatgccctggccattagccctgacgccaaagtctgcttctcctgctgcagcgatgggaacattgctgtctgggacctgcacaaccagaccctggtcaggcagttccagggccacacagatggggccagctgcatagacatctcccatgatggcaccaaactgtggacagggggcctggacaacacggtgcgctcctgggacctgcgggagggccgacagctacagcagcatgacttcacttcccagatcttctcgctgggctactgccccactggggagtggctggctgtgggcatggagagcagcaacgtggaggtgctgcaccacaccaagcctgacaagtaccagctgcacctgcacgagagctgcgtgctctccctcaagttcgcctactgcggcaagtggttcgtgagcactgggaaagataaccttctcaacgcctggaggacgccttatggagccagcatattccagtctaaagaatcctcgtctgtcttgagttgtgacatttcagcggatgacaaatacattgtaacaggctctggtgacaagaaggccacagtttatgaggtcatctactaaacaagaactccagcagggctgtcaaactctgggagaaaccgactcggctctgacagggagacccccaggcgaggggccccgaggatggcggaggatgggccgcaggcagccgagcgttcagggctgcgctccggccggctgagagggcacgtgccccgtcacagtctggactcctgggcctggattgatgtgtctcacagactcggaagggttctgctcctcctcctccccctgaacaatgctggcagttgctacaaatagatttattggaggcttatggctccggttcccccacagacccgctcatgagtctctgtttgttcttcccttttcttttgccctgtccctcaccttgggtcgggggtgctggagtggaccacaatgttgtgctgggggatgggggggtctctctttgccgattgtgcagtgcacaagatttgtgaaaaatgtaaataacagactcctattgcggactgatcagtgggagaggaggccccttcccaccggaaactctgagtgtgtatttcgcctgctgtatttgtaatccactcgtggtggtggctttttttttttttttttttaaataaacagatgctctcacctgggaagaggagacagggaggggaaccaattgaagaaagaggagaaaagtcttagagtgtggaaaaggcaaccaggttggccgtaaggtgcctgctggaatgcgtgtgcctccacacgggtctgggcatccggactgataaccagccggccagactgagggatggaaggcactgagatgggggcccgtccaggcggacacccgcagaaatggagctttctgtggtctcttgcactctggctgcctcttgccctctctgtgtctctctttcttggtctctccctctctcctcctcagcctggtctttctctttggtgcacacttagttattgttgtgagcaatggaagttcaaaggaactccctctccagctcttctgaatcttgggacacagcctaaaaaggacaaaaagttagaagacagcatagcaactcagctcagggagctaccagagaaaaatagcaactgatgtgggtgcttttttttttttttaatttgaataaaaagaattagaagtgatgtccttttataaaatgccttctcccccttcccgcctacagtctcttcctctccccttagaggggggaaagtgtataaacctacagggttgtgagtctgaaaagaggatccccctcacccccaccctgggcagagcagtgggggttggggggtgggagagggggacacagatcctggcacactgtggatatttcttgcagattgcagtctcttgtggcccaaacaggttaggtagactatcgcctctggcaggtgccaccttttggtaccaacatgttctgaggtgttaggatttgggttgggttttttttgtttgttttttttttccttttggtctttttttttttctccttttaaagaaaagctaaaggccgctgtgagtcctggtggcaggctctccatggatgtagcatatcgaagataatttttatactgcatttttatggattattttgtaatgtgtgattccgtctgctgaggaggtgggaggggctccagggaaagccacccaccttcagtgaggttgctccccagctgagcgcaccgggcatgggatgtggaggctggcgacacaccctgtgcctctccaaggctgggcgcgtggggcgtccagagtctctctgggtctcagatgtccatctgccacctcttgttaaggctctagccagaagggagggtgagggtagaagaaagttattcccgaagaaaaaaagaatgaaaagtcattgtactgaactgtttttatatttttaaaagttactatttaaaggttggtttgattgttgcgtcttaattgcctctcctcccagtttgccagtcccgccccccgccccccgggaaaacagccaggccactgttgctgtcacattctggagcctgggccagggccatttcccatcgatgtgagctcttctcatctcacagcattccctgcgctgcttccacccccttctccccttccagatacccagcatcgcagcagggatttcacaatcccatactgtgtcgcctcccatccaagcgccagggagggtggggggtaggagctaagacttcctctggacagatgggcagggcagagttcactgaggtgaaggaagaccacaggttaacaccaaagtattgtacagctgtcaatgcaaaacttttttggaaaaaaattaaacgtaatgaacttgaagcgaaactgcaaagtgtctgt

SEQ ID NO: 452009 - DNA, 5365 bp, Homo sapiens
actataatatatatctatttattatatgtctttcggttaattcctgatctgaggagcgctgtttttcactcccatgcgaaagtcaccagcgggtagggcctgattgctacttttcatgcatagttttagacacaagagggcattgtgacgtcgcgcccagcggcacccagtcgtaggccgagtcccgcagccccacgtgggggccccgcgctcccattggccagcgccggacgaagctgccacattattttgttacttttcagtccctatttggaactgctctcgcggcagttcagacctcgtgctcgtccccttcgcctgtctgtgtgtggtatccgtaggtccggggcactttttttttggtgtgtgtgtgtgtgcgtgcgcgcgtgtgtgtgtgttgggtgtgtgtgttttgggggtttgccggggcgcggagaggagagccgggccgaggggaaggaaggaagccgtagagctccccggtctcgggctgcgtctcccctccagcgctctcctgcctgtgcgctccgacgcggcagcggcggtggcgctgagcgctcctcggtggggacgcggtgctcaagctgggagcagcgagaaccctttgcggaggcttcccgtgcccgctggacttaggatgccagggcgtttgatttgcacctactgagcccggagttcctccccggccctgggaagggcttgcagcggcggcggcggcggcggcagcggcagtagcagacggaacagcaggctctcctctccgagggggggcgtcgaagcgcccgcgccgggctcccgccctcaccctccggcgctcctgcggccccaagccaccacctcgtagcccgcctccttcctcttctcgccgcgagccccaggcccggacgcctctaggatcggacccgcgcgccccggatgcttggggctgccccggcgcgcccccctacaggcgcgacccgctgagtgacccggagggggcccgagctcgccccaggaggggcccccggcctcgggaccccgcgccggacctgctggggagccgacgatgtccgcgcagtcccaggcattgacgcgctcgacgcagcccagggaaggcggccggccgctgcccgccgagccctaggcgcacaaagcccgcgcccgccgcccggccccggcgcccgccgacgactttgccgcctgctccgcggctctttgtctccacttggggcgggcgcccgactctgggatttcgctgcgagaacgagctgggggggccgggggcgagctctcggtttcccggccgccccccgctcgggctcggctcccccctcccccgcacctccccggcccgggctctcggcgcttccacgctctcggaatcacgacccctccctgccatgtatccgcagggcagacatccggctccccatcaacccgggcagccgggatttaaattcacggtggctgagtcttgtgacaggatcaaagacgaattccagttcctgcaagctcagtatcacagcctcaaagtggagtacgacaagctggcaaacgagaagacggagatgcagcgccattatgtgatgtactatgagatgtcctatggcttgaacattgaaatgcacaagcagacagagattgcgaagagactgaacacaattttagcacagatcatgcctttcctgtcacaagagcaccagcagcaggtggcgcaggcagtggagcgcgccaagcaggtcaccatgacggagctgaacgccatcatcgggcagcagcagctccaggcgcagcacctctcccatgccacacacggccccccggtccagttgccaccccacccgtcaggtctccagcctccaggaatccccccagtgacagggagcagctccgggctgctggcactgggcgccctgggcagccaggcccatctgacggtgaaggatgagaagaaccaccatgaactcgatcacagagagagagaatccagtgcgaataactctgtgtcaccctcggaaagcctccgggccagtgagaagcaccggggctctgcggactacagcatggaagccaagaagcggaaggcggaggagaaggacagcttgagccgatacgacagtgatggagacaagagtgatgatctggtggtggatgtttccaatgaggaccccgcaacgccccgggtcagcccggcacactcccctcctgaaaatgggctggacaaggcccgtagcctgaaaaaagatgcccccaccagccctgcctcggtggcctcttccagtagcacaccttcctccaagaccaaagaccttggtcataacgacaaatcctccacccctgggctcaagtccaacacaccaaccccaaggaacgacgccccaactccaggcaccagcacgaccccagggctcaggtcgatgccgggtaaacctccgggcatggacccgatagcctcggctctgcgcacgcccatctccatcaccagctcctatgcggcgcccttcgccatgatgagccaccatgagatgaacggctccctcaccagtcctggcgcctacgccggcctccacaacatcccaccccagatgagcgccgccgccgctgctgcagccgctgcctatggccgatcgccaatgtgagcttggagctgttggttttgaccctcaccccccgatgcgggccacaggcctcccctcaagcctggcctccattcctggaggaaaaccagcgtactcattccatgtgagtgctgatgggcagatgcagcccgtgcccttcccccacgacgccctggcaggccccggcatcccgaggcacgcccggcagatcaacacactcagccacggggaggtggtgtgtgccgtgaccatcagcaaccccacgaggcacgtctacacaggtggcaagggctgcgtgaagatctgggacatcagccagccaggcagcaagagccccatctcccagctggactgcctgaacagggacaattacatccgctcctgcaagctgctccctgatgggcgcacgctcatcgtgggcggcgaggccagcacgctcaccatctgggacctggcctcgcccacgccccgcatcaaggccgagctgacgtcctcggctcccgcctgttatgccctggccattagccctgacgccaaagtctgcttctcctgctgcagcgatgggaacattgctgtctgggacctgcacaaccagaccctggtcaggcagttccagggccacacagatggggccagctgcatagacatctcccatgatgttctgctcctcctcctccccctgaacaatgctggcagttgctacaaatagatttattggaggcttatggctccggttcccccacagacccgctcatgagtctctgtttgttcttcccttttcttttgccctgtccctcaccttgggtcgggggtgctggagtggaccacaatgttgtgctgggggatgggggggtctctctttgccgattgtgcagtgcacaagatttgtgaaaaatgtaaataacagactcctattgcggactgatcagtgggagaggaggccccttcccaccggaaactctgagtgtgtatttcgcctgctgtatttgtaatccactcgtggtggtggctttttttttttttttttttaaataaacagatgctctcacctgggaagaggagacagggaggggaaccaattgaagaaagaggagaaaagtcttagagtgtggaaaaggcaaccaggttggccgtaaggtgcctgctggaatgcgtgtgcctccacacgggtctgggcatccggactgataaccagccggccagactgagggatggaaggcactgagatgggggcccgtccaggcggacacccgcagaaatggagctttctgtggtctcttgcactctggctgcctcttgccctctctgtgtctctctttcttggtctctccctctctcctcctcagcctggtctttctctttggtgcacacttagttattgttgtgagcaatggaagttcaaaggaactccctctccagctcttctgaatcttgggacacagcctaaaaaggacaaaaagttagaagacagcatagcaactcagctcagggagctaccagagaaaaatagcaactgatgtgggtgcttttttttttttttaatttgaataaaaagaattagaagtgatgtccttttataaaatgccttctcccccttcccgcctacagtctcttcctctccccttagaggggggaaagtgtataaacctacagggttgtgagtctgaaaagaggatccccctcacccccaccctgggcagagcagtgggggttggggggtgggagagggggacacagatcctggcacactgtggatatttcttgcagattgcagtctcttgtggcccaaacaggttaggtagactatcgcctctggcaggtgccaccttttggtaccaacatgttctgaggtgttaggatttgggttgggttttttttgtttgttttttttttccttttggtctttttttttttctccttttaaagaaaagctaaaggccgctgtgagtcctggtggcaggctctccatggatgtagcatatcgaagataatttttatactgcatttttatggattattttgtaatgtgtgattccgtctgctgaggaggtgggaggggctccagggaaagccacccaccttcagtgaggttgctccccagctgagcgcaccgggcatgggatgtggaggctggcgacacaccctgtgcctctccaaggctgggcgcgtggggcgtccagagtctctctgggtctcagatgtccatctgccacctcttgttaaggctctagccagaagggagggtgagggtagaagaaagttattcccgaagaaaaaaagaatgaaaagtcattgtactgaactgtttttatatttttaaaagttactatttaaaggttggtttgattgttgcgtcttaattgcctctcctcccagtttgccagtcccgccccccgccccccgggaaaacagccaggccactgttgctgtcacattctggagcctgggccagggccatttcccatcgatgtgagctcttctcatctcacagcattccctgcgctgcttccacccccttctccccttccagatacccagcatcgcagcagggatttcacaatcccatactgtgtcgcctcccatccaagcgccagggagggtggggggtaggagctaagacttcctctggacagatgggcagggcagagttcactgaggtgaaggaagaccacaggttaacaccaaagtattgtacagctgtcaatgcaaaacttttttggaaaaaaattaaacgtaatgaacttgaagcgaaactgcaaagtgtctgt

SEQ ID NO: 452010 - DNA, 3244 bp, Homo sapiens
actataatatatatctatttattatatgtctttcggttaattcctgatctgaggagcgctgtttttcactcccatgcgaaagtcaccagcgggtagggcctgattgctacttttcatgcatagttttagacacaagagggcattgtgacgtcgcgcccagcggcacccagtcgtaggccgagtcccgcagccccacgtgggggccccgcgctcccattggccagcgccggacgaagctgccacattattttgttacttttcagtccctatttggaactgctctcgcggcagttcagacctcgtgctcgtccccttcgcctgtctgtgtgtggtatccgtaggtccggggcactttttttttggtgtgtgtgtgtgtgcgtgcgcgcgtgtgtgtgtgttgggtgtgtgtgttttgggggtttgccggggcgcggagaggagagccgggccgaggggaaggaaggaagccgtagagctccccggtctcgggctgcgtctcccctccagcgctctcctgcctgtgcgctccgacgcggcagcggcggtggcgctgagcgctcctcggtggggacgcggtgctcaagctgggagcagcgagaaccctttgcggaggcttcccgtgcccgctggacttaggatgccagggcgtttgatttgcacctactgagcccggagttcctccccggccctgggaagggcttgcagcggcggcggcggcggcggcagcggcagtagcagacggaacagcaggctctcctctccgagggggggcgtcgaagcgcccgcgccgggctcccgccctcaccctccggcgctcctgcggccccaagccaccacctcgtagcccgcctccttcctcttctcgccgcgagccccaggcccggacgcctctaggatcggacccgcgcgccccggatgcttggggctgccccggcgcgcccccctacaggcgcgacccgctgagtgacccggagggggcccgagctcgccccaggaggggcccccggcctcgggaccccgcgccggacctgctggggagccgacgatgtccgcgcagtcccaggcattgacgcgctcgacgcagcccagggaaggcggccggccgctgcccgccgagccctaggcgcacaaagcccgcgcccgccgcccggccccggcgcccgccgacgactttgccgcctgctccgcggctctttgtctccacttggggcgggcgcccgactctgggatttcgctgcgagaacgagctgggggggccgggggcgagctctcggtttcccggccgccccccgctcgggctcggctcccccctcccccgcacctccccggcccgggctctcggcgcttccacgctctcggaatcacgacccctccctgccatgtatccgcagggcagacatccggctccccatcaacccgggcagccgggatttaaattcacggtggctgagtcttgtgacaggatcaaagacgaattccagttcctgcaagctcagtatcacagcctcaaagtggagtacgacaagctggcaaacgagaagacggagatgcagcgccattatgtgatgtactatgagatgtcctatggcttgaacattgaaatgcacaagcagacagagattgcgaagagactgaacacaattttagcacagatcatgcctttcctgtcacaagagcaccagcagcaggtggcgcaggcagtggagcgcgccaagcaggtcaccatgacggagctgaacgccatcatcgggcagcagcagctccaggcgcagcacctctcccatgccacacacggccccccggtccagttgccaccccacccgtcaggtctccagcctccaggaatccccccagtgacagggagcagctccgggctgctggcactgggcgccctgggcagccaggcccatctgacggtgaaggatgagaagaaccaccatgaactcgatcacagagagagagaatccagtgcgaataactctgtgtcaccctcggaaagcctccgggccagtgagaagcaccggggctctgcggactacagcatggaagccaagaagcggaaggcggaggagaaggacagcttgagccgatacgacagtgatggagacaagagtgatgatctggtggtggatgtttccaatgaggaccccgcaacgccccgggtcagcccggcacactcccctcctgaaaatgggctggacaaggcccgtagcctgaaaaaagatgcccccaccagccctgcctcggtggcctcttccagtagcacaccttcctccaagaccaaagaccttggtcataacgacaaatcctccacccctgggctcaagtccaacacaccaaccccaaggaacgacgccccaactccaggcaccagcacgaccccagggctcaggtcgatgccgggtaaacctccgggcatggacccgatagcctcggctctgcgcacgcccatctccatcaccagctcctatgcggcgcccttcgccatgatgagccaccatgagatgaacggctccctcaccagtcctggcgcctacgccggcctccacaacatcccaccccagatgagcgccgccgccgctgctgcagccgctgcctatggccgatcgccaatgtgagcttggagctgttggttttgaccctcaccccccgatgcgggccacaggcctcccctcaagcctggcctccattcctggaggaaaaccagcgtactcattccatgtgagtgctgatgggcagatgcagcccgtgcccttcccccacgacgccctggcaggccccggcatcccgaggcacgcccggcagatcaacacactcagccacggggaggtggtgtgtgccgtgaccatcagcaaccccacgaggcacgtctacacaggtggcaagggctgcgtgaagatctgggacatcagccagccaggcagcaagagccccatctcccagctggactgcctgaacagggacaattacatccgctcctgcaagctgctccctgatgggcgcacgctcatcgtgggcggcgaggccagcacgctcaccatctgggacctggcctcgcccacgccccgcatcaaggccgagctgacgtcctcggctcccgcctgttatgccctggccattagccctgacgccaaagtctgcttctcctgctgcagcgatgggaacattgctgtctgggacctgcacaaccagaccctggtcaggtgagccggcaggagggagcattagtgcctcgtcctgggga

SEQ ID NO: 452011 - DNA, 2491 bp, Homo sapiens
actataatatatatctatttattatatgtctttcggttaattcctgatctgaggagcgctgtttttcactcccatgcgaaagtcaccagcgggtagggcctgattgctacttttcatgcatagttttagacacaagagggcattgtgacgtcgcgcccagcggcacccagtcgtaggccgagtcccgcagccccacgtgggggccccgcgctcccattggccagcgccggacgaagctgccacattattttgttacttttcagtccctatttggaactgctctcgcggcagttcagacctcgtgctcgtccccttcgcctgtctgtgtgtggtatccgtaggtccggggcactttttttttggtgtgtgtgtgtgtgcgtgcgcgcgtgtgtgtgtgttgggtgtgtgtgttttgggggtttgccggggcgcggagaggagagccgggccgaggggaaggaaggaagccgtagagctccccggtctcgggctgcgtctcccctccagcgctctcctgcctgtgcgctccgacgcggcagcggcggtggcgctgagcgctcctcggtggggacgcggtgctcaagctgggagcagcgagaaccctttgcggaggcttcccgtgcccgctggacttaggatgccagggcgtttgatttgcacctactgagcccggagttcctccccggccctgggaagggcttgcagcggcggcggcggcggcggcagcggcagtagcagacggaacagcaggctctcctctccgagggggggcgtcgaagcgcccgcgccgggctcccgccctcaccctccggcgctcctgcggccccaagccaccacctcgtagcccgcctccttcctcttctcgccgcgagccccaggcccggacgcctctaggatcggacccgcgcgccccggatgcttggggctgccccggcgcgcccccctacaggcgcgacccgctgagtgacccggagggggcccgagctcgccccaggaggggcccccggcctcgggaccccgcgccggacctgctggggagccgacgatgtccgcgcagtcccaggcattgacgcgctcgacgcagcccagggaaggcggccggccgctgcccgccgagccctaggcgcacaaagcccgcgcccgccgcccggccccggcgcccgccgacgactttgccgcctgctccgcggctctttgtctccacttggggcgggcgcccgactctgggatttcgctgcgagaacgagctgggggggccgggggcgagctctcggtttcccggccgccccccgctcgggctcggctcccccctcccccgcacctccccggcccgggctctcggcgcttccacgctctcggaatcacgacccctccctgccatgtatccgcagggcagacatccggctccccatcaacccgggcagccgggatttaaattcacggtggctgagtcttgtgacaggatcaaagacgaattccagttcctgcaagctcagtatcacagcctcaaagtggagtacgacaagctggcaaacgagaagacggagatgcagcgccattatgtgatgtactatgagatgtcctatggcttgaacattgaaatgcacaagcagacagagattgcgaagagactgaacacaattttagcacagatcatgcctttcctgtcacaagagcaccagcagcaggtggcgcaggcagtggagcgcgccaagcaggtcaccatgacggagctgaacgccatcatcgggcagcagcagctccaggcgcagcacctctcccatgccacacacggccccccggtccagttgccaccccacccgtcaggtctccagcctccaggaatccccccagtgacagggagcagctccgggctgctggcactgggcgccctgggcagccaggcccatctgacggtgaaggatgagaagaaccaccatgaactcgatcacagagagagagaatccagtgcgaataactctgtgtcaccctcggaaagcctccgggccagtgagaagcaccggggctctgcggactacagcatggaagccaagaagcggaaggcggaggagaaggacagcttgagccgatacgacagtgatggagacaagagtgatgatctggtggtggatgtttccaatgaggaccccgcaacgccccgggtcagcccggcacactcccctcctgaaaatgggctggacaaggcccgtagcctgaaaaaagatgcccccaccagccctgcctcggtggcctcttccagtagcacaccttcctccaagaccaaagaccttggtcataacgacaaatcctccacccctgggctcaagtccaacacaccaaccccaaggaacgacgccccaactccaggcaccagcacgaccccagggctcaggtcgatgccgggtaaacctccgggcatggacccgatagcctcgctctcacacgcccatctccagttccagctccgttctaaagatcctgctagagtcac

SEQ ID NO: 452012 - DNA, 2163 bp, Homo sapiens
actataatatatatctatttattatatgtctttcggttaattcctgatctgaggagcgctgtttttcactcccatgcgaaagtcaccagcgggtagggcctgattgctacttttcatgcatagttttagacacaagagggcattgtgacgtcgcgcccagcggcacccagtcgtaggccgagtcccgcagccccacgtgggggccccgcgctcccattggccagcgccggacgaagctgccacattattttgttacttttcagtccctatttggaactgctctcgcggcagttcagacctcgtgctcgtccccttcgcctgtctgtgtgtggtatccgtaggtccggggcactttttttttggtgtgtgtgtgtgtgcgtgcgcgcgtgtgtgtgtgttgggtgtgtgtgttttgggggtttgccggggcgcggagaggagagccgggccgaggggaaggaaggaagccgtagagctccccggtctcgggctgcgtctcccctccagcgctctcctgcctgtgcgctccgacgcggcagcggcggtggcgctgagcgctcctcggtggggacgcggtgctcaagctgggagcagcgagaaccctttgcggaggcttcccgtgcccgctggacttaggatgccagggcgtttgatttgcacctactgagcccggagttcctccccggccctgggaagggcttgcagcggcggcggcggcggcggcagcggcagtagcagacggaacagcaggctctcctctccgagggggggcgtcgaagcgcccgcgccgggctcccgccctcaccctccggcgctcctgcggccccaagccaccacctcgtagcccgcctccttcctcttctcgccgcgagccccaggcccggacgcctctaggatcggacccgcgcgccccggatgcttggggctgccccggcgcgcccccctacaggcgcgacccgctgagtgacccggagggggcccgagctcgccccaggaggggcccccggcctcgggaccccgcgccggacctgctggggagccgacgatgtccgcgcagtcccaggcattgacgcgctcgacgcagcccagggaaggcggccggccgctgcccgccgagccctaggcgcacaaagcccgcgcccgccgcccggccccggcgcccgccgacgactttgccgcctgctccgcggctctttgtctccacttggggcgggcgcccgactctgggatttcgctgcgagaacgagctgggggggccgggggcgagctctcggtttcccggccgccccccgctcgggctcggctcccccctcccccgcacctccccggcccgggctctcggcgcttccacgctctcggaatcacgacccctccctgccatgtatccgcagggcagacatccggctccccatcaacccgggcagccgggatttaaattcacggtggctgagtcttgtgacaggatcaaagacgaattccagttcctgcaagctcagtatcacagcctcaaagtggagtacgacaagctggcaaacgagaagacggagatgcagcgccattatgtgatgtactatgagatgtcctatggcttgaacattgaaatgcacaagcagacagagattgcgaagagactgaacacaattttagcacagatcatgcctttcctgtcacaagagcaccagcagcaggtggcgcaggcagtggagcgcgccaagcaggtcaccatgacggagctgaacgccatcatcgggcagcagcagctccaggcgcagcacctctcccatgccacacacggccccccggtccagttgccaccccacccgtcaggtctccagcctccaggaatccccccagtgacagggagcagctccgggctgctggcactgggcgccctgggcagccaggcccatctgacggtgaaggatgagaagaaccaccatgaactcgatcacagagagagagaatccagtgcgaataactctgtgtcaccctcggaaagcctccgggccagtgagaagcaccggggctctgcggactacagcatggaagccaagaagcggaaggcggaggagaaggacagcttgagccgatacgacagtgatggggaagggaagggaagaaagaagagaaggaagggaaggaagagaaaaagagaaagagaag

SEQ ID NO: 452013 - DNA, 9082 bp, Homo sapiens
  misc_feature (1674)..(1674): n is a, c, g, or t
gagcccagtcgagccgcgctcacctcgggctcccgctccgtctccacctccgcctttgccctggcggcgcgaccccgtcccgggcgcggccccagcagtcgcgcgccgttagcctcgcgcccgccgcgcagtccgggcccggcgcgatgggggccgccgccggccggagcccccacctggggcccgcgcccgcccgccgcccgcagcgctctctgctcctgctgcagctgctgctgctcgtcgctgccccggggtccacgcaggcccaggccgccccgttccccgagctgtgcagttatacatgggaagctgttgataccaaaaataatgtactttataaaatcaacatctgtggaagtgtggatattgtccagtgcgggccatcaagtgctgtttgtatgcacgacttgaagacacgcacttatcattcagtgggtgactctgttttgagaagtgcaaccagatctctcctggaattcaacacaacagtgagctgtgaccagcaaggcacaaatcacagagtccagagcagcattgccttcctgtgtgggaaaaccctgggaactcctgaatttgtaactgcaacagaatgtgtgcactactttgagtggaggaccactgcagcctgcaagaaagacatatttaaagcaaataaggaggtgccatgctatgtgtttgatgaagagttgaggaagcatgatctcaatcctctgatcaagcttagtggtgcctacttggtggatgactccgatccggacacttctctattcatcaatgtttgtagagacatagacacactacgagacccaggttcacagctgcgggcctgtccccccggcactgccgcctgcctggtaagaggacaccaggcgtttgatgttggccagccccgggacggactgaagctggtgcgcaaggacaggcttgtcctgagttacgtgagggaagaggcaggaaagctagacttttgtgatggtcacagccctgcggtgactattacatttgtttgcccgtcggagcggagagagggcaccattcccaaactcacagctaaatccaactgccgctatgaaattgagtggattactgagtatgcctgccacagagattacctggaaagtaaaacttgttctctgagcggcgagcagcaggatgtctccatagacctcacaccacttgcccagagcggaggttcatcctatatttcagatggaaaagaatatttgttttatttgaatgtctgtggagaaactgaaatacagttctgtaataaaaaacaagctgcagtttgccaagtgaaaaagagcgatacctctcaagtcaaagcagcaggaagataccacaatcagaccctccgatattcggatggagacctcaccttgatatattttggaggtgatgaatgcagctcagggtttcagcggatgagcgtcataaactttgagtgcaataaaaccgcaggtaacgatgggaaaggaactcctgtattcacaggggaggttgactgcacctacttcttcacatgggacacggaatacgcctgtgttaaggagaaggaagacctcctctgcggtgccaccgacgggaagaagcgctatgacctgtccgcgctggtccgccatgcagaaccagagcagaattgggaagctgtggatggcagtcagacggaaacanagaagaagcattttttcattaatatttgtcacagagtgctgcaggaaggcaaggcacgagggtgtcccgaggacgcggcagtgtgtgcagtggataaaaatggaagtaaaaatctgggaaaatttatttcctctcccatgaaagagaaaggaaacattcaactctcttattcagatggtgatgattgtggtcatggcaagaaaattaaaactaatatcacacttgtatgcaagccaggtgatctggaaagtgcaccagtgttgagaacttctggggaaggcggttgcttttatgagtttgagtggcacacagctgcggcctgtgtgctgtctaagacagaaggggagaactgcacggtctttgactcccaggcagggttttcttttgacttatcacctctcacaaagaaaaatggtgcctataaagttgagacaaagaagtatgacttttatataaatgtgtgtggcccggtgtctgtgagcccctgtcagccagactcaggagcctgccaggtggcaaaaagtgatgagaagacttggaacttgggtctgagtaatgcgaagctttcatattatgatgggatgatccaactgaactacagaggcggcacaccctataacaatgaaagacacacaccgagagctacgctcatcacctttctctgtgatcgagacgcgggagtgggcttccctgaatatcaggaagaggataactccacctacaacttccggtggtacaccagctatgcctgcccggaggagcccctggaatgcgtagtgaccgacccctccacgctggagcagtacgacctctccagtctggcaaaatctgaaggtggccttggaggaaactggtatgccatggacaactcaggggaacatgtcacgtggaggaaatactacattaacgtgtgtcggcctctgaatccagtgccgggctgcaaccgatatgcatcggcttgccagatgaagtatgaaaaagatcagggctccttcactgaagtggtttccatcagtaacttgggaatggcaaagaccggcccggtggttgaggacagcggcagcctccttctggaatacgtgaatgggtcggcctgcaccaccagcgatggcagacagaccacatataccacgaggatccatctcgtctgctccaggggcaggctgaacagccaccccatcttttctctcaactgggagtgtgtggtcagtttcctgtggaacacagaggctgcctgtcccattcagacaacgacggatacagaccaggcttgctctataagggatcccaacagtggatttgtgtttaatcttaatccgctaaacagttcgcaaggatataacgtctctggcattgggaagatttttatgtttaatgtctgcggcacaatgcctgtctgtgggaccatcctgggaaaacctgcttctggctgtgaggcagaaacccaaactgaagagctcaagaattggaagccagcaaggccagtcggaattgagaaaagcctccagctgtccacagagggcttcatcactctgacctacaaagggcctctctctgccaaaggtaccgctgatgcttttatcgtccgctttgtttgcaatgatgatgtttactcagggcccctcaaattcctgcatcaagatatcgactctgggcaagggatccgaaacacttactttgagtttgaaaccgcgttggcctgtgttccttctccagtggactgccaagtcaccgacctggctggaaatgagtacgacctgactggcctaagcacagtcaggaaaccttggacggctgttgacacctctgtcgatgggagaaagaggactttctatttgagcgtttgcaatcctctcccttacattcctggatgccagggcagcgcagtggggtcttgcttagtgtcagaaggcaatagctggaatctgggtgtggtgcagatgagtccccaagccgcggcgaatggatctttgagcatcatgtatgtcaacggtgacaagtgtgggaaccagcgcttctccaccaggatcacgtttgagtgtgctcagatatcgggctcaccagcatttcagcttcaggatggttgtgagtacgtgtttatctggagaactgtggaagcctgtcccgttgtcagagtggaaggggacaactgtgaggtgaaagacccaaggcatggcaacttgtatgacctgaagcccctgggcctcaacgacaccatcgtgagcgctggcgaatacacttattacttccgggtctgtgggaagctttcctcagacgtctgccccacaagtgacaagtccaaggtggtctcctcatgtcaggaaaagcgggaaccgcagggatttcacaaagtggcaggtctcctgactcagaagctaacttatgaaaatggcttgttaaaaatgaacttcacggggggggacacttgccataaggtttatcagcgctccacagccatcttcttctactgtgaccgcggcacccagcggccagtatttctaaaggagacttcagattgttcctacttgtttgagtggcgaacgcagtatgcctgcccacctttcgatctgactgaatgttcattcaaagatggggctggcaactccttcgacctctcgtccctgtcaaggtacagtgacaactgggaagccatcactgggacgggggacccggagcactacctcatcaatgtctgcaagtctctggccccgcaggctggcactgagccgtgccctccagaagcagccgcgtgtctgctgggtggctccaagcccgtgaacctcggcagggtaagggacggacctcagtggagagatggcataattgtcctgaaatacgttgatggcgacttatgtccagatgggattcggaaaaagtcaaccaccatccgattcacctgcagcgagagccaagtgaactccaggcccatgttcatcagcgccgtggaggactgtgagtacacctttgcctggcccacagccacagcctgtcccatgaagagcaacgagcatgatgactgccaggtcaccaacccaagcacaggacacctgtttgatctgagctccttaagtggcagggcgggattcacagctgcttacagcgagaaggggttggtttacatgagcatctgtggggagaatgaaaactgccctcctggcgtgggggcctgctttggacagaccaggattagcgtgggcaaggccaacaagaggctgagatacgtggaccaggtcctgcagctggtgtacaaggatgggtccccttgtccctccaaatccggcctgagctataagagtgtgatcagtttcgtgtgcaggcctgaggccgggccaaccaataggcccatgctcatctccctggacaagcagacatgcactctcttcttctcctggcacacgccgctggcctgcgagcaagcgaccgaatgttccgtgaggaatggaagctctattgttgacttgtctccccttattcatcgcactggtggttatgaggcttatgatgagagtgaggatgatgcctccgataccaaccctgatttctacatcaatatttgtcagccactaaatcccatgcacggagtgccctgtcctgccggagccgctgtgtgcaaagttcctattgatggtccccccatagatatcggccgggtagcaggaccaccaatactcaatccaatagcaaatgagatttacttgaattttgaaagcagtactccttgcttagcggacaagcatttcaactacacctcgctcatcgcgtttcactgtaagagaggtgtgagcatgggaacgcctaagctgttaaggaccagcgagtgcgactttgtgttcgaatgggagactcctgtcgtctgtcctgatgaagtgaggatggatggctgtaccctgacagatgagcagctcctctacagcttcaacttgtccagcctttccacgagcacctttaaggtgactcgcgactcgcgcacctacagcgttggggtgtgcacctttgcagtcgggccagaacaaggaggctgtaaggacggaggagtctgtctgctctcaggcaccaagggggcatcctttggacggctgcaatcaatgaaactggattacaggcaccaggatgaagcggtcgttttaagttacgtgaatggtgatcgttgccctccagaaaccgatgacggcgtcccctgtgtcttccccttcatattcaatgggaagagctacgaggagtgcatcatagagagcagggcgaagctgtggtgtagcacaactgcggactacgacagagaccacgagtggggcttctgcagacactcaaacagctaccggacatccagcatcatatttaagtgtgatgaagatgaggacattgggaggccacaagtcttcagtgaagtgcgtgggtgtgatgtgacatttgagtggaaaacaaaagttgtctgccctccaaagaagttggagtgcaaattcgtccagaaacacaaaacctacgacctgcggctgctctcctctctcaccgggtcctggtccctggtccacaacggagtctcgtactatataaatctgtgccagaaaatatataaagggcccctgggctgctctgaaagggccagcatttgcagaaggaccacaactggtgacgtccaggtcctgggactcgttcacacgcagaagctgggtgtcataggtgacaaagttgttgtcacgtactccaaaggttatccgtgtggtggaaataagaccgcatcctccgtgatagaattgacctgtacaaagacggtgggcagacctgcattcaagaggtttgatatcgacagctgcacttactacttcagctgggactcccgggctgcctgcgccgtgaagcctcaggaggtgcagatggtgaatgggaccatcaccaaccctataaatggcaagagcttcagcctcggagatatttattttaagctgttcagagcctctggggacatgaggaccaatggggacaactacctgtatgagatccaactttcctccatcacaagctccagaaacccggcgtgctctggagccaacatatgccaggtgaagcccaacgatcagcacttcagtcggaaagttggaacctctgacaagaccaagtactaccttcaagacggcgatctcgatgtcgtgtttgcctcttcctctaagtgcggaaaggataagaccaagtctgtttcttccaccatcttcttccactgtgaccctctggtggaggacgggatccccgagttcagtcacgagactgccgactgccagtacctcttctcttggtacacctcagccgtgtgtcctctgggggtgggctttgacagcgagaatcccggggacgacgggcagatgcacaaggggctgtcagaacggagccaggcagtcggcgcggtgctcagcctgctgctggtggcgctcacctgctgcctgctggccctgttgctctacaagaaggagaggagggaaacagtgataagtaagctgaccacttgctgtaggagaagttccaacgtgtcctacaaatactcaaaggtgaataaggaagaagagacagatgagaatgaaacagagtggctgatggaagagatccagctgcctcctccacggcagggaaaggaagggcaggagaacggccatattaccaccaagtcagtgaaagccctcagctccctgcatggggatgaccaggacagtgaggatgaggttctgaccatcccagaggtgaaagttcactcgggcaggggagctggggcagagagctcccacccagtgagaaacgcacagagcaatgcccttcaggagcgtgaggacgatagggtggggctggtcaggggtgagaaggcgaggaaagggaagtccagctctgcacagcagaagacagtgagctccaccaagctggtgtccttccatgacgacagcgacgaggacctcttacacatctgactccgcagtgcctgcaggggagcacggagccgcgggacagccaagcacctccaaccaaataagacttccactcgatgatgcttctataattttgcctttaacagaaactttcaaaagggaagagtttttgtgatgggggagagggtgaaggaggtcaggccccactccttcctgattgtttacagtcattggaataaggcatggctcagatcggccacagggcggtaccttgtgcccagggttttgccccaagtcctcatttaaaagcataaggccggacgcatctcaaaacagagggctgcattcgaagaaacccttgctgctttagtcccgatagggtatttgaccccgatatattttagcattttaattctctccccctatttattgactttgacaattactcaggtttgagaaaaaggaaaaaaaaacagccaccgtttcttcctgccagcaggggtgtgatgtaccagtttgtccatcttgagatggtgaggctgtcagtgtatggggcagcttccggcgggatgttgaactggtcattaatgtgtcccctgagttggagctcattctgtctcttttctcttttgctttctgtttcttaagggcacacacacgtgcgtgcgagcacacacacacatacgtgcacagggtccccgagtgcctaggttttggagagtttgcctgttctatgcctttagtcaggaatggctgcacctttttgcatgatatcttcaagcctgggcgtacagagcacatttgtcagtatttttgccggctggtgaattcaaacaacctgcccaaagattgatttgtgtgtttgtgtgtgtgtgtgtgtgtgtgtgtgtgtgtgtgagtggagttgaggtgtcagagaaaatgaattttttccagatttggggtataggtctcatctcttcaggttctcatgataccacctttactgtgcttatttttttaagaaaaaagtgttgatcaaccattcgacctataagaagccttaatttgcacagtgtgtgacttacagaaactgcatgaaaaatcatgggccagagcctcggccctagcattgcacttggcctcatgctggagggaggctgggcgggtacagcgcggaggaggagggaggccaggcgggcatggcgtggaggaggagggaggccgggcggtcacagcatggaggaggagggaggcgctgctggtgttcttattctggcggcagcgcctttcctgccatgtttagtgaatgacttttctcgcattgtagaattgtatatagactctggtgttctattgctgagaagcaaaccgccctgcagcatccctcagcctgtaccggtttggctggcttgtttgatttcaacatgagtgtattttttaaaattgatttttctcttcatttttttttcaatcaactttactgtaatataaagtattcaacaatttcaataaaagataaa

SEQ ID NO: 452014 - DNA, 4911 bp, Homo sapiens
ctttggacagaccaggattagcgtgggcaaggccaacaagaggctgagatacgtggaccaggtcctgcagctggtgtacaaggatgggtccccttgtccctccaaatccggcctgagctataagagtgtgatcagtttcgtgtgcaggcctgagcgggcccaaccaataggcccatgctcatctccctggacaagcagacatgcactctcttcttctcctggcactgagccgtgccctccagaagcagccgcgtgtctgctgggtggctccaagcccgtgaacctcggcagggtaagggacggacctcagtggagagatggcataattgtcctgaaatacgttgatggcgacttatgtccagatgggattcggaaaaagtcaaccaccatccgattcacctgcagcgagagccaagtgaactccaggcccatgttcatcagcgccgtggaggactgtgagtacacctttgcctggcccacagccacagcctgtcccatgaagagcaacgagcatgatgactgccaggtcaccaacccaagcacaggacacctgtttgatctgagctccttaagtggcagggcgggattcacagctgcttacagcgagaaggggttggtttacatgagcatctgtggggagaatgaaaactgccctcctggcgtgggggcctgctttggacagaccaggattagcgtgggcaaggccaacaagaggctgagatacgtggaccaggtcctgcagctggtgtacaaggatgggtccccttgtccctccaaatccggcctgagctataagagtgtgatcagtttcgtgtgcaggcctgaggccgggccaaccaataggcccatgctcatctccctggacaagcagacatgcactctcttcttctcctggcacacgccgctggcctgcgagcaagcgaccgaatgttccgtgaggaatggaagctctattgttgacttgtctccccttattcatcgcactggtggttatgaggcttatgatgagagtgaggatgatgcctccgataccaaccctgatttctacatcaatatttgtcagccactaaatcccatgcacggagtgccctgtcctgccggagccgctgtgtgcaaagttcctattgatggtccccccatagatatcggccgggtagcaggaccaccaatactcaatccaatagcaaatgagatttacttgaattttgaaagcagtactccttgcttagcggacaagcatttcaactacacctcgctcatcgcgtttcactgtaagagaggtgtgagcatgggaacgcctaagctgttaaggaccagcgagtgcgactttgtgttcgaatgggagactcctgtcgtctgtcctgatgaagtgaggatggatggctgtaccctgacagatgagcagctcctctacagcttcaacttgtccagcctttccacgagcacctttaaggtgactcgcgactcgcgcacctacagcgttggggtgtgcacctttgcagtcgggccagaacaaggaggctgtaaggacggaggagtctgtctgctctcaggcaccaagggggcatcctttggacggctgcaatcaatgaaactggattacaggcaccaggatgaagcggtcgttttaagttacgtgaatggtgatcgttgccctccagaaaccgatgacggcgtcccctgtgtcttccccttcatattcaatgggaagagctacgaggagtgcatcatagagagcagggcgaagctgtggtgtagcacaactgcggactacgacagagaccacgagtggggcttctgcagacactcaaacagctaccggacatccagcatcatatttaagtgtgatgaagatgaggacattgggaggccacaagtcttcagtgaagtgcgtgggtgtgatgtgacatttgagtggaaaacaaaagttgtctgccctccaaagaagttggagtgcaaattcgtccagaaacacaaaacctacgacctgcggctgctctcctctctcaccgggtcctggtccctggtccacaacggagtctcgtactatataaatctgtgccagaaaatatataaagggcccctgggctgctctgaaagggccagcatttgcagaaggaccacaactggtgacgtccaggtcctgggactcgttcacacgcagaagctgggtgtcataggtgacaaagttgttgtcacgtactccaaaggttatccgtgtggtggaaataagaccgcatcctccgtgatagaattgacctgtacaaagacggtgggcagacctgcattcaagaggtttgatatcgacagctgcacttactacttcagctgggactcccgggctgcctgcgccgtgaagcctcaggaggtgcagatggtgaatgggaccatcaccaaccctataaatggcaagagcttcagcctcggagatatttattttaagctgttcagagcctctggggacatgaggaccaatggggacaactacctgtatgagatccaactttcctccatcacaagctccagaaacccggcgtgctctggagccaacatatgccaggtgaagcccaacgatcagcacttcagtcggaaagttggaacctctgacaagaccaagtactaccttcaagacggcgatctcgatgtcgtgtttgcctcttcctctaagtgcggaaaggataagaccaagtctgtttcttccaccatcttcttccactgtgaccctctggtggaggacgggatccccgagttcagtcacgagactgccgactgccagtacctcttctcttggtacacctcagccgtgtgtcctctgggggtgggctttgacagcgagaatcccggggacgacgggcagatgcacaaggggctgtcagaacggagccaggcagtcggcgcggtgctcagcctgctgctggtggcgctcacctgctgcctgctggccctgttgctctacaagaaggagaggagggaaacagtgataagtaagctgaccacttgctgtaggagaagttccaacgtgtcctacaaatactcaaaggtgaataaggaagaagagacagatgagaatgaaacagagtggctgatggaagagatccagctgcctcctccacggcagggaaaggaagggcaggagaacggccatattaccaccaagtcagtgaaagccctcagctccctgcatggggatgaccaggacagtgaggatgaggttctgaccatcccagaggtgaaagttcactcgggcaggggagctggggcagagagctcccacccagtgagaaacgcacagagcaatgcccttcaggagcgtgaggacgatagggtggggctggtcaggggtgagaaggcgaggaaagggaagtccagctctgcacagcagaagacagtgagctccaccaagctggtgtccttccatgacgacagcgacgaggacctcttacacatctgactccgcagtgcctgcaggggagcacggagccgcgggacagccaagcacctccaaccaaataagacttccactcgatgatgcttctataattttgcctttaacagaaactttcaaaagggaagagtttttgtgatgggggagagggtgaaggaggtcaggccccactccttcctgattgtttacagtcattggaataaggcatggctcagatcggccacagggcggtaccttgtgcccagggttttgccccaagtcctcatttaaaagcataaggccggacgcatctcaaaacagagggctgcattcgaagaaacccttgctgctttagtcccgatagggtatttgaccccgatatattttagcattttaattctctccccctatttattgactttgacaattactcaggtttgagaaaaaggaaaaaaaaacagccaccgtttcttcctgccagcaggggtgtgatgtaccagtttgtccatcttgagatggtgaggctgtcagtgtatggggcagcttccggcgggatgttgaactggtcattaatgtgtcccctgagttggagctcattctgtctcttttctcttttgctttctgtttcttaagggcacacacacgtgcgtgcgagcacacacacacatacgtgcacagggtccccgagtgcctaggttttggagagtttgcctgttctatgcctttagtcaggaatggctgcacctttttgcatgatatcttcaagcctgggcgtacagagcacatttgtcagtatttttgccggctggtgaattcaaacaacctgcccaaagattgatttgtgtgtttgtgtgtgtgtgtgtgtgtgtgtgtgtgtgtgtgagtggagttgaggtgtcagagaaaatgaattttttccagatttggggtataggtctcatctcttcaggttctcatgataccacctttactgtgcttatttttttaagaaaaaagtgttgatcaaccattcgacctataagaagccttaatttgcacagtgtgtgacttacagaaactgcatgaaaaatcatgggccagagcctcggccctagcattgcacttggcctcatgctggagggaggctgggcgggtacagcgcggaggaggagggaggccaggcgggcatggcgtggaggaggagggaggccgggcggtcacagcatggaggaggagggaggcgctgctggtgttcttattctggcggcagcgcctttcctgccatgtttagtgaatgacttttctcgcattgtagaattgtatatagactctggtgttctattgctgagaagcaaaccgccctgcagcatccctcagcctgtaccggtttggctggcttgtttgatttcaacatgagtgtattttttaaaattgatttttctcttcatttttttttcaatcaactttactgtaatataaagtattcaacaatttcaataaaagataaa

SEQ ID NO: 452015 - DNA, 9426 bp, Homo sapiens
  misc_feature (1674)..(1674): n is a, c, g, or t
gagcccagtcgagccgcgctcacctcgggctcccgctccgtctccacctccgcctttgccctggcggcgcgaccccgtcccgggcgcggccccagcagtcgcgcgccgttagcctcgcgcccgccgcgcagtccgggcccggcgcgatgggggccgccgccggccggagcccccacctggggcccgcgcccgcccgccgcccgcagcgctctctgctcctgctgcagctgctgctgctcgtcgctgccccggggtccacgcaggcccaggccgccccgttccccgagctgtgcagttatacatgggaagctgttgataccaaaaataatgtactttataaaatcaacatctgtggaagtgtggatattgtccagtgcgggccatcaagtgctgtttgtatgcacgacttgaagacacgcacttatcattcagtgggtgactctgttttgagaagtgcaaccagatctctcctggaattcaacacaacagtgagctgtgaccagcaaggcacaaatcacagagtccagagcagcattgccttcctgtgtgggaaaaccctgggaactcctgaatttgtaactgcaacagaatgtgtgcactactttgagtggaggaccactgcagcctgcaagaaagacatatttaaagcaaataaggaggtgccatgctatgtgtttgatgaagagttgaggaagcatgatctcaatcctctgatcaagcttagtggtgcctacttggtggatgactccgatccggacacttctctattcatcaatgtttgtagagacatagacacactacgagacccaggttcacagctgcgggcctgtccccccggcactgccgcctgcctggtaagaggacaccaggcgtttgatgttggccagccccgggacggactgaagctggtgcgcaaggacaggcttgtcctgagttacgtgagggaagaggcaggaaagctagacttttgtgatggtcacagccctgcggtgactattacatttgtttgcccgtcggagcggagagagggcaccattcccaaactcacagctaaatccaactgccgctatgaaattgagtggattactgagtatgcctgccacagagattacctggaaagtaaaacttgttctctgagcggcgagcagcaggatgtctccatagacctcacaccacttgcccagagcggaggttcatcctatatttcagatggaaaagaatatttgttttatttgaatgtctgtggagaaactgaaatacagttctgtaataaaaaacaagctgcagtttgccaagtgaaaaagagcgatacctctcaagtcaaagcagcaggaagataccacaatcagaccctccgatattcggatggagacctcaccttgatatattttggaggtgatgaatgcagctcagggtttcagcggatgagcgtcataaactttgagtgcaataaaaccgcaggtaacgatgggaaaggaactcctgtattcacaggggaggttgactgcacctacttcttcacatgggacacggaatacgcctgtgttaaggagaaggaagacctcctctgcggtgccaccgacgggaagaagcgctatgacctgtccgcgctggtccgccatgcagaaccagagcagaattgggaagctgtggatggcagtcagacggaaacanagaagaagcattttttcattaatatttgtcacagagtgctgcaggaaggcaaggcacgagggtgtcccgaggacgcggcagtgtgtgcagtggataaaaatggaagtaaaaatctgggaaaatttatttcctctcccatgaaagagaaaggaaacattcaactctcttattcagatggtgatgattgtggtcatggcaagaaaattaaaactaatatcacacttgtatgcaagccaggtgatctggaaagtgcaccagtgttgagaacttctggggaaggcggttgcttttatgagtttgagtggcacacagctgcggcctgtgtgctgtctaagacagaaggggagaactgcacggtctttgactcccaggcagggttttcttttgacttatcacctctcacaaagaaaaatggtgcctataaagttgagacaaagaagtatgacttttatataaatgtgtgtggcccggtgtctgtgagcccctgtcagccagactcaggagcctgccaggtggcaaaaagtgatgagaagacttggaacttgggtctgagtaatgcgaagctttcatattatgatgggatgatccaactgaactacagaggcggcacaccctataacaatgaaagacacacaccgagagctacgctcatcacctttctctgtgatcgagacgcgggagtgggcttccctgaatatcaggaagaggataactccacctacaacttccggtggtacaccagctatgcctgcccggaggagcccctggaatgcgtagtgaccgacccctccacgctggagcagtacgacctctccagtctggcaaaatctgaaggtggccttggaggaaactggtatgccatggacaactcaggggaacatgtcacgtggaggaaatactacattaacgtgtgtcggcctctgaatccagtgccgggctgcaaccgatatgcatcggcttgccagatgaagtatgaaaaagatcagggctccttcactgaagtggtttccatcagtaacttgggaatggcaaagaccggcccggtggttgaggacagcggcagcctccttctggaatacgtgaatgggtcggcctgcaccaccagcgatggcagacagaccacatataccacgaggatccatctcgtctgctccaggggcaggctgaacagccaccccatcttttctctcaactgggagtgtgtggtcagtttcctgtggaacacagaggctgcctgtcccattcagacaacgacggatacagaccaggcttgctctataagggatcccaacagtggatttgtgtttaatcttaatccgctaaacagttcgcaaggatataacgtctctggcattgggaagatttttatgtttaatgtctgcggcacaatgcctgtctgtgggaccatcctgggaaaacctgcttctggctgtgaggcagaaacccaaactgaagagctcaagaattggaagccagcaaggccagtcggaattgagaaaagcctccagctgtccacagagggcttcatcactctgacctacaaagggcctctctctgccaaaggtaccgctgatgcttttatcgtccgctttgtttgcaatgatgatgtttactcagggcccctcaaattcctgcatcaagatatcgactctgggcaagggatccgaaacacttactttgagtttgaaaccgcgttggcctgtgttccttctccagtggactgccaagtcaccgacctggctggaaatgagtacgacctgactggcctaagcacagtcaggaaaccttggacggctgttgacacctctgtcgatgggagaaagaggactttctatttgagcgtttgcaatcctctcccttacattcctggatgccagggcagcgcagtggggtcttgcttagtgtcagaaggcaatagctggaatctgggtgtggtgcagatgagtccccaagccgcggcgaatggatctttgagcatcatgtatgtcaacggtgacaagtgtgggaaccagcgcttctccaccaggatcacgtttgagtgtgctcagatatcgggctcaccagcatttcagcttcaggatggttgtgagtacgtgtttatctggagaactgtggaagcctgtcccgttgtcagagtggaaggggacaactgtgaggtgaaagacccaaggcatggcaacttgtatgacctgaagcccctgggcctcaacgacaccatcgtgagcgctggcgaatacacttattacttccgggtctgtgggaagctttcctcagacgtctgccccacaagtgacaagtccaaggtggtctcctcatgtcaggaaaagcgggaaccgcagggatttcacaaagtggcaggtctcctgactcagaagctaacttatgaaaatggcttgttaaaaatgaacttcacggggggggacacttgccataaggtttatcagcgctccacagccatcttcttctactgtgaccgcggcacccagcggccagtatttctaaaggagacttcagattgttcctacttgtttgagtggcgaacgcagtatgcctgcccacctttcgatctgactgaatgttcattcaaagatggggctggcaactccttcgacctctcgtccctgtcaaggtacagtgacaactgggaagccatcactgggacgggggacccggagcactacctcatcaatgtctgcaagtctctggccccgcaggctggcactgagccgtgccctccagaagcagccgcgtgtctgctgggtggctccaagcccgtgaacctcggcagggtaagggacggacctcagtggagagatggcataattgtcctgaaatacgttgatggcgacttatgtccagatgggattcggaaaaagtcaaccaccatccgattcacctgcagcgagagccaagtgaactccaggcccatgttcatcagcgccgtggaggactgtgagtacacctttgcctggcccacagccacagcctgtcccatgaagagcaacgagcatgatgactgccaggtcaccaacccaagcacaggacacctgtttgatctgagctccttaagtggcagggcgggattcacagctgcttacagcgagaaggggttggtttacatgagcatctgtggggagaatgaaaactgccctcctggcgtgggggcctgctttggacagaccaggattagcgtgggcaaggccaacaagaggctgagatacgtggaccaggtcctgcagctggtgtacaaggatgggtccccttgtccctccaaatccggcctgagctataagagtgtgatcagtttcgtgtgcaggcctgaggccgggccaaccaataggcccatgctcatctccctggacaagcagacatgcactctcttcttctcctggcacacgccgctggcctgcgagcaagcgaccgaatgttccgtgaggaatggaagctctattgttgacttgtctccccttattcatcgcactggtggttatgaggcttatgatgagagtgaggatgatgcctccgataccaaccctgatttctacatcaatatttgtcagccactaaatcccatgcacggagtgccctgtcctgccggagccgctgtgtgcaaagttcctattgatggtccccccatagatatcggccgggtagcaggaccaccaatactcaatccaatagcaaatgagatttacttgaattttgaaagcagtactccttgcttagcggacaagcatttcaactacacctcgctcatcgcgtttcactgtaagagaggtgtgagcatgggaacgcctaagctgttaaggaccagcgagtgcgactttgtgttcgaatgggagactcctgtcgtctgtcctgatgaagtgaggatggatggctgtaccctgacagatgagcagctcctctacagcttcaacttgtccagcctttccacgagcacctttaaggtgactcgcgactcgcgcacctacagcgttggggtgtgcacctttgcagtcgggccagaacaaggaggctgtaaggacggaggagtctgtctgctctcaggcaccaagggggcatcctttggacggctgcaatcaatgaaactggattacaggcaccaggatgaagcggtcgttttaagttacgtgaatggtgatcgttgccctccagaaaccgatgacggcgtcccctgtgtcttccccttcatattcaatgggaagagctacgaggagtgcatcatagagagcagggcgaagctgtggtgtagcacaactgcggactacgacagagaccacgagtggggcttctgcagacactcaaacagctaccggacatccagcatcatatttaagtgtgatgaagatgaggacattgggaggccacaagtcttcagtgaagtgcgtgggtgtgatgtgacatttgagtggaaaacaaaagttgtctgccctccaaagaagttggagtgcaaattcgtccagaaacacaaaacctacgacctgcggctgctctcctctctcaccgggtcctggtccctggtccacaacggagtctcgtactatataaatctgtgccagaaaatatataaagggcccctgggctgctctgaaagggccagcatttgcagaaggaccacaactggtgacgtccaggtcctgggactcgttcacacgcagaagctgggtgtcataggtgacaaagttgttgtcacgtactccaaaggttatccgtgtggtggaaataagaccgcatcctccgtgatagaattgacctgtacaaagacggtgggcagacctgcattcaagaggtttgatatcgacagctgcacttactacttcagctgggactcccgggctgcctgcgccgtgaagcctcaggaggtgcagatggtgaatgggaccatcaccaaccctataaatggcaagagcttcagcctcggagatatttattttaagctgttcagagcctctggggacatgaggaccaatggggacaactacctgtatgagatccaactttcctccatcacaagctccagaaacccggcgtgctctggagccaacatatgccaggtgaagcccaacgatcagcacttcagtcggaaagttggaacctctgacaagaccaagtactaccttcaagacggcgatctcgatgtcgtgtttgcctcttcctctaagtgcggaaaggataagaccaagtctgtttcttccaccatcttcttccactgtgaccctctggtggaggacgggatccccgagttcagtcacgagactgccgactgccagtacctcttctcttggtacacctcagccgtgtgtcctctgggggtgggctttgacagcgagaatcccggggacgacgggcagatgcacaaggggctgtcagaacggagccaggcagtcggcgcggtgctcagcctgctgctggtggcgctcacctgctgcctgctggccctgttgctctacaagaaggagaggagggaaacagtgataagtaagctgaccacttgctgtaggagaagttccaacgtgtcctacaaatactcaaaggtgaataaggaagaagagacagatgagaatgaaacagagtggctgatggaagagatccagctgcctcctccacggcagggaaaggaagggcaggagaacggccatattaccaccaagtcagtgaaagccctcagctccctgcatggggatgaccaggacagtgaggatgaggttctgaccatcccagaggtgaaagttcactcgggcaggggagctggggcagagagctcccacccagtgagaaacgcacagagcaatgcccttcaggagcgtgaggacgatagggtggggctggtcaggggtgagaaggcgaggaaagggaagtccagctctgcacagcagaagacagtgagctccaccaagctggtgtccttccatgacgacagcgacgaggacctcttacacatctgactccgcagtgcctgcaggggagcacggagccgcgggacagccaagcacctccaaccaaataagacttccactcgatgatgcttctataattttgcctttaacagaaactttcaaaagggaagagtttttgtgatgggggagagggtgaaggaggtcaggccccactccttcctgattgtttacagtcattggaataaggcatggctcagatcggccacagggcggtaccttgtgcccagggttttgccccaagtcctcatttaaaagcataaggccggacgcatctcaaaacagagggctgcattcgaagaaacccttgctgctttagtcccgatagggtatttgaccccgatatattttagcattttaattctctccccctatttattgactttgacaattactcaggtttgagaaaaaggaaaaaaaaacagccaccgtttcttcctgccagcaggggtgtgatgtaccagtttgtccatcttgagatggtgaggctgtcagtgtatggggcagcttccggcgggatgttgaactggtcattaatgtgtcccctgagttggagctcattctgtctcttttctcttttgctttctgtttcttaagggcacacacacgtgcgtgcgagcacacacacacatacgtgcacagggtccccgagtgcctaggttttggagagtttgcctgttctatgcctttagtcaggaatggctgcacctttttgcatgatatcttcaagcctgggcgtacagagcacatttgtcagtatttttgccggctggtgaattcaaacaacctgcccaaagattgatttgtgtgtttgtgtgtgtgtgtgtgtgtgtgtgtgtgtgtgtgagtggagttgaggtgtcagagaaaatgaattttttccagatttggggtataggtctcatctcttcaggttctcatgataccacctttactgtgcttatttttttaagaaaaaagtgttgatcaaccattcgacctataagaagccttaatttgcacagtgtgtgacttacagaaactgcatgaaaaatcatgggccagagcctcggccctagcattgcacttggcctcatgctggagggaggctgggcgggtacagcgcggaggaggagggaggccaggcgggcatggcgtggaggaggagggaggccgggcggtcacagcatggaggaggagggaggcgctgctggtgttcttattctggcggcagcgcctttcctgccatgtttagtgaatgacttttctcgcattgtagaattgtatatagactctggtgttctattgctgagaagcaaaccgccctgcagcatccctcagcctgtaccggtttggctggcttgtttgatttcaacatgagtgtattttttaaaattgatttttctcttcatttttttttcaatcaactttactgtaatataaagtattcaacaatttcaataaaagataaaaaaaaacaatgccaacggactgagggtctctgaaaggaaccccccacaaaatttaacagccaaaattttcggttaaaaaaaaaacttttgggccccttgggcccattgaattttgacacttgcaaacttttttcttggcgccccaaatttgggcctcaattgggccaattccgccttatgggggggccgttttcacatttcaatgggcccgagttttaaccacctttgtgaactgtgggcccttgggggttacccaaacttaaactggccttgggaaacaaattccctcttttcccaaggtggcgctaattacccggagggccctccaccgtgcggccttttcc

SEQ ID NO: 452016 - DNA, 7701 bp, Homo sapiens
  misc_feature (1674)..(1674): n is a, c, g, or t
gagcccagtcgagccgcgctcacctcgggctcccgctccgtctccacctccgcctttgccctggcggcgcgaccccgtcccgggcgcggccccagcagtcgcgcgccgttagcctcgcgcccgccgcgcagtccgggcccggcgcgatgggggccgccgccggccggagcccccacctggggcccgcgcccgcccgccgcccgcagcgctctctgctcctgctgcagctgctgctgctcgtcgctgccccggggtccacgcaggcccaggccgccccgttccccgagctgtgcagttatacatgggaagctgttgataccaaaaataatgtactttataaaatcaacatctgtggaagtgtggatattgtccagtgcgggccatcaagtgctgtttgtatgcacgacttgaagacacgcacttatcattcagtgggtgactctgttttgagaagtgcaaccagatctctcctggaattcaacacaacagtgagctgtgaccagcaaggcacaaatcacagagtccagagcagcattgccttcctgtgtgggaaaaccctgggaactcctgaatttgtaactgcaacagaatgtgtgcactactttgagtggaggaccactgcagcctgcaagaaagacatatttaaagcaaataaggaggtgccatgctatgtgtttgatgaagagttgaggaagcatgatctcaatcctctgatcaagcttagtggtgcctacttggtggatgactccgatccggacacttctctattcatcaatgtttgtagagacatagacacactacgagacccaggttcacagctgcgggcctgtccccccggcactgccgcctgcctggtaagaggacaccaggcgtttgatgttggccagccccgggacggactgaagctggtgcgcaaggacaggcttgtcctgagttacgtgagggaagaggcaggaaagctagacttttgtgatggtcacagccctgcggtgactattacatttgtttgcccgtcggagcggagagagggcaccattcccaaactcacagctaaatccaactgccgctatgaaattgagtggattactgagtatgcctgccacagagattacctggaaagtaaaacttgttctctgagcggcgagcagcaggatgtctccatagacctcacaccacttgcccagagcggaggttcatcctatatttcagatggaaaagaatatttgttttatttgaatgtctgtggagaaactgaaatacagttctgtaataaaaaacaagctgcagtttgccaagtgaaaaagagcgatacctctcaagtcaaagcagcaggaagataccacaatcagaccctccgatattcggatggagacctcaccttgatatattttggaggtgatgaatgcagctcagggtttcagcggatgagcgtcataaactttgagtgcaataaaaccgcaggtaacgatgggaaaggaactcctgtattcacaggggaggttgactgcacctacttcttcacatgggacacggaatacgcctgtgttaaggagaaggaagacctcctctgcggtgccaccgacgggaagaagcgctatgacctgtccgcgctggtccgccatgcagaaccagagcagaattgggaagctgtggatggcagtcagacggaaacanagaagaagcattttttcattaatatttgtcacagagtgctgcaggaaggcaaggcacgagggtgtcccgaggacgcggcagtgtgtgcagtggataaaaatggaagtaaaaatctgggaaaatttatttcctctcccatgaaagagaaaggaaacattcaactctcttattcagatggtgatgattgtggtcatggcaagaaaattaaaactaatatcacacttgtatgcaagccaggtgatctggaaagtgcaccagtgttgagaacttctggggaaggcggttgcttttatgagtttgagtggcacacagctgcggcctgtgtgctgtctaagacagaaggggagaactgcacggtctttgactcccaggcagggttttcttttgacttatcacctctcacaaagaaaaatggtgcctataaagttgagacaaagaagtatgacttttatataaatgtgtgtggcccggtgtctgtgagcccctgtcagccagactcaggagcctgccaggtggcaaaaagtgatgagaagacttggaacttgggtctgagtaatgcgaagctttcatattatgatgggatgatccaactgaactacagaggcggcacaccctataacaatgaaagacacacaccgagagctacgctcatcacctttctctgtgatcgagacgcgggagtgggcttccctgaatatcaggaagaggataactccacctacaacttccggtggtacaccagctatgcctgcccggaggagcccctggaatgcgtagtgaccgacccctccacgctggagcagtacgacctctccagtctggcaaaatctgaaggtggccttggaggaaactggtatgccatggacaactcaggggaacatgtcacgtggaggaaatactacattaacgtgtgtcggcctctgaatccagtgccgggctgcaaccgatatgcatcggcttgccagatgaagtatgaaaaagatcagggctccttcactgaagtggtttccatcagtaacttgggaatggcaaagaccggcccggtggttgaggacagcggcagcctccttctggaatacgtgaatgggtcggcctgcaccaccagcgatggcagacagaccacatataccacgaggatccatctcgtctgctccaggggcaggctgaacagccaccccatcttttctctcaactgggagtgtgtggtcagtttcctgtggaacacagaggctgcctgtcccattcagacaacgacggatacagaccaggcttgctctataagggatcccaacagtggatttgtgtttaatcttaatccgctaaacagttcgcaaggatataacgtctctggcattgggaagatttttatgtttaatgtctgcggcacaatgcctgtctgtgggaccatcctgggaaaacctgcttctggctgtgaggcagaaacccaaactgaagagctcaagaattggaagccagcaaggccagtcggaattgagaaaagcctccagctgtccacagagggcttcatcactctgacctacaaagggcctctctctgccaaaggtaccgctgatgcttttatcgtccgctttgtttgcaatgatgatgtttactcagggcccctcaaattcctgcatcaagatatcgactctgggcaagggatccgaaacacttactttgagtttgaaaccgcgttggcctgtgttccttctccagtggactgccaagtcaccgacctggctggaaatgagtacgacctgactggcctaagcacagtcaggaaaccttggacggctgttgacacctctgtcgatgggagaaagaggactttctatttgagcgtttgcaatcctctcccttacattcctggatgccagggcagcgcagtggggtcttgcttagtgtcagaaggcaatagctggaatctgggtgtggtgcagatgagtccccaagccgcggcgaatggatctttgagcatcatgtatgtcaacggtgacaagtgtgggaaccagcgcttctccaccaggatcacgtttgagtgtgctcagatatcgggctcaccagcatttcagcttcaggatggttgtgagtacgtgtttatctggagaactgtggaagcctgtcccgttgtcagagtggaaggggacaactgtgaggtgaaagacccaaggcatggcaacttgtatgacctgaagcccctgggcctcaacgacaccatcgtgagcgctggcgaatacacttattacttccgggtctgtgggaagctttcctcagacgtctgccccacaagtgacaagtccaaggtggtctcctcatgtcaggaaaagcgggaaccgcagggatttcacaaagtggcaggtctcctgactcagaagctaacttatgaaaatggcttgttaaaaatgaacttcacggggggggacacttgccataaggtttatcagcgctccacagccatcttcttctactgtgaccgcggcacccagcggccagtatttctaaaggagacttcagattgttcctacttgtttgagtggcgaacgcagtatgcctgcccacctttcgatctgactgaatgttcattcaaagatggggctggcaactccttcgacctctcgtccctgtcaaggtacagtgacaactgggaagccatcactgggacgggggacccggagcactacctcatcaatgtctgcaagtctctggccccgcaggctggcactgagccgtgccctccagaagcagccgcgtgtctgctgggtggctccaagcccgtgaacctcggcagggtaagggacggacctcagtggagagatggcataattgtcctgaaatacgttgatggcgacttatgtccagatgggattcggaaaaagtcaaccaccatccgattcacctgcagcgagagccaagtgaactccaggcccatgttcatcagcgccgtggaggactgtgagtacacctttgcctggcccacagccacagcctgtcccatgaagagcaacgagcatgatgactgccaggtcaccaacccaagcacaggacacctgtttgatctgagctccttaagtggcagggcgggattcacagctgcttacagcgagaaggggttggtttacatgagcatctgtggggagaatgaaaactgccctcctggcgtgggggcctgctttggacagaccaggattagcgtgggcaaggccaacaagaggctgagatacgtggaccaggtcctgcagctggtgtacaaggatgggtccccttgtccctccaaatccggcctgagctataagagtgtgatcagtttcgtgtgcaggcctgaggccgggccaaccaataggcccatgctcatctccctggacaagcagacatgcactctcttcttctcctggcacacgccgctggcctgcgagcaagcgaccgaatgttccgtgaggaatggaagctctattgttgacttgtctccccttattcatcgcactggtggttatgaggcttatgatgagagtgaggatgatgcctccgataccaaccctgatttctacatcaatatttgtcagccactaaatcccatgcacggagtgccctgtcctgccggagccgctgtgtgcaaagttcctattgatggtccccccatagatatcggccgggtagcaggaccaccaatactcaatccaatagcaaatgagatttacttgaattttgaaagcagtactccttgcttagcggacaagcatttcaactacacctcgctcatcgcgtttcactgtaagagaggtgtgagcatgggaacgcctaagctgttaaggaccagcgagtgcgactttgtgttcgaatgggagactcctgtcgtctgtcctgatgaagtgaggatggatggctgtaccctgacagatgagcagctcctctacagcttcaacttgtccagcctttccacgagcacctttaaggtgactcgcgactcgcgcacctacagcgttggggtgtgcacctttgcagtcgggccagaacaaggaggctgtaaggacggaggagtctgtctgctctcaggcaccaagggggcatcctttggacggctgcaatcaatgaaactggattacaggcaccaggatgaagcggtcgttttaagttacgtgaatggtgatcgttgccctccagaaaccgatgacggcgtcccctgtgtcttccccttcatattcaatgggaagagctacgaggagtgcatcatagagagcagggcgaagctgtggtgtagcacaactgcggactacgacagagaccacgagtggggcttctgcagacactcaaacagctaccggacatccagcatcatatttaagtgtgatgaagatgaggacattgggaggccacaagtcttcagtgaagtgcgtgggtgtgatgtgacatttgagtggaaaacaaaagttgtctgccctccaaagaagttggagtgcaaattcgtccagaaacacaaaacctacgacctgcggctgctctcctctctcaccgggtcctggtcctggtgtccttccatgacgacagcgacgaggacctcttacacatctgactccgcagtgcctgcaggggagcacggagccgcgggacagccaagcacctccaaccaaataagacttccactcgatgatgcttctataattttgcctttaacagaaactttcaaaagggaagagtttttgtgatgggggagagggtgaaggaggtcaggccccactccttcctgattgtttacagtcattggaataaggcatggctcagatcggccacagggcggtaccttgtgcccagggttttgccccaagtcctcatttaaaagcataaggccggacgcatctcaaaacagagggctgcattcgaagaaacccttgctgctttagtcccgatagggtatttgaccccgatatattttagcattttaattctctccccctatttattgactttgacaattactcaggtttgagaaaaaggaaaaaaaaacagccaccgtttcttcctgccagcaggggtgtgatgtaccagtttgtccatcttgagatggtgaggctgtcagtgtatggggcagcttccggcgggatgttgaactggtcattaatgtgtcccctgagttggagctcattctgtctcttttctcttttgctttctgtttcttaagggcacacacacgtgcgtgcgagcacacacacacatacgtgcacagggtccccgagtgcctaggttttggagagtttgcctgttctatgcctttagtcaggaatggctgcacctttttgcatgatatcttcaagcctgggcgtacagagcacatttgtcagtatttttgccggctggtgaattcaaacaacctgcccaaagattgatttgtgtgtttgtgtgtgtgtgtgtgtgtgtgtgtgtgtgtgtgagtggagttgaggtgtcagagaaaatgaattttttccagatttggggtataggtctcatctcttcaggttctcatgataccacctttactgtgcttatttttttaagaaaaaagtgttgatcaaccattcgacctataagaagccttaatttgcacagtgtgtgacttacagaaactgcatgaaaaatcatgggccagagcctcggccctagcattgcacttggcctcatgctggagggaggctgggcgggtacagcgcggaggaggagggaggccaggcgggcatggcgtggaggaggagggaggccgggcggtcacagcatggaggaggagggaggcgctgctggtgttcttattctggcggcagcgcctttcctgccatgtttagtgaatgacttttctcgcattgtagaattgtatatagactctggtgttctattgctgagaagcaaaccgccctgcagcatccctcagcctgtaccggtttggctggcttgtttgatttcaacatgagtgtattttttaaaattgatttttctcttcatttttttttcaatcaactttactgtaatataaagtattcaacaatttcaataaaagataaa

SEQ ID NO: 452017 - DNA, 7448 bp, Homo sapiens
  misc_feature (1674)..(1674): n is a, c, g, or t
gagcccagtcgagccgcgctcacctcgggctcccgctccgtctccacctccgcctttgccctggcggcgcgaccccgtcccgggcgcggccccagcagtcgcgcgccgttagcctcgcgcccgccgcgcagtccgggcccggcgcgatgggggccgccgccggccggagcccccacctggggcccgcgcccgcccgccgcccgcagcgctctctgctcctgctgcagctgctgctgctcgtcgctgccccggggtccacgcaggcccaggccgccccgttccccgagctgtgcagttatacatgggaagctgttgataccaaaaataatgtactttataaaatcaacatctgtggaagtgtggatattgtccagtgcgggccatcaagtgctgtttgtatgcacgacttgaagacacgcacttatcattcagtgggtgactctgttttgagaagtgcaaccagatctctcctggaattcaacacaacagtgagctgtgaccagcaaggcacaaatcacagagtccagagcagcattgccttcctgtgtgggaaaaccctgggaactcctgaatttgtaactgcaacagaatgtgtgcactactttgagtggaggaccactgcagcctgcaagaaagacatatttaaagcaaataaggaggtgccatgctatgtgtttgatgaagagttgaggaagcatgatctcaatcctctgatcaagcttagtggtgcctacttggtggatgactccgatccggacacttctctattcatcaatgtttgtagagacatagacacactacgagacccaggttcacagctgcgggcctgtccccccggcactgccgcctgcctggtaagaggacaccaggcgtttgatgttggccagccccgggacggactgaagctggtgcgcaaggacaggcttgtcctgagttacgtgagggaagaggcaggaaagctagacttttgtgatggtcacagccctgcggtgactattacatttgtttgcccgtcggagcggagagagggcaccattcccaaactcacagctaaatccaactgccgctatgaaattgagtggattactgagtatgcctgccacagagattacctggaaagtaaaacttgttctctgagcggcgagcagcaggatgtctccatagacctcacaccacttgcccagagcggaggttcatcctatatttcagatggaaaagaatatttgttttatttgaatgtctgtggagaaactgaaatacagttctgtaataaaaaacaagctgcagtttgccaagtgaaaaagagcgatacctctcaagtcaaagcagcaggaagataccacaatcagaccctccgatattcggatggagacctcaccttgatatattttggaggtgatgaatgcagctcagggtttcagcggatgagcgtcataaactttgagtgcaataaaaccgcaggtaacgatgggaaaggaactcctgtattcacaggggaggttgactgcacctacttcttcacatgggacacggaatacgcctgtgttaaggagaaggaagacctcctctgcggtgccaccgacgggaagaagcgctatgacctgtccgcgctggtccgccatgcagaaccagagcagaattgggaagctgtggatggcagtcagacggaaacanagaagaagcattttttcattaatatttgtcacagagtgctgcaggaaggcaaggcacgagggtgtcccgaggacgcggcagtgtgtgcagtggataaaaatggaagtaaaaatctgggaaaatttatttcctctcccatgaaagagaaaggaaacattcaactctcttattcagatggtgatgattgtggtcatggcaagaaaattaaaactaatatcacacttgtatgcaagccaggtgatctggaaagtgcaccagtgttgagaacttctggggaaggcggttgcttttatgagtttgagtggcacacagctgcggcctgtgtgctgtctaagacagaaggggagaactgcacggtctttgactcccaggcagggttttcttttgacttatcacctctcacaaagaaaaatggtgcctataaagttgagacaaagaagtatgacttttatataaatgtgtgtggcccggtgtctgtgagcccctgtcagccagactcaggagcctgccaggtggcaaaaagtgatgagaagacttggaacttgggtctgagtaatgcgaagctttcatattatgatgggatgatccaactgaactacagaggcggcacaccctataacaatgaaagacacacaccgagagctacgctcatcacctttctctgtgatcgagacgcgggagtgggcttccctgaatatcaggaagaggataactccacctacaacttccggtggtacaccagctatgcctgcccggaggagcccctggaatgcgtagtgaccgacccctccacgctggagcagtacgacctctccagtctggcaaaatctgaaggtggccttggaggaaactggtatgccatggacaactcaggggaacatgtcacgtggaggaaatactacattaacgtgtgtcggcctctgaatccagtgccgggctgcaaccgatatgcatcggcttgccagatgaagtatgaaaaagatcagggctccttcactgaagtggtttccatcagtaacttgggaatggcaaagaccggcccggtggttgaggacagcggcagcctccttctggaatacgtgaatgggtcggcctgcaccaccagcgatggcagacagaccacatataccacgaggatccatctcgtctgctccaggggcaggctgaacagccaccccatcttttctctcaactgggagtgtgtggtcagtttcctgtggaacacagaggctgcctgtcccattcagacaacgacggatacagaccaggcttgctctataagggatcccaacagtggatttgtgtttaatcttaatccgctaaacagttcgcaaggatataacgtctctggcattgggaagatttttatgtttaatgtctgcggcacaatgcctgtctgtgggaccatcctgggaaaacctgcttctggctgtgaggcagaaacccaaactgaagagctcaagaattggaagccagcaaggccagtcggaattgagaaaagcctccagctgtccacagagggcttcatcactctgacctacaaagggcctctctctgccaaaggtaccgctgatgcttttatcgtccgctttgtttgcaatgatgatgtttactcagggcccctcaaattcctgcatcaagatatcgactctgggcaagggatccgaaacacttactttgagtttgaaaccgcgttggcctgtgttccttctccagtggactgccaagtcaccgacctggctggaaatgagtacgacctgactggcctaagcacagtcaggaaaccttggacggctgttgacacctctgtcgatgggagaaagaggactttctatttgagcgtttgcaatcctctcccttacattcctggatgccagggcagcgcagtggggtcttgcttagtgtcagaaggcaatagctggaatctgggtgtggtgcagatgagtccccaagccgcggcgaatggatctttgagcatcatgtatgtcaacggtgacaagtgtgggaaccagcgcttctccaccaggatcacgtttgagtgtgctcagatatcgggctcaccagcatttcagcttcaggatggttgtgagtacgtgtttatctggagaactgtggaagcctgtcccgttgtcagagtggaaggggacaactgtgaggtgaaagacccaaggcatggcaacttgtatgacctgaagcccctgggcctcaacgacaccatcgtgagcgctggcgaatacacttattacttccgggtctgtgggaagctttcctcagacgtctgccccacaagtgacaagtccaaggtggtctcctcatgtcaggaaaagcgggaaccgcagggatttcacaaagtggcaggtctcctgactcagaagctaacttatgaaaatggcttgttaaaaatgaacttcacggggggggacacttgccataaggtttatcagcgctccacagccatcttcttctactgtgaccgcggcacccagcggccagtatttctaaaggagacttcagattgttcctacttgtttgagtggcgaacgcagtatgcctgcccacctttcgatctgactgaatgttcattcaaagatggggctggcaactccttcgacctctcgtccctgtcaaggtacagtgacaactgggaagccatcactgggacgggggacccggagcactacctcatcaatgtctgcaagtctctggccccgcaggctggcactgagccgtgccctccagaagcagccgcgtgtctgctgggtggctccaagcccgtgaacctcggcagggtaagggacggacctcagtggagagatggcataattgtcctgaaatacgttgatggcgacttatgtccagatgggattcggaaaaagtcaaccaccatccgattcacctgcagcgagagccaagtgaactccaggcccatgttcatcagcgccgtggaggactgtgagtacacctttgcctggcccacagccacagcctgtcccatgaagagcaacgagcatgatgactgccaggtcaccaacccaagcacaggacacctgtttgatctgagctccttaagtggcagggcgggattcacagctgcttacagcgagaaggggttggtttacatgagcatctgtggggagaatgaaaactgccctcctggcgtgggggcctgctttggacagaccaggattagcgtgggcaaggccaacaagaggctgagatacgtggaccaggtcctgcagctggtgtacaaggatgggtccccttgtccctccaaatccggcctgagctataagagtgtgatcagtttcgtgtgcaggcctgaggccgggccaaccaataggcccatgctcatctccctggacaagcagacatgcactctcttcttctcctggcacacgccgctggcctgcgagcaagcgaccgaatgttccgtgaggaatggaagctctattgttgacttgtctccccttattcatcgcactggtggttatgaggcttatgatgagagtgaggatgatgcctccgataccaaccctgatttctacatcaatatttgtcagccactaaatcccatgcacggagtgccctgtcctgccggagccgctgtgtgcaaagttcctattgatggtccccccatagatatcggccgggtagcaggaccaccaatactcaatccaatagcaaatgagatttacttgaattttgaaagcagtactccttgcttagcggacaagcatttcaactacacctcgctcatcgcgtttcactgtaagagaggtgtgagcatgggaacgcctaagctgttaaggaccagcgagtgcgactttgtgttcgaatgggagactcctgtcgtctgtcctgatgaagtgaggatggatggctgtaccctgacagatgagcagctcctctacagcttcaacttgtccagcctttccacgagcacctttaaggtgactcgcgactcgcgcacctacagcgttggggtgtgcacctttgcagtcgggccagaacaaggaggctgtaaggacggaggagtctgtctgctctcaggcaccaagggggcatcctttggacggctgcaatcaatgaaactggattacaggcaccaggatgaagcggtcgttttaagttacgtgaatggtgatcgttgccctccagaaaccgatgacggcgtcccctgtgtcttccccttcatattcaatgggaagagctacgaggagtgcatcatagagagcagggcgaagctgtggtgtagcacaactgcggactacgacagagaccacgagtggggcttctgcagacactcaaacagctaccggacatccagcatcatatttaagtgtgatgaagatgaggacattgggaggccacaagtcttcagtgaagtgcgtgggtgtgatgtgacatttgagtggaaaacaaaagttgtctgccctccaaagaagttggagtgcaaattcgtccagaaacacaaaacctacgacctgcggctgctctcctctctcaccgggtcctggtccctggtccacaacggagtctcgtactatataaatctgtgccagaaaatatataaagggcccctgggctgctctgaaagggccagcatttgcagaaggaccacaactggtgacgtccaggtcctgggactcgttcacacgcagaagctgggtgtcataggtgacaaagttgttgtcacgtactccaaaggttatccgtgtggtggaaataagaccgcatcctccgtgatagaattgacctgtacaaagacggtgggcagacctgcattcaagaggtttgatatcgacagctgcacttactacttcagctgggactcccgggctgcctgcgccgtgaagcctcaggaggtgcagatggtgaatgggaccatcaccaaccctataaatggcaagagcttcagcctcggagatatttattttaagctgttcagagcctctggggacatgaggaccaatggggacaactacctgtatgagatccaactttcctccatcacaagctccagaaacccggcgtgctctggagccaacatatgccaggtgaagcccaacgatcagcacttcagtcggaaagttggaacctctgacaagaccaagtactaccttcaaggtaatccgtggcttcccacaaagttccacatttaacttcctccaaggaaggggattaaaattttcaactaactcccttcagttgaaatctcggaccacttttaaaacaaaaaccttggtctaattctttactttgttatgaatttcttgacagtggattgagcgatacgtgtcagaactaagcatttcactgtaggcaaattgtgtcttagttatcaagtaaatgtacaaaaaaactaaaacctggtctgatccagtggttctgaggttgggtggaggctgagctgtgcacagtcagaattgcctttgatttggttttaaccatgacacttccttattttggaatgccaaataatattagagaagggtaagagattttatatttgtaagaaggatgaaaggaaactggcctaaatgttaggatgtaggttaaaatcaaccaggacgcacatagggcagagtccagggtgtgaaggaaggttttaaactggcactaataagggtgttgccctttgttccctcacataatcgtgaaaggctgcttttgttttgaacagctagtcttaactatatacctttcataatttgatttttgaaccgtgtgtggatgtaataactctttaaaaaaaaatgaagtgtgtttaaaga

SEQ ID NO: 452018 - DNA, 6406 bp, Homo sapiens
  misc_feature (1674)..(1674): n is a, c, g, or t
gagcccagtcgagccgcgctcacctcgggctcccgctccgtctccacctccgcctttgccctggcggcgcgaccccgtcccgggcgcggccccagcagtcgcgcgccgttagcctcgcgcccgccgcgcagtccgggcccggcgcgatgggggccgccgccggccggagcccccacctggggcccgcgcccgcccgccgcccgcagcgctctctgctcctgctgcagctgctgctgctcgtcgctgccccggggtccacgcaggcccaggccgccccgttccccgagctgtgcagttatacatgggaagctgttgataccaaaaataatgtactttataaaatcaacatctgtggaagtgtggatattgtccagtgcgggccatcaagtgctgtttgtatgcacgacttgaagacacgcacttatcattcagtgggtgactctgttttgagaagtgcaaccagatctctcctggaattcaacacaacagtgagctgtgaccagcaaggcacaaatcacagagtccagagcagcattgccttcctgtgtgggaaaaccctgggaactcctgaatttgtaactgcaacagaatgtgtgcactactttgagtggaggaccactgcagcctgcaagaaagacatatttaaagcaaataaggaggtgccatgctatgtgtttgatgaagagttgaggaagcatgatctcaatcctctgatcaagcttagtggtgcctacttggtggatgactccgatccggacacttctctattcatcaatgtttgtagagacatagacacactacgagacccaggttcacagctgcgggcctgtccccccggcactgccgcctgcctggtaagaggacaccaggcgtttgatgttggccagccccgggacggactgaagctggtgcgcaaggacaggcttgtcctgagttacgtgagggaagaggcaggaaagctagacttttgtgatggtcacagccctgcggtgactattacatttgtttgcccgtcggagcggagagagggcaccattcccaaactcacagctaaatccaactgccgctatgaaattgagtggattactgagtatgcctgccacagagattacctggaaagtaaaacttgttctctgagcggcgagcagcaggatgtctccatagacctcacaccacttgcccagagcggaggttcatcctatatttcagatggaaaagaatatttgttttatttgaatgtctgtggagaaactgaaatacagttctgtaataaaaaacaagctgcagtttgccaagtgaaaaagagcgatacctctcaagtcaaagcagcaggaagataccacaatcagaccctccgatattcggatggagacctcaccttgatatattttggaggtgatgaatgcagctcagggtttcagcggatgagcgtcataaactttgagtgcaataaaaccgcaggtaacgatgggaaaggaactcctgtattcacaggggaggttgactgcacctacttcttcacatgggacacggaatacgcctgtgttaaggagaaggaagacctcctctgcggtgccaccgacgggaagaagcgctatgacctgtccgcgctggtccgccatgcagaaccagagcagaattgggaagctgtggatggcagtcagacggaaacanagaagaagcattttttcattaatatttgtcacagagtgctgcaggaaggcaaggcacgagggtgtcccgaggacgcggcagtgtgtgcagtggataaaaatggaagtaaaaatctgggaaaatttatttcctctcccatgaaagagaaaggaaacattcaactctcttattcagatggtgatgattgtggtcatggcaagaaaattaaaactaatatcacacttgtatgcaagccaggtgatctggaaagtgcaccagtgttgagaacttctggggaaggcggttgcttttatgagtttgagtggcacacagctgcggcctgtgtgctgtctaagacagaaggggagaactgcacggtctttgactcccaggcagggttttcttttgacttatcacctctcacaaagaaaaatggtgcctataaagttgagacaaagaagtatgacttttatataaatgtgtgtggcccggtgtctgtgagcccctgtcagccagactcaggagcctgccaggtggcaaaaagtgatgagaagacttggaacttgggtctgagtaatgcgaagctttcatattatgatgggatgatccaactgaactacagaggcggcacaccctataacaatgaaagacacacaccgagagctacgctcatcacctttctctgtgatcgagacgcgggagtgggcttccctgaatatcaggaagaggataactccacctacaacttccggtggtacaccagctatgcctgcccggaggagcccctggaatgcgtagtgaccgacccctccacgctggagcagtacgacctctccagtctggcaaaatctgaaggtggccttggaggaaactggtatgccatggacaactcaggggaacatgtcacgtggaggaaatactacattaacgtgtgtcggcctctgaatccagtgccgggctgcaaccgatatgcatcggcttgccagatgaagtatgaaaaagatcagggctccttcactgaagtggtttccatcagtaacttgggaatggcaaagaccggcccggtggttgaggacagcggcagcctccttctggaatacgtgaatgggtcggcctgcaccaccagcgatggcagacagaccacatataccacgaggatccatctcgtctgctccaggggcaggctgaacagccaccccatcttttctctcaactgggagtgtgtggtcagtttcctgtggaacacagaggctgcctgtcccattcagacaacgacggatacagaccaggcttgctctataagggatcccaacagtggatttgtgtttaatcttaatccgctaaacagttcgcaaggatataacgtctctggcattgggaagatttttatgtttaatgtctgcggcacaatgcctgtctgtgggaccatcctgggaaaacctgcttctggctgtgaggcagaaacccaaactgaagagctcaagaattggaagccagcaaggccagtcggaattgagaaaagcctccagctgtccacagagggcttcatcactctgacctacaaagggcctctctctgccaaaggtaccgctgatgcttttatcgtccgctttgtttgcaatgatgatgtttactcagggcccctcaaattcctgcatcaagatatcgactctgggcaagggatccgaaacacttactttgagtttgaaaccgcgttggcctgtgttccttctccagtggactgccaagtcaccgacctggctggaaatgagtacgacctgactggcctaagcacagtcaggaaaccttggacggctgttgacacctctgtcgatgggagaaagaggactttctatttgagcgtttgcaatcctctcccttacattcctggatgccagggcagcgcagtggggtcttgcttagtgtcagaaggcaatagctggaatctgggtgtggtgcagatgagtccccaagccgcggcgaatggatctttgagcatcatgtatgtcaacggtgacaagtgtgggaaccagcgcttctccaccaggatcacgtttgagtgtgctcagatatcgggctcaccagcatttcagcttcaggatggttgtgagtacgtgtttatctggagaactgtggaagcctgtcccgttgtcagagtggaaggggacaactgtgaggtgaaagacccaaggcatggcaacttgtatgacctgaagcccctgggcctcaacgacaccatcgtgagcgctggcgaatacacttattacttccgggtctgtgggaagctttcctcagacgtctgccccacaagtgacaagtccaaggtggtctcctcatgtcaggaaaagcgggaaccgcagggatttcacaaagtggcaggtctcctgactcagaagctaacttatgaaaatggcttgttaaaaatgaacttcacggggggggacacttgccataaggtttatcagcgctccacagccatcttcttctactgtgaccgcggcacccagcggccagtatttctaaaggagacttcagattgttcctacttgtttgagtggcgaacgcagtatgcctgcccacctttcgatctgactgaatgttcattcaaagatggggctggcaactccttcgacctctcgtccctgtcaaggtacagtgacaactgggaagccatcactgggacgggggacccggagcactacctcatcaatgtctgcaagtctctggccccgcaggctggcactgagccgtgccctccagaagcagccgcgtgtctgctgggtggctccaagcccgtgaacctcggcagggtaagggacggacctcagtggagagatggcataattgtcctgaaatacgttgatggcgacttatgtccagatgggattcggaaaaagtcaaccaccatccgattcacctgcagcgagagccaagtgaactccaggcccatgttcatcagcgccgtggaggactgtgagtacacctttgcctggcccacagccacagcctgtcccatgaagagcaacgagcatgatgactgccaggtcaccaacccaagcacaggacacctgtttgatctgagctccttaagtggcagggcgggattcacagctgcttacagcgagaaggggttggtttacatgagcatctgtggggagaatgaaaactgccctcctggcgtgggggcctgctttggacagaccaggattagcgtgggcaaggccaacaagaggctgagatacgtggaccaggtcctgcagctggtgtacaaggatgggtccccttgtccctccaaatccggcctgagctataagagtgtgatcagtttcgtgtgcaggcctgaggccgggccaaccaataggcccatgctcatctccctggacaagcagacatgcactctcttcttctcctggcacacgccgctggcctgcgagcaagcgaccgaatgttccgtgaggaatggaagctctattgttgacttgtctccccttattcatcgcactggtggttatgaggcttatgatgagagtgaggatgatgcctccgataccaaccctgatttctacatcaatatttgtcagccactaaatcccatgcacggagtgccctgtcctgccggagccgctgtgtgcaaagttcctattgatggtccccccatagatatcggccgggtagcaggaccaccaatactcaatccaatagcaaatgagatttacttgaattttgaaagcagtactccttgcttagcggacaagcatttcaactacacctcgctcatcgcgtttcactgtaagagaggtgtgagcatgggaacgcctaagctgttaaggaccagcgagtgcgactttgtgttcgaatgggagactcctgtcgtctgtcctgatgaagtgaggatggatggctgtaccctgacagatgagcagctcctctacagcttcaacttgtccagcctttccacgagcacctttaaggtgactcgcgactcgcgcacctacagcgttggggtgtgcacctttgcagtcgggccagaacaaggaggctgtaaggacggaggagtctgtctgctctcaggcaccaagggggcatcctttggacggctgcaatcaatgaaactggattacaggcaccaggatgaagcggtcgttttaagttacgtgaatggtgatcgttgccctccagaaaccgatgacggcgtcccctgtgtcttccccttcatattcaatgggaagagctacgaggagtgcatcatagagagcagggcgaagctgtggtgtagcacaactgcggactacgacagagaccacgagtggggcttctgcagacactcaaacagctaccggacatccagcatcatatttaagtgtgatgaagatgaggacattgggaggccacaagtcttcagtgaagtgcgtgggtgtgatgtgacatttgagtggaaaacaaaagttgtctgccctccaaagaagttggagtgcaaattcgtccagaaacacaaaacctacgacctgcggctgctctcctctctcaccgggtcctggtccctggtccacaacggagtctcgtgagtgccttcccagtccacccgcggcgccacaccctcagcatgtgaacttcagactgcttgacgatggttggctcttttgggttctcaagatgggaatactatgcccatgtgaggctgatggtggttgagttgtgactgttcctggaagcagcccgcagtgtcaatcctggcacagagggtggttctgag

SEQ ID NO: 452019 - DNA, 5408 bp, Homo sapiens
  misc_feature (1674)..(1674): n is a, c, g, or t
gagcccagtcgagccgcgctcacctcgggctcccgctccgtctccacctccgcctttgccctggcggcgcgaccccgtcccgggcgcggccccagcagtcgcgcgccgttagcctcgcgcccgccgcgcagtccgggcccggcgcgatgggggccgccgccggccggagcccccacctggggcccgcgcccgcccgccgcccgcagcgctctctgctcctgctgcagctgctgctgctcgtcgctgccccggggtccacgcaggcccaggccgccccgttccccgagctgtgcagttatacatgggaagctgttgataccaaaaataatgtactttataaaatcaacatctgtggaagtgtggatattgtccagtgcgggccatcaagtgctgtttgtatgcacgacttgaagacacgcacttatcattcagtgggtgactctgttttgagaagtgcaaccagatctctcctggaattcaacacaacagtgagctgtgaccagcaaggcacaaatcacagagtccagagcagcattgccttcctgtgtgggaaaaccctgggaactcctgaatttgtaactgcaacagaatgtgtgcactactttgagtggaggaccactgcagcctgcaagaaagacatatttaaagcaaataaggaggtgccatgctatgtgtttgatgaagagttgaggaagcatgatctcaatcctctgatcaagcttagtggtgcctacttggtggatgactccgatccggacacttctctattcatcaatgtttgtagagacatagacacactacgagacccaggttcacagctgcgggcctgtccccccggcactgccgcctgcctggtaagaggacaccaggcgtttgatgttggccagccccgggacggactgaagctggtgcgcaaggacaggcttgtcctgagttacgtgagggaagaggcaggaaagctagacttttgtgatggtcacagccctgcggtgactattacatttgtttgcccgtcggagcggagagagggcaccattcccaaactcacagctaaatccaactgccgctatgaaattgagtggattactgagtatgcctgccacagagattacctggaaagtaaaacttgttctctgagcggcgagcagcaggatgtctccatagacctcacaccacttgcccagagcggaggttcatcctatatttcagatggaaaagaatatttgttttatttgaatgtctgtggagaaactgaaatacagttctgtaataaaaaacaagctgcagtttgccaagtgaaaaagagcgatacctctcaagtcaaagcagcaggaagataccacaatcagaccctccgatattcggatggagacctcaccttgatatattttggaggtgatgaatgcagctcagggtttcagcggatgagcgtcataaactttgagtgcaataaaaccgcaggtaacgatgggaaaggaactcctgtattcacaggggaggttgactgcacctacttcttcacatgggacacggaatacgcctgtgttaaggagaaggaagacctcctctgcggtgccaccgacgggaagaagcgctatgacctgtccgcgctggtccgccatgcagaaccagagcagaattgggaagctgtggatggcagtcagacggaaacanagaagaagcattttttcattaatatttgtcacagagtgctgcaggaaggcaaggcacgagggtgtcccgaggacgcggcagtgtgtgcagtggataaaaatggaagtaaaaatctgggaaaatttatttcctctcccatgaaagagaaaggaaacattcaactctcttattcagatggtgatgattgtggtcatggcaagaaaattaaaactaatatcacacttgtatgcaagccaggtgatctggaaagtgcaccagtgttgagaacttctggggaaggcggttgcttttatgagtttgagtggcacacagctgcggcctgtgtgctgtctaagacagaaggggagaactgcacggtctttgactcccaggcagggttttcttttgacttatcacctctcacaaagaaaaatggtgcctataaagttgagacaaagaagtatgacttttatataaatgtgtgtggcccggtgtctgtgagcccctgtcagccagactcaggagcctgccaggtggcaaaaagtgatgagaagacttggaacttgggtctgagtaatgcgaagctttcatattatgatgggatgatccaactgaactacagaggcggcacaccctataacaatgaaagacacacaccgagagctacgctcatcacctttctctgtgatcgagacgcgggagtgggcttccctgaatatcaggaagaggataactccacctacaacttccggtggtacaccagctatgcctgcccggaggagcccctggaatgcgtagtgaccgacccctccacgctggagcagtacgacctctccagtctggcaaaatctgaaggtggccttggaggaaactggtatgccatggacaactcaggggaacatgtcacgtggaggaaatactacattaacgtgtgtcggcctctgaatccagtgccgggctgcaaccgatatgcatcggcttgccagatgaagtatgaaaaagatcagggctccttcactgaagtggtttccatcagtaacttgggaatggcaaagaccggcccggtggttgaggacagcggcagcctccttctggaatacgtgaatgggtcggcctgcaccaccagcgatggcagacagaccacatataccacgaggatccatctcgtctgctccaggggcaggctgaacagccaccccatcttttctctcaactgggagtgtgtggtcagtttcctgtggaacacagaggctgcctgtcccattcagacaacgacggatacagaccaggcttgctctataagggatcccaacagtggatttgtgtttaatcttaatccgctaaacagttcgcaaggatataacgtctctggcattgggaagatttttatgtttaatgtctgcggcacaatgcctgtctgtgggaccatcctgggaaaacctgcttctggctgtgaggcagaaacccaaactgaagagctcaagaattggaagccagcaaggccagtcggaattgagaaaagcctccagctgtccacagagggcttcatcactctgacctacaaagggcctctctctgccaaaggtaccgctgatgcttttatcgtccgctttgtttgcaatgatgatgtttactcagggcccctcaaattcctgcatcaagatatcgactctgggcaagggatccgaaacacttactttgagtttgaaaccgcgttggcctgtgttccttctccagtggactgccaagtcaccgacctggctggaaatgagtacgacctgactggcctaagcacagtcaggaaaccttggacggctgttgacacctctgtcgatgggagaaagaggactttctatttgagcgtttgcaatcctctcccttacattcctggatgccagggcagcgcagtggggtcttgcttagtgtcagaaggcaatagctggaatctgggtgtggtgcagatgagtccccaagccgcggcgaatggatctttgagcatcatgtatgtcaacggtgacaagtgtgggaaccagcgcttctccaccaggatcacgtttgagtgtgctcagatatcgggctcaccagcatttcagcttcaggatggttgtgagtacgtgtttatctggagaactgtggaagcctgtcccgttgtcagagtggaaggggacaactgtgaggtgaaagacccaaggcatggcaacttgtatgacctgaagcccctgggcctcaacgacaccatcgtgagcgctggcgaatacacttattacttccgggtctgtgggaagctttcctcagacgtctgccccacaagtgacaagtccaaggtggtctcctcatgtcaggaaaagcgggaaccgcagggatttcacaaagtggcaggtctcctgactcagaagctaacttatgaaaatggcttgttaaaaatgaacttcacggggggggacacttgccataaggtttatcagcgctccacagccatcttcttctactgtgaccgcggcacccagcggccagtatttctaaaggagacttcagattgttcctacttgtttgagtggcgaacgcagtatgcctgcccacctttcgatctgactgaatgttcattcaaagatggggctggcaactccttcgacctctcgtccctgtcaaggtacagtgacaactgggaagccatcactgggacgggggacccggagcactacctcatcaatgtctgcaagtctctggccccgcaggctggcactgagccgtgccctccagaagcagccgcgtgtctgctgggtggctccaagcccgtgaacctcggcagggtaagggacggacctcagtggagagatggcataattgtcctgaaatacgttgatggcgacttatgtccagatgggattcggaaaaagtcaaccaccatccgattcacctgcagcgagagccaagtgaactccaggcccatgttcatcagcgccgtggaggactgtgagtacacctttgcctggcccacagccacagcctgtcccatgaagagcaacgagcatgatgactgccaggtcaccaacccaagcacaggacacctgtttgatctgagctccttaagtggcagggcgggattcacagctgcttacagcgagaaggggttggtttacatgagcatctgtggggagaatgaaaactgccctcctggcgtgggggcctgctttggacagaccaggattagcgtgggcaaggccaacaagaggctgagatacgtggaccaggtcctgcagctggtgtacaaggatgggtccccttgtccctccaaatccggcctgagctataagagtgtgatcagtttcgtgtgcaggcctgaggccgggccaaccaataggcccatgctcatctccctggacaagcagacatgcactctcttcttctcctggcacacgccgctggcctgcgagcaagcgaccgaatgttccgtgaggaatggaagctctattgttgacttgtctccccttattcatcgcactggtggttatgaggcttatgatgagagtgaggatgatgcctccgataccaaccctgatttctacatcaatatttgtcagccactaaatcccatgcacggagtgccctgtcctgccggagccgctgtgtgcaaagttcctattgatggtccccccatagtaagtatgacaaatccaagggtggagataatttttgcaagacttttagtgataacctttgcgttgtttcttgccttcagtggggagttgctcaag

SEQ ID NO: 452020 - DNA, 2664 bp, Homo sapiens
  misc_feature (1674)..(1674): n is a, c, g, or t
gagcccagtcgagccgcgctcacctcgggctcccgctccgtctccacctccgcctttgccctggcggcgcgaccccgtcccgggcgcggccccagcagtcgcgcgccgttagcctcgcgcccgccgcgcagtccgggcccggcgcgatgggggccgccgccggccggagcccccacctggggcccgcgcccgcccgccgcccgcagcgctctctgctcctgctgcagctgctgctgctcgtcgctgccccggggtccacgcaggcccaggccgccccgttccccgagctgtgcagttatacatgggaagctgttgataccaaaaataatgtactttataaaatcaacatctgtggaagtgtggatattgtccagtgcgggccatcaagtgctgtttgtatgcacgacttgaagacacgcacttatcattcagtgggtgactctgttttgagaagtgcaaccagatctctcctggaattcaacacaacagtgagctgtgaccagcaaggcacaaatcacagagtccagagcagcattgccttcctgtgtgggaaaaccctgggaactcctgaatttgtaactgcaacagaatgtgtgcactactttgagtggaggaccactgcagcctgcaagaaagacatatttaaagcaaataaggaggtgccatgctatgtgtttgatgaagagttgaggaagcatgatctcaatcctctgatcaagcttagtggtgcctacttggtggatgactccgatccggacacttctctattcatcaatgtttgtagagacatagacacactacgagacccaggttcacagctgcgggcctgtccccccggcactgccgcctgcctggtaagaggacaccaggcgtttgatgttggccagccccgggacggactgaagctggtgcgcaaggacaggcttgtcctgagttacgtgagggaagaggcaggaaagctagacttttgtgatggtcacagccctgcggtgactattacatttgtttgcccgtcggagcggagagagggcaccattcccaaactcacagctaaatccaactgccgctatgaaattgagtggattactgagtatgcctgccacagagattacctggaaagtaaaacttgttctctgagcggcgagcagcaggatgtctccatagacctcacaccacttgcccagagcggaggttcatcctatatttcagatggaaaagaatatttgttttatttgaatgtctgtggagaaactgaaatacagttctgtaataaaaaacaagctgcagtttgccaagtgaaaaagagcgatacctctcaagtcaaagcagcaggaagataccacaatcagaccctccgatattcggatggagacctcaccttgatatattttggaggtgatgaatgcagctcagggtttcagcggatgagcgtcataaactttgagtgcaataaaaccgcaggtaacgatgggaaaggaactcctgtattcacaggggaggttgactgcacctacttcttcacatgggacacggaatacgcctgtgttaaggagaaggaagacctcctctgcggtgccaccgacgggaagaagcgctatgacctgtccgcgctggtccgccatgcagaaccagagcagaattgggaagctgtggatggcagtcagacggaaacanagaagaagcattttttcattaatatttgtcacagagtgctgcaggaaggcaaggcacgagggtgtcccgaggacgcggcagtgtgtgcagtggataaaaatggaagtaaaaatctgggaaaatttatttcctctcccatgaaagagaaaggaaacattcaactctcttattcagatggtgatgattgtggtcatggcaagaaaattaaaactaatatcacacttgtatgcaagccaggtgatctggaaagtgcaccagtgttgagaacttctggggaaggcggttgcttttatgagtttgagtggcacacagctgcggcctgtgtgctgtctaagacagaaggggagaactgcacggtctttgactcccaggcagggttttcttttgacttatcacctctcacaaagaaaaatggtgcctataaagttgagacaaagaagtatgacttttatataaatgtgtgtggcccggtgtctgtgagcccctgtcagccagactcaggagcctgccaggtggcaaaaagtgatgagaagacttggaacttgggtctgagtaatgcgaagctttcatattatgatgggatgatccaactgaactacagaggcggcacaccctataacaatgaaagacacacaccgagagctacgctcatcacctttctctgtgatcgagacgcgggagtgggcttccctgaatatcaggaagaggataactccacctacaacttccggtggtacaccagctatgcctgcccggaggagcccctggaatgcgtagtgaccgacccctcccagccctactcgggatgagtgctttgcccgtcggggcttcattaccccaaatatgaccgggacatcttgaccattgacatcggtcgatgtcacccccaacctcatgggccacttctgtggacccaaagagtctcaccaggcataacatattccggggctgatccaaacatgactgcccgtgctgtacctgcatttcaga

SEQ ID NO: 452021 - DNA, 420 bp, Homo sapiens
gactattacatttgtttgcccgtcggagcggagagaggtaagtgactcgtctcctgatcactaatgtggcgcacagtagcctgggttgcccatgcgaacgcgtttctgggcttggggcagggtgggcctggatgcaggaagctgggagccatgacagaggcactggtgggttctcaggagaagacaagcttcctgggatagcttctgtcacatgcagctcactcagggagagctgtttgcattttgccttttgcttttttacagcaatccggaggggcctccacatataatgggatggtgttttgttctagtctctgtgagattattttaagtagttcacggacagatttttttttggtagttgggttgttttagtgaatagtggaaaaacgaagtagaatttcaagcctgtgatttctt

SEQ ID NO: 452022 - DNA, 411 bp, Homo sapiens
ggcagagtggctggggcaaagctacaaattaacaacatctcagcaaagcaattgtttaaagtacagggctttttcaaaatggagtctcttatgtcttccctttctgcatagacacagtgacagtctgatctctctctcttttccctacactccccagcaaacagctaccggacatccagcatcatatttaagtgtgatgaagatgaggacattgggaggccacaagtcttcagtgaagtgcgtgggtgtgatgtgacatttgagtggaaaacaaaagttgtctgccctccaaagaagttggagtgcaaattcgtccagaaacacaaaacctacgacctgcggctgctctcctctctcaccgggtcctggtccctggtccacaacggagtctcgtgagtgccttcccagtcc

SEQ ID NO: 452023 - DNA, 383 bp, Homo sapiens
cttaagagaacatttggagtttgagaggagaatgactgaggatttcttcccatgaactcactcaatgtacttgcacagctggggcggtagaattcctttggattagttacacaaaatcccaacatgattttatgaagctttggtctcagaatttgcagatttgggaacctcttgatgaccccgtttaactaaagcggttgcatcccctgcccttcttgctgctgctttctttattttagtagcctttactgcattctcattttaaagaagaatctttacaatgtgtggtatggtaacattataattactatttttttttaatagggaactcctgaatttgtaactgcaacagaatgtgtgcactactttgagtggaggaccac

SEQ ID NO: 452024 - DNA, 330 bp, Homo sapiens
gatgtaaagtgagaggagatgattgcacaacagtcctcatgtaagagagaagagataccgaaaagaacgcagaggagccaagacgtttattgacctttgcctgagttcgttattaggggacaccatagcatgatagtccctaaggaatggagagcagtgttgtgtgacattggtcataagcttttctgattgaccaagatgtatactgaagactcacttttttcttcctcccttccaggtgccatgctatgtgtttgatgaagagttgaggaagcatgatctcaatcctctgatcaagcttagtggtgcctacttggtggatgactccga

SEQ ID NO: 452025 - DNA, 979 bp, Homo sapiens
ctttggacagaccaggattagcgtgggcaaggccaacaagaggctgagatacgtggaccaggtcctgcagctggtgtacaaggatgggtccccttgtccctccaaatccggcctgagctataagagtgtgatcagtttcgtgtgcaggcctgagcgggcccaaccaataggcccatgctcatctccctggacaagcagacatgcactctcttcttctcctggcactgagccgtgccctccagaagcagccgcgtgtctgctgggtggctccaagcccgtgaacctcggcagggtaagggacggacctcagtggagagatggcataattgtcctgaaatacgttgatggcgacttatgtccagatgggattcggaaaaagtcaaccaccatccgattcacctgcagcgagagccaagtgaactccaggcccatgttcatcagcgccgtggaggactgtgagtacacctttgcctggcccacagccacagcctgtcccatgaagagcaacgagcatgatgactgccaggtcaccaacccaagcacaggacacctgtttgatctgagctccttaagtggcagggcgggattcacagctgcttacagcgagaaggggttggtttacatgagcatctgtggggaggagggaggccaggcgggcatggcgtggaggaggagggaggccgggcggtcacagcatggaggaggagggaggcgctgctggtgttcttattctggcggcagcgcctttcctgccatgtttagtgaatgacttttctcgcattgtagaattgtatatagactctggtgttctattgctgagaagcaaaccgccctgcagcatccctcagcctgtaccggtttggctggcttgtttgatttcaacatgagtgtattttttaaaattgatttttctcttcatttttttttcaatcaactttactgtaatataaagtattcaacaatttcaataaaagataaa

SEQ ID NO: 452026 - DNA, 9234 bp, Homo sapiens
  misc_feature (1674)..(1674): n is a, c, g, or t
gagcccagtcgagccgcgctcacctcgggctcccgctccgtctccacctccgcctttgccctggcggcgcgaccccgtcccgggcgcggccccagcagtcgcgcgccgttagcctcgcgcccgccgcgcagtccgggcccggcgcgatgggggccgccgccggccggagcccccacctggggcccgcgcccgcccgccgcccgcagcgctctctgctcctgctgcagctgctgctgctcgtcgctgccccggggtccacgcaggcccaggccgccccgttccccgagctgtgcagttatacatgggaagctgttgataccaaaaataatgtactttataaaatcaacatctgtggaagtgtggatattgtccagtgcgggccatcaagtgctgtttgtatgcacgacttgaagacacgcacttatcattcagtgggtgactctgttttgagaagtgcaaccagatctctcctggaattcaacacaacagtgagctgtgaccagcaaggcacaaatcacagagtccagagcagcattgccttcctgtgtgggaaaaccctgggaactcctgaatttgtaactgcaacagaatgtgtgcactactttgagtggaggaccactgcagcctgcaagaaagacatatttaaagcaaataaggaggtgccatgctatgtgtttgatgaagagttgaggaagcatgatctcaatcctctgatcaagcttagtggtgcctacttggtggatgactccgatccggacacttctctattcatcaatgtttgtagagacatagacacactacgagacccaggttcacagctgcgggcctgtccccccggcactgccgcctgcctggtaagaggacaccaggcgtttgatgttggccagccccgggacggactgaagctggtgcgcaaggacaggcttgtcctgagttacgtgagggaagaggcaggaaagctagacttttgtgatggtcacagccctgcggtgactattacatttgtttgcccgtcggagcggagagagggcaccattcccaaactcacagctaaatccaactgccgctatgaaattgagtggattactgagtatgcctgccacagagattacctggaaagtaaaacttgttctctgagcggcgagcagcaggatgtctccatagacctcacaccacttgcccagagcggaggttcatcctatatttcagatggaaaagaatatttgttttatttgaatgtctgtggagaaactgaaatacagttctgtaataaaaaacaagctgcagtttgccaagtgaaaaagagcgatacctctcaagtcaaagcagcaggaagataccacaatcagaccctccgatattcggatggagacctcaccttgatatattttggaggtgatgaatgcagctcagggtttcagcggatgagcgtcataaactttgagtgcaataaaaccgcaggtaacgatgggaaaggaactcctgtattcacaggggaggttgactgcacctacttcttcacatgggacacggaatacgcctgtgttaaggagaaggaagacctcctctgcggtgccaccgacgggaagaagcgctatgacctgtccgcgctggtccgccatgcagaaccagagcagaattgggaagctgtggatggcagtcagacggaaacanagaagaagcattttttcattaatatttgtcacagagtgctgcaggaaggcaaggcacgagggtgtcccgaggacgcggcagtgtgtgcagtggataaaaatggaagtaaaaatctgggaaaatttatttcctctcccatgaaagagaaaggaaacattcaactctcttattcagatggtgatgattgtggtcatggcaagaaaattaaaactaatatcacacttgtatgcaagccaggtgatctggaaagtgcaccagtgttgagaacttctggggaaggcggttgcttttatgagtttgagtggcacacagctgcggcctgtgtgctgtctaagacagaaggggagaactgcacggtctttgactcccaggcagggttttcttttgacttatcacctctcacaaagaaaaatggtgcctataaagttgagacaaagaagtatgacttttatataaatgtgtgtggcccggtgtctgtgagcccctgtcagccagactcaggagcctgccaggtggcaaaaagtgatgagaagacttggaacttgggtctgagtaatgcgaagctttcatattatgatgggatgatccaactgaactacagaggcggcacaccctataacaatgaaagacacacaccgagagctacgctcatcacctttctctgtgatcgagacgcgggagtgggcttccctgaatatcaggaagaggataactccacctacaacttccggtggtacaccagctatgcctgcccggaggagcccctggaatgcgtagtgaccgacccctccacgctggagcagtacgacctctccagtctggcaaaatctgaaggtggccttggaggaaactggtatgccatggacaactcaggggaacatgtcacgtggaggaaatactacattaacgtgtgtcggcctctgaatccagtgccgggctgcaaccgatatgcatcggcttgccagatgaagtatgaaaaagatcagggctccttcactgaagtggtttccatcagtaacttgggaatggcaaagaccggcccggtggttgaggacagcggcagcctccttctggaatacgtgaatgggtcggcctgcaccaccagcgatggcagacagaccacatataccacgaggatccatctcgtctgctccaggggcaggctgaacagccaccccatcttttctctcaactgggagtgtgtggtcagtttcctgtggaacacagaggctgcctgtcccattcagacaacgacggatacagaccaggcttgctctataagggatcccaacagtggatttgtgtttaatcttaatccgctaaacagttcgcaaggatataacgtctctggcattgggaagatttttatgtttaatgtctgcggcacaatgcctgtctgtgggaccatcctgggaaaacctgcttctggctgtgaggcagaaacccaaactgaagagctcaagaattggaagccagcaaggccagtcggaattgagaaaagcctccagctgtccacagagggcttcatcactctgacctacaaagggcctctctctgccaaaggtaccgctgatgcttttatcgtccgctttgtttgcaatgatgatgtttactcagggcccctcaaattcctgcatcaagatatcgactctgggcaagggatccgaaacacttactttgagtttgaaaccgcgttggcctgtgttccttctccagtggactgccaagtcaccgacctggctggaaatgagtacgacctgactggcctaagcacagtcaggaaaccttggacggctgttgacacctctgtcgatgggagaaagaggactttctatttgagcgtttgcaatcctctcccttacattcctggatgccagggcagcgcagtggggtcttgcttagtgtcagaaggcaatagctggaatctgggtgtggtgcagatgagtccccaagccgcggcgaatggatctttgagcatcatgtatgtcaacggtgacaagtgtgggaaccagcgcttctccaccaggatcacgtttgagtgtgctcagatatcgggctcaccagcatttcagcttcaggatggttgtgagtacgtgtttatctggagaactgtggaagcctgtcccgttgtcagagtggaaggggacaactgtgaggtgaaagacccaaggcatggcaacttgtatgacctgaagcccctgggcctcaacgacaccatcgtgagcgctggcgaatacacttattacttccgggtctgtgggaagctttcctcagacgtctgccccacaagtgacaagtccaaggtggtctcctcatgtcaggaaaagcgggaaccgcagggatttcacaaagtggcaggtctcctgactcagaagctaacttatgaaaatggcttgttaaaaatgaacttcacggggggggacacttgccataaggtttatcagcgctccacagccatcttcttctactgtgaccgcggcacccagcggccagtatttctaaaggagacttcagattgttcctacttgtttgagtggcgaacgcagtatgcctgcccacctttcgatctgactgaatgttcattcaaagatggggctggcaactccttcgacctctcgtccctgtcaaggtacagtgacaactgggaagccatcactgggacgggggacccggagcactacctcatcaatgtctgcaagtctctggccccgcaggctggcactgagccgtgccctccagaagcagccgcgtgtctgctgggtggctccaagcccgtgaacctcggcagggtaagggacggacctcagtggagagatggcataattgtcctgaaatacgttgatggcgacttatgtccagatgggattcggaaaaagtcaaccaccatccgattcacctgcagcgagagccaagtgaactccaggcccatgttcatcagcgccgtggaggactgtgagtacacctttgcctggcccacagccacagcctgtcccatgaagagcaacgagcatgatgactgccaggtcaccaacccaagcacaggacacctgtttgatctgagctccttaagtggcagggcgggattcacagctgcttacagcgagaaggggttggtttacatgagcatctgtggggagaatgaaaactgccctcctggcgtgggggcctgctttggacagaccaggattagcgtgggcaaggccaacaagaggctgagatacgtggaccaggtcctgcagctggtgtacaaggatgggtccccttgtccctccaaatccggcctgagctataagagtgtgatcagtttcgtgtgcaggcctgaggccgggccaaccaataggcccatgctcatctccctggacaagcagacatgcactctcttcttctcctggcacacgccgctggcctgcgagcaagcgaccgaatgttccgtgaggaatggaagctctattgttgacttgtctccccttattcatcgcactggtggttatgaggcttatgatgagagtgaggatgatgcctccgataccaaccctgatttctacatcaatatttgtcagccactaaatcccatgcacggagtgccctgtcctgccggagccgctgtgtgcaaagttcctattgatggtccccccatagatatcggccgggtagcaggaccaccaatactcaatccaatagcaaatgagatttacttgaattttgaaagcagtactccttgcttagcggacaagcatttcaactacacctcgctcatcgcgtttcactgtaagagaggtgtgagcatgggaacgcctaagctgttaaggaccagcgagtgcgactttgtgttcgaatgggagactcctgtcgtctgtcctgatgaagtgaggatggatggctgtaccctgacagatgagcagctcctctacagcttcaacttgtccagcctttccacgagcacctttaaggtgactcgcgactcgcgcacctacagcgttggggtgtgcacctttgcagtcgggccagaacaaggaggctgtaaggacggaggagtctgtctgctctcaggcaccaagggggcatcctttggacggctgcaatcaatgaaactggattacaggcaccaggatgaagcggtcgttttaagttacgtgaatggtgatcgttgccctccagaaaccgatgacggcgtcccctgtgtcttccccttcatattcaatgggaagagctacgaggagtgcatcatagagagcagggcgaagctgtggtgtagcacaactgcggactacgacagagaccacgagtggggcttctgcagacactcaaacagctaccggacatccagcatcatatttaagtgtgatgaagatgaggacattgggaggccacaagtcttcagtgaagtgcgtgggtgtgatgtgacatttgagtggaaaacaaaagttgtctgccctccaaagaagttggagtgcaaattcgtccagaaacacaaaacctacgacctgcggctgctctcctctctcaccgggtcctggtccctggtccacaacggagtctcgtactatataaatctgtgccagaaaatatataaagggcccctgggctgctctgaaagggccagcatttgcagaaggaccacaactggtgacgtccaggtcctgggactcgttcacacgcagaagctgggtgtcataggtgacaaagttgttgtcacgtactccaaaggttatccgtgtggtggaaataagaccgcatcctccgtgatagaattgacctgtacaaagacggtgggcagacctgcattcaagaggtttgatatcgacagctgcacttactacttcagctgggactcccgggctgcctgcgccgtgaagcctcaggaggtgcagatggtgaatgggaccatcaccaaccctataaatggcaagagcttcagcctcggagatatttattttaagctgttcagagcctctggggacatgaggaccaatggggacaactacctgtatgagatccaactttcctccatcacaagctccagaaacccggcgtgctctggagccaacatatgccaggtgaagcccaacgatcagcacttcagtcggaaagttggaacctctgacaagaccaagtactaccttcaagacggcgatctcgatgtcgtgtttgcctcttcctctaagtgcggaaaggataagaccaagtctgtttcttccaccatcttcttccactgtgaccctctggtggaggacgggatccccgagttcagtcacgagactgccgactgccagtacctcttctcttggtacacctcagccgtgtgtcctctgggggtgggctttgacagcgagaatcccggggacgacgggcagatgcacaaggggctgtcagaacggagccaggcagtcggcgcggtgctcagcctgctgctggtggcgctcacctgctgcctgctggccctgttgctctacaagaaggagaggagggaaacagtgataagtaagctgaccacttgctgtaggagaagttccaacgtgtcctacaaatactcaaaggtgaataaggaagaagagacagatgagaatgaaacagagtggctgatggaagagatccagctgcctcctccacggcagggaaaggaagggcaggagaacggccatattaccaccaagtcagtgaaagccctcagctccctgcatggggatgaccaggacagtgaggatgaggttctgaccatcccagaggtgaaagttcactcgggcaggggagctggggcagagagctcccacccagtgagaaacgcacagagcaatgcccttcaggagcgtgaggacgatagggtggggctggtcaggggtgagaaggcgaggaaagggaagtccagctctgcacagcagaagacagtgagctccaccaagctggtgtccttccatgacgacagcgacgaggacctcttacacatctgactccgcagtgcctgcaggggagcacggagccgcgggacagccaagcacctccaaccaaataagacttccactcgatgatgcttctataattttgcctttaacagaaactttcaaaagggaagagtttttgtgatgggggagagggtgaaggaggtcaggccccactccttcctgattgtttacagtcattggaataaggcatggctcagatcggccacagggcggtaccttgtgcccagggttttgccccaagtcctcatttaaaagcataaggccggacgcatctcaaaacagagggctgcattcgaagaaacccttgctgctttagtcccgatagggtatttgaccccgatatattttagcattttaattctctccccctatttattgactttgacaattactcaggtttgagaaaaaggaaaaaaaaacagccaccgtttcttcctgccagcaggggtgtgatgtaccagtttgtccatcttgagatggtgaggctgtcagtgtatggggcagcttccggcgggatgttgaactggtcattaatgtgtcccctgagttggagctcattctgtctcttttctcttttgctttctgtttcttaagggcacacacacgtgcgtgcgagcacacacacacatacgtgcacagggtccccgagtgcctaggttttggagagtttgcctgttctatgcctttagtcaggaatggctgcacctttttgcatgatatcttcaagcctgggcgtacagagcacatttgtcagtatttttgccggctggtgaattcaaacaacctgcccaaagattgatttgtgtgtttgtgtgtgtgtgtgtgtgtgtgtgtgtgtgtgtgagtggagttgaggtgtcagagaaaatgaattttttccagatttggggtataggtctcatctcttcaggttctcatgataccacctttactgtgcttatttttttaagaaaaaagtgttgatcaaccattcgacctataagaagccttaatttgcacagtgtgtgacttacagaaactgcatgaaaaatcatgggccagagcctcggccctagcattgcacttggcctcatgctggagggaggctgggcgggtacagcgcggaggaggagggaggccaggcgggcatggcgtggaggaggagggaggccgggcggtcacagcatggaggaggagggaggcgctgctggtgttcttattctggcggcagcgcctttcctgccatgtttagtgaatgacttttctcgcattgtagaattgtatatagactctggtgttctattgctgagaagcaaaccgccctgcagcatccctcagcctgtaccggtttggctggcttgtttgatttcaacatgagtgtattttttaaaattgatttttctcttcatttttttttcaatcaactttactgtaatataaagtattcaacaatttcaataaaagataaaatttgaaatctggttaggctggtgttagggttctttgtttttggggtttggcagagatgtgtttaagtgctgtgaccagaagcggggggagggggggtttggtggaaattttttgttatgatgtctgtgtggaaagcggctgtgcaaacatg

SEQ ID NO: 452027 - DNA, 8910 bp, Homo sapiens
  misc_feature (1674)..(1674): n is a, c, g, or t
gagcccagtcgagccgcgctcacctcgggctcccgctccgtctccacctccgcctttgccctggcggcgcgaccccgtcccgggcgcggccccagcagtcgcgcgccgttagcctcgcgcccgccgcgcagtccgggcccggcgcgatgggggccgccgccggccggagcccccacctggggcccgcgcccgcccgccgcccgcagcgctctctgctcctgctgcagctgctgctgctcgtcgctgccccggggtccacgcaggcccaggccgccccgttccccgagctgtgcagttatacatgggaagctgttgataccaaaaataatgtactttataaaatcaacatctgtggaagtgtggatattgtccagtgcgggccatcaagtgctgtttgtatgcacgacttgaagacacgcacttatcattcagtgggtgactctgttttgagaagtgcaaccagatctctcctggaattcaacacaacagtgagctgtgaccagcaaggcacaaatcacagagtccagagcagcattgccttcctgtgtgggaaaaccctgggaactcctgaatttgtaactgcaacagaatgtgtgcactactttgagtggaggaccactgcagcctgcaagaaagacatatttaaagcaaataaggaggtgccatgctatgtgtttgatgaagagttgaggaagcatgatctcaatcctctgatcaagcttagtggtgcctacttggtggatgactccgatccggacacttctctattcatcaatgtttgtagagacatagacacactacgagacccaggttcacagctgcgggcctgtccccccggcactgccgcctgcctggtaagaggacaccaggcgtttgatgttggccagccccgggacggactgaagctggtgcgcaaggacaggcttgtcctgagttacgtgagggaagaggcaggaaagctagacttttgtgatggtcacagccctgcggtgactattacatttgtttgcccgtcggagcggagagagggcaccattcccaaactcacagctaaatccaactgccgctatgaaattgagtggattactgagtatgcctgccacagagattacctggaaagtaaaacttgttctctgagcggcgagcagcaggatgtctccatagacctcacaccacttgcccagagcggaggttcatcctatatttcagatggaaaagaatatttgttttatttgaatgtctgtggagaaactgaaatacagttctgtaataaaaaacaagctgcagtttgccaagtgaaaaagagcgatacctctcaagtcaaagcagcaggaagataccacaatcagaccctccgatattcggatggagacctcaccttgatatattttggaggtgatgaatgcagctcagggtttcagcggatgagcgtcataaactttgagtgcaataaaaccgcaggtaacgatgggaaaggaactcctgtattcacaggggaggttgactgcacctacttcttcacatgggacacggaatacgcctgtgttaaggagaaggaagacctcctctgcggtgccaccgacgggaagaagcgctatgacctgtccgcgctggtccgccatgcagaaccagagcagaattgggaagctgtggatggcagtcagacggaaacanagaagaagcattttttcattaatatttgtcacagagtgctgcaggaaggcaaggcacgagggtgtcccgaggacgcggcagtgtgtgcagtggataaaaatggaagtaaaaatctgggaaaatttatttcctctcccatgaaagagaaaggaaacattcaactctcttattcagatggtgatgattgtggtcatggcaagaaaattaaaactaatatcacacttgtatgcaagccaggtgatctggaaagtgcaccagtgttgagaacttctggggaaggcggttgcttttatgagtttgagtggcacacagctgcggcctgtgtgctgtctaagacagaaggggagaactgcacggtctttgactcccaggcagggttttcttttgacttatcacctctcacaaagaaaaatggtgcctataaagttgagacaaagaagtatgacttttatataaatgtgtgtggcccggtgtctgtgagcccctgtcagccagactcaggagcctgccaggtggcaaaaagtgatgagaagacttggaacttgggtctgagtaatgcgaagctttcatattatgatgggatgatccaactgaactacagaggcggcacaccctataacaatgaaagacacacaccgagagctacgctcatcacctttctctgtgatcgagacgcgggagtgggcttccctgaatatcaggaagaggataactccacctacaacttccggtggtacaccagctatgcctgcccggaggagcccctggaatgcgtagtgaccgacccctccacgctggagcagtacgacctctccagtctggcaaaatctgaaggtggccttggaggaaactggtatgccatggacaactcaggggaacatgtcacgtggaggaaatactacattaacgtgtgtcggcctctgaatccagtgccgggctgcaaccgatatgcatcggcttgccagatgaagtatgaaaaagatcagggctccttcactgaagtggtttccatcagtaacttgggaatggcaaagaccggcccggtggttgaggacagcggcagcctccttctggaatacgtgaatgggtcggcctgcaccaccagcgatggcagacagaccacatataccacgaggatccatctcgtctgctccaggggcaggctgaacagccaccccatcttttctctcaactgggagtgtgtggtcagtttcctgtggaacacagaggctgcctgtcccattcagacaacgacggatacagaccaggcttgctctataagggatcccaacagtggatttgtgtttaatcttaatccgctaaacagttcgcaaggatataacgtctctggcattgggaagatttttatgtttaatgtctgcggcacaatgcctgtctgtgggaccatcctgggaaaacctgcttctggctgtgaggcagaaacccaaactgaagagctcaagaattggaagccagcaaggccagtcggaattgagaaaagcctccagctgtccacagagggcttcatcactctgacctacaaagggcctctctctgccaaaggtaccgctgatgcttttatcgtccgctttgtttgcaatgatgatgtttactcagggcccctcaaattcctgcatcaagatatcgactctgggcaagggatccgaaacacttactttgagtttgaaaccgcgttggcctgtgttccttctccagtggactgccaagtcaccgacctggctggaaatgagtacgacctgactggcctaagcacagtcaggaaaccttggacggctgttgacacctctgtcgatgggagaaagaggactttctatttgagcgtttgcaatcctctcccttacattcctggatgccagggcagcgcagtggggtcttgcttagtgtcagaaggcaatagctggaatctgggtgtggtgcagatgagtccccaagccgcggcgaatggatctttgagcatcatgtatgtcaacggtgacaagtgtgggaaccagcgcttctccaccaggatcacgtttgagtgtgctcagatatcgggctcaccagcatttcagcttcaggatggttgtgagtacgtgtttatctggagaactgtggaagcctgtcccgttgtcagagtggaaggggacaactgtgaggtgaaagacccaaggcatggcaacttgtatgacctgaagcccctgggcctcaacgacaccatcgtgagcgctggcgaatacacttattacttccgggtctgtgggaagctttcctcagacgtctgccccacaagtgacaagtccaaggtggtctcctcatgtcaggaaaagcgggaaccgcagggatttcacaaagtggcaggtctcctgactcagaagctaacttatgaaaatggcttgttaaaaatgaacttcacggggggggacacttgccataaggtttatcagcgctccacagccatcttcttctactgtgaccgcggcacccagcggccagtatttctaaaggagacttcagattgttcctacttgtttgagtggcgaacgcagtatgcctgcccacctttcgatctgactgaatgttcattcaaagatggggctggcaactccttcgacctctcgtccctgtcaaggtacagtgacaactgggaagccatcactgggacgggggacccggagcactacctcatcaatgtctgcaagtctctggccccgcaggctggcactgagccgtgccctccagaagcagccgcgtgtctgctgggtggctccaagcccgtgaacctcggcagggtaagggacggacctcagtggagagatggcataattgtcctgaaatacgttgatggcgacttatgtccagatgggattcggaaaaagtcaaccaccatccgattcacctgcagcgagagccaagtgaactccaggcccatgttcatcagcgccgtggaggactgtgagtacacctttgcctggcccacagccacagcctgtcccatgaagagcaacgagcatgatgactgccaggtcaccaacccaagcacaggacacctgtttgatctgagctccttaagtggcagggcgggattcacagctgcttacagcgagaaggggttggtttacatgagcatctgtggggagaatgaaaactgccctcctggcgtgggggcctgctttggacagaccaggattagcgtgggcaaggccaacaagaggctgagatacgtggaccaggtcctgcagctggtgtacaaggatgggtccccttgtccctccaaatccggcctgagctataagagtgtgatcagtttcgtgtgcaggcctgaggccgggccaaccaataggcccatgctcatctccctggacaagcagacatgcactctcttcttctcctggcacacgccgctggcctgcgagcaagcgaccgaatgttccgtgaggaatggaagctctattgttgacttgtctccccttattcatcgcactggtggttatgaggcttatgatgagagtgaggatgatgcctccgataccaaccctgatttctacatcaatatttgtcagccactaaatcccatgcacggagtgccctgtcctgccggagccgctgtgtgcaaagttcctattgatggtccccccatagatatcggccgggtagcaggaccaccaatactcaatccaatagcaaatgagatttacttgaattttgaaagcagtactccttgcttagcggacaagcatttcaactacacctcgctcatcgcgtttcactgtaagagaggtgtgagcatgggaacgcctaagctgttaaggaccagcgagtgcgactttgtgttcgaatgggagactcctgtcgtctgtcctgatgaagtgaggatggatggctgtaccctgacagatgagcagctcctctacagcttcaacttgtccagcctttccacgagcacctttaaggtgactcgcgactcgcgcacctacagcgttggggtgtgcacctttgcagtcgggccagaacaaggaggctgtaaggacggaggagtctgtctgctctcaggcaccaagggggcatcctttggacggctgcaatcaatgaaactggattacaggcaccaggatgaagcggtcgttttaagttacgtgaatggtgatcgttgccctccagaaaccgatgacggcgtcccctgtgtcttccccttcatattcaatgggaagagctacgaggagtgcatcatagagagcagggcgaagctgtggtgtagcacaactgcggactacgacagagaccacgagtggggcttctgcagacactcaaacagctaccggacatccagcatcatatttaagtgtgatgaagatgaggacattgggaggccacaagtcttcagtgaagtgcgtgggtgtgatgtgacatttgagtggaaaacaaaagttgtctgccctccaaagaagttggagtgcaaattcgtccagaaacacaaaacctacgacctgcggctgctctcctctctcaccgggtcctggtccctggtccacaacggagtctcgtactatataaatctgtgccagaaaatatataaagggcccctgggctgctctgaaagggccagcatttgcagaaggaccacaactggtgacgtccaggtcctgggactcgttcacacgcagaagctgggtgtcataggtgacaaagttgttgtcacgtactccaaaggttatccgtgtggtggaaataagaccgcatcctccgtgatagaattgacctgtacaaagacggtgggcagacctgcattcaagaggtttgatatcgacagctgcacttactacttcagctgggactcccgggctgcctgcgccgtgaagcctcaggaggtgcagatggtgaatgggaccatcaccaaccctataaatggcaagagcttcagcctcggagatatttattttaagctgttcagagcctctggggacatgaggaccaatggggacaactacctgtatgagatccaactttcctccatcacaagctccagaaacccggcgtgctctggagccaacatatgccaggtgaagcccaacgatcagcacttcagtcggaaagttggaacctctgacaagaccaagtactaccttcaagacggcgatctcgatgtcgtgtttgcctcttcctctaagtgcggaaaggataagaccaagtctgtttcttccaccatcttcttccactgtgaccctctggtggaggacgggatccccgagttcagtcacgagactgccgactgccagtacctcttctcttggtacacctcagccgtgtgtcctctgggggtgggctttgacagcgagaatcccggggacgacgggcagatgcacaaggggctgtcagaacggagccaggcagtcggcgcggtgctcagcctgctgctggtggcgctcacctgctgcctgctggccctgttgctctacaagaaggagaggagggaaacagtgataagtaagctgaccacttgctgtaggagaagttccaacgtgtcctacaaatactcaaaggtgaataaggaagaagagacagatgagaatgaaacagagtggctgatggaagagatccagctgcctcctccacggcagggaaaggaagggcaggagaacggccatattaccaccaagtcagtgaaagccctcagctccctgcatggggatgaccaggacagtgaggatgaggttctgaccatcccagaggtgaaagttcactcgggcaggggagctggggcagagagctcccacccagtgagaaacgcacagagcaatgcccttcaggagcgtgaggacgatagggtggggctggtcaggggtgagaaggcgaggaaagggaagtccagctctgcacagcagaagacagtgagctccaccaagctggtgtccttccatgacgacagcgacgaggacctcttacacatctgactccgcagtgcctgcaggggagcacggagccgcgggacagccaagcacctccaaccaaataagacttccactcgatgatgcttctataattttgcctttaacagaaactttcaaaagggaagagtttttgtgatgggggagagggtgaaggaggtcaggccccactccttcctgattgtttacagtcattggaataaggcatggctcagatcggccacagggcggtaccttgtgcccagggttttgccccaagtcctcatttaaaagcataaggccggacgcatctcaaaacagagggctgcattcgaagaaacccttgctgctttagtcccgatagggtatttgaccccgatatattttagcattttaattctctccccctatttattgactttgacaattactcaggtttgagaaaaaggaaaaaaaaacagccaccgtttcttcctgccagcaggggtgtgatgtaccagtttgtccatcttgagatggtgaggctgtcagtgtatggggcagcttccggcgggatgttgaactggtcattaatgtgtcccctgagttggagctcattctgtctcttttctcttttgctttctgtttcttaagggcacacacacgtgcgtgcgagcacacacacacatacgtgcacagggtccccgagtgcctaggttttggagagtttgcctgttctatgcctttagtcaggaatggctgcacctttttgcatgatatcttcaagcctgggcgtacagagcacatttgtcagtatttttgccggctggtgaattcaaacaacctgcccaaagattgatttgtgtgtttgtgtgtgtgtgtgtgtgtgtgtgtgtgtgtgtgagtggagttgaggtgtcagagaaaatgaattttttccagatttggggtataggtctcatctcttcaggttctcatgataccacctttactgtgcttatttttttaagaaaaaagtgttgatcaaccattcgacctataagaagccttaatttgcacagtgtgtgacttacagaaactgcatgaaaaatcatgggccagagcctcggccctagcattgcacttggcctcatgctggagggaggctgggcgggtacagcgcggatggggggacaaggaggatcttacaccccaaaagtgttctgaaccccaatcctcaaaatgaagatactgtcaccacctttgcccttcacataaccactcactctctctaacccattccttatgatttcctgtgtttcgacctgtcctcacattaatgtcccctttggtggtg

SEQ ID NO: 452028 - DNA, 7571 bp, Homo sapiens
  misc_feature (1674)..(1674): n is a, c, g, or t
gagcccagtcgagccgcgctcacctcgggctcccgctccgtctccacctccgcctttgccctggcggcgcgaccccgtcccgggcgcggccccagcagtcgcgcgccgttagcctcgcgcccgccgcgcagtccgggcccggcgcgatgggggccgccgccggccggagcccccacctggggcccgcgcccgcccgccgcccgcagcgctctctgctcctgctgcagctgctgctgctcgtcgctgccccggggtccacgcaggcccaggccgccccgttccccgagctgtgcagttatacatgggaagctgttgataccaaaaataatgtactttataaaatcaacatctgtggaagtgtggatattgtccagtgcgggccatcaagtgctgtttgtatgcacgacttgaagacacgcacttatcattcagtgggtgactctgttttgagaagtgcaaccagatctctcctggaattcaacacaacagtgagctgtgaccagcaaggcacaaatcacagagtccagagcagcattgccttcctgtgtgggaaaaccctgggaactcctgaatttgtaactgcaacagaatgtgtgcactactttgagtggaggaccactgcagcctgcaagaaagacatatttaaagcaaataaggaggtgccatgctatgtgtttgatgaagagttgaggaagcatgatctcaatcctctgatcaagcttagtggtgcctacttggtggatgactccgatccggacacttctctattcatcaatgtttgtagagacatagacacactacgagacccaggttcacagctgcgggcctgtccccccggcactgccgcctgcctggtaagaggacaccaggcgtttgatgttggccagccccgggacggactgaagctggtgcgcaaggacaggcttgtcctgagttacgtgagggaagaggcaggaaagctagacttttgtgatggtcacagccctgcggtgactattacatttgtttgcccgtcggagcggagagagggcaccattcccaaactcacagctaaatccaactgccgctatgaaattgagtggattactgagtatgcctgccacagagattacctggaaagtaaaacttgttctctgagcggcgagcagcaggatgtctccatagacctcacaccacttgcccagagcggaggttcatcctatatttcagatggaaaagaatatttgttttatttgaatgtctgtggagaaactgaaatacagttctgtaataaaaaacaagctgcagtttgccaagtgaaaaagagcgatacctctcaagtcaaagcagcaggaagataccacaatcagaccctccgatattcggatggagacctcaccttgatatattttggaggtgatgaatgcagctcagggtttcagcggatgagcgtcataaactttgagtgcaataaaaccgcaggtaacgatgggaaaggaactcctgtattcacaggggaggttgactgcacctacttcttcacatgggacacggaatacgcctgtgttaaggagaaggaagacctcctctgcggtgccaccgacgggaagaagcgctatgacctgtccgcgctggtccgccatgcagaaccagagcagaattgggaagctgtggatggcagtcagacggaaacanagaagaagcattttttcattaatatttgtcacagagtgctgcaggaaggcaaggcacgagggtgtcccgaggacgcggcagtgtgtgcagtggataaaaatggaagtaaaaatctgggaaaatttatttcctctcccatgaaagagaaaggaaacattcaactctcttattcagatggtgatgattgtggtcatggcaagaaaattaaaactaatatcacacttgtatgcaagccaggtgatctggaaagtgcaccagtgttgagaacttctggggaaggcggttgcttttatgagtttgagtggcacacagctgcggcctgtgtgctgtctaagacagaaggggagaactgcacggtctttgactcccaggcagggttttcttttgacttatcacctctcacaaagaaaaatggtgcctataaagttgagacaaagaagtatgacttttatataaatgtgtgtggcccggtgtctgtgagcccctgtcagccagactcaggagcctgccaggtggcaaaaagtgatgagaagacttggaacttgggtctgagtaatgcgaagctttcatattatgatgggatgatccaactgaactacagaggcggcacaccctataacaatgaaagacacacaccgagagctacgctcatcacctttctctgtgatcgagacgcgggagtgggcttccctgaatatcaggaagaggataactccacctacaacttccggtggtacaccagctatgcctgcccggaggagcccctggaatgcgtagtgaccgacccctccacgctggagcagtacgacctctccagtctggcaaaatctgaaggtggccttggaggaaactggtatgccatggacaactcaggggaacatgtcacgtggaggaaatactacattaacgtgtgtcggcctctgaatccagtgccgggctgcaaccgatatgcatcggcttgccagatgaagtatgaaaaagatcagggctccttcactgaagtggtttccatcagtaacttgggaatggcaaagaccggcccggtggttgaggacagcggcagcctccttctggaatacgtgaatgggtcggcctgcaccaccagcgatggcagacagaccacatataccacgaggatccatctcgtctgctccaggggcaggctgaacagccaccccatcttttctctcaactgggagtgtgtggtcagtttcctgtggaacacagaggctgcctgtcccattcagacaacgacggatacagaccaggcttgctctataagggatcccaacagtggatttgtgtttaatcttaatccgctaaacagttcgcaaggatataacgtctctggcattgggaagatttttatgtttaatgtctgcggcacaatgcctgtctgtgggaccatcctgggaaaacctgcttctggctgtgaggcagaaacccaaactgaagagctcaagaattggaagccagcaaggccagtcggaattgagaaaagcctccagctgtccacagagggcttcatcactctgacctacaaagggcctctctctgccaaaggtaccgctgatgcttttatcgtccgctttgtttgcaatgatgatgtttactcagggcccctcaaattcctgcatcaagatatcgactctgggcaagggatccgaaacacttactttgagtttgaaaccgcgttggcctgtgttccttctccagtggactgccaagtcaccgacctggctggaaatgagtacgacctgactggcctaagcacagtcaggaaaccttggacggctgttgacacctctgtcgatgggagaaagaggactttctatttgagcgtttgcaatcctctcccttacattcctggatgccagggcagcgcagtggggtcttgcttagtgtcagaaggcaatagctggaatctgggtgtggtgcagatgagtccccaagccgcggcgaatggatctttgagcatcatgtatgtcaacggtgacaagtgtgggaaccagcgcttctccaccaggatcacgtttgagtgtgctcagatatcgggctcaccagcatttcagcttcaggatggttgtgagtacgtgtttatctggagaactgtggaagcctgtcccgttgtcagagtggaaggggacaactgtgaggtgaaagacccaaggcatggcaacttgtatgacctgaagcccctgggcctcaacgacaccatcgtgagcgctggcgaatacacttattacttccgggtctgtgggaagctttcctcagacgtctgccccacaagtgacaagtccaaggtggtctcctcatgtcaggaaaagcgggaaccgcagggatttcacaaagtggcaggtctcctgactcagaagctaacttatgaaaatggcttgttaaaaatgaacttcacggggggggacacttgccataaggtttatcagcgctccacagccatcttcttctactgtgaccgcggcacccagcggccagtatttctaaaggagacttcagattgttcctacttgtttgagtggcgaacgcagtatgcctgcccacctttcgatctgactgaatgttcattcaaagatggggctggcaactccttcgacctctcgtccctgtcaaggtacagtgacaactgggaagccatcactgggacgggggacccggagcactacctcatcaatgtctgcaagtctctggccccgcaggctggcactgagccgtgccctccagaagcagccgcgtgtctgctgggtggctccaagcccgtgaacctcggcagggtaagggacggacctcagtggagagatggcataattgtcctgaaatacgttgatggcgacttatgtccagatgggattcggaaaaagtcaaccaccatccgattcacctgcagcgagagccaagtgaactccaggcccatgttcatcagcgccgtggaggactgtgagtacacctttgcctggcccacagccacagcctgtcccatgaagagcaacgagcatgatgactgccaggtcaccaacccaagcacaggacacctgtttgatctgagctccttaagtggcagggcgggattcacagctgcttacagcgagaaggggttggtttacatgagcatctgtggggagaatgaaaactgccctcctggcgtgggggcctgctttggacagaccaggattagcgtgggcaaggccaacaagaggctgagatacgtggaccaggtcctgcagctggtgtacaaggatgggtccccttgtccctccaaatccggcctgagctataagagtgtgatcagtttcgtgtgcaggcctgaggccgggccaaccaataggcccatgctcatctccctggacaagcagacatgcactctcttcttctcctggcacacgccgctggcctgcgagcaagcgaccgaatgttccgtgaggaatggaagctctattgttgacttgtctccccttattcatcgcactggtggttatgaggcttatgatgagagtgaggatgatgcctccgataccaaccctgatttctacatcaatatttgtcagccactaaatcccatgcacggagtgccctgtcctgccggagccgctgtgtgcaaagttcctattgatggtccccccatagatatcggccgggtagcaggaccaccaatactcaatccaatagcaaatgagatttacttgaattttgaaagcagtactccttgcttagcggacaagcatttcaactacacctcgctcatcgcgtttcactgtaagagaggtgtgagcatgggaacgcctaagctgttaaggaccagcgagtgcgactttgtgttcgaatgggagactcctgtcgtctgtcctgatgaagtgaggatggatggctgtaccctgacagatgagcagctcctctacagcttcaacttgtccagcctttccacgagcacctttaaggtgactcgcgactcgcgcacctacagcgttggggtgtgcacctttgcagtcgggccagaacaaggaggctgtaaggacggaggagtctgtctgctctcaggcaccaagggggcatcctttggacggctgcaatcaatgaaactggattacaggcaccaggatgaagcggtcgttttaagttacgtgaatggtgatcgttgccctccagaaaccgatgacggcgtcccctgtgtcttccccttcatattcaatgggaagagctacgaggagtgcatcatagagagcagggcgaagctgtggtgtagcacaactgcggactacgacagagaccacgagtggggcttctgcagacactcaaacagctaccggacatccagcatcatatttaagtgtgatgaagatgaggacattgggaggccacaagtcttcagtgaagtgcgtgggtgtgatgtgacatttgagtggaaaacaaaagttgtctgccctccaaagaagttggagtgcaaattcgtccagaaacacaaaacctacgacctgcggctgctctcctctctcaccgggtcctggtccctggtccacaacggagtctcgtactatataaatctgtgccagaaaatatataaagggcccctgggctgctctgaaagggccagcatttgcagaaggaccacaactggtgacgtccaggtcctgggactcgttcacacgcagaagctgggtgtcataggtgacaaagttgttgtcacgtactccaaaggttatccgtgtggtggaaataagaccgcatcctccgtgatagaattgacctgtacaaagacggtgggcagacctgcattcaagaggtttgatatcgacagctgcacttactacttcagctgggactcccgggctgcctgcgccgtgaagcctcaggaggtgcagatggtgaatgggaccatcaccaaccctataaatggcaagagcttcagcctcggagatatttattttaagctgttcagagcctctggggacatgaggaccaatggggacaactacctgtatgagatccaactttcctccatcacaagctccagaaacccggcgtgctctggagccaacatatgccaggtgaagcccaacgatcagcacttcagtcggaaagttggaacctctgacaagaccaagtactaccttcaagacggcgatctcgatgtcgtgtttgcctcttcctctaagtgcggaaaggataagaccaagtctgtttcttccaccatcttcttccactgtgaccctctggtggaggacgggatccccgagttcagtcacgagactgccgactgccagtacctcttctcttggtacacctcagccgtgtgtcctctgggggtgggctttgacagcgagaatcccggggacgacgggcagatgcacaaggggctgtcagaacggagccaggcagtcggcgcggtgctcagcctgctgctggtggcgctcacctgctgcctgctggccctgttgctctacaagaaggagaggagggaaacagtgataagtaagctgaccacttgctgtaggagaagttccaacgtgtcctacaaatactcaaaggtgaataaggaagaagagacagatgagaatgaaacagagtggctgatggaagagagggaggccgggcggtcacagcatggaggaggagggaggcgctgctggtgttcttattctggcggcagcgcctttcctgccatgtttagtgaatgacttttctcgcattgtagaattgtatatagactctggtgttctattgctgagaagcaaaccgccctgcagcatccctcagcctgtaccggtttggctggcttgtttgatttcaacatgagtgtattttttaaaattgatttttctcttcatttttttttcaatcaactttactgtaatataaagtattcaacaatttcaataaaagataaa

SEQ ID NO: 452029 - DNA, 5150 bp, Homo sapiens
  misc_feature (1674)..(1674): n is a, c, g, or t
gagcccagtcgagccgcgctcacctcgggctcccgctccgtctccacctccgcctttgccctggcggcgcgaccccgtcccgggcgcggccccagcagtcgcgcgccgttagcctcgcgcccgccgcgcagtccgggcccggcgcgatgggggccgccgccggccggagcccccacctggggcccgcgcccgcccgccgcccgcagcgctctctgctcctgctgcagctgctgctgctcgtcgctgccccggggtccacgcaggcccaggccgccccgttccccgagctgtgcagttatacatgggaagctgttgataccaaaaataatgtactttataaaatcaacatctgtggaagtgtggatattgtccagtgcgggccatcaagtgctgtttgtatgcacgacttgaagacacgcacttatcattcagtgggtgactctgttttgagaagtgcaaccagatctctcctggaattcaacacaacagtgagctgtgaccagcaaggcacaaatcacagagtccagagcagcattgccttcctgtgtgggaaaaccctgggaactcctgaatttgtaactgcaacagaatgtgtgcactactttgagtggaggaccactgcagcctgcaagaaagacatatttaaagcaaataaggaggtgccatgctatgtgtttgatgaagagttgaggaagcatgatctcaatcctctgatcaagcttagtggtgcctacttggtggatgactccgatccggacacttctctattcatcaatgtttgtagagacatagacacactacgagacccaggttcacagctgcgggcctgtccccccggcactgccgcctgcctggtaagaggacaccaggcgtttgatgttggccagccccgggacggactgaagctggtgcgcaaggacaggcttgtcctgagttacgtgagggaagaggcaggaaagctagacttttgtgatggtcacagccctgcggtgactattacatttgtttgcccgtcggagcggagagagggcaccattcccaaactcacagctaaatccaactgccgctatgaaattgagtggattactgagtatgcctgccacagagattacctggaaagtaaaacttgttctctgagcggcgagcagcaggatgtctccatagacctcacaccacttgcccagagcggaggttcatcctatatttcagatggaaaagaatatttgttttatttgaatgtctgtggagaaactgaaatacagttctgtaataaaaaacaagctgcagtttgccaagtgaaaaagagcgatacctctcaagtcaaagcagcaggaagataccacaatcagaccctccgatattcggatggagacctcaccttgatatattttggaggtgatgaatgcagctcagggtttcagcggatgagcgtcataaactttgagtgcaataaaaccgcaggtaacgatgggaaaggaactcctgtattcacaggggaggttgactgcacctacttcttcacatgggacacggaatacgcctgtgttaaggagaaggaagacctcctctgcggtgccaccgacgggaagaagcgctatgacctgtccgcgctggtccgccatgcagaaccagagcagaattgggaagctgtggatggcagtcagacggaaacanagaagaagcattttttcattaatatttgtcacagagtgctgcaggaaggcaaggcacgagggtgtcccgaggacgcggcagtgtgtgcagtggataaaaatggaagtaaaaatctgggaaaatttatttcctctcccatgaaagagaaaggaaacattcaactctcttattcagatggtgatgattgtggtcatggcaagaaaattaaaactaatatcacacttgtatgcaagccaggtgatctggaaagtgcaccagtgttgagaacttctggggaaggcggttgcttttatgagtttgagtggcacacagctgcggcctgtgtgctgtctaagacagaaggggagaactgcacggtctttgactcccaggcagggttttcttttgacttatcacctctcacaaagaaaaatggtgcctataaagttgagacaaagaagtatgacttttatataaatgtgtgtggcccggtgtctgtgagcccctgtcagccagactcaggagcctgccaggtggcaaaaagtgatgagaagacttggaacttgggtctgagtaatgcgaagctttcatattatgatgggatgatccaactgaactacagaggcggcacaccctataacaatgaaagacacacaccgagagctacgctcatcacctttctctgtgatcgagacgcgggagtgggcttccctgaatatcaggaagaggataactccacctacaacttccggtggtacaccagctatgcctgcccggaggagcccctggaatgcgtagtgaccgacccctccacgctggagcagtacgacctctccagtctggcaaaatctgaaggtggccttggaggaaactggtatgccatggacaactcaggggaacatgtcacgtggaggaaatactacattaacgtgtgtcggcctctgaatccagtgccgggctgcaaccgatatgcatcggcttgccagatgaagtatgaaaaagatcagggctccttcactgaagtggtttccatcagtaacttgggaatggcaaagaccggcccggtggttgaggacagcggcagcctccttctggaatacgtgaatgggtcggcctgcaccaccagcgatggcagacagaccacatataccacgaggatccatctcgtctgctccaggggcaggctgaacagccaccccatcttttctctcaactgggagtgtgtggtcagtttcctgtggaacacagaggctgcctgtcccattcagacaacgacggatacagaccaggcttgctctataagggatcccaacagtggatttgtgtttaatcttaatccgctaaacagttcgcaaggatataacgtctctggcattgggaagatttttatgtttaatgtctgcggcacaatgcctgtctgtgggaccatcctgggaaaacctgcttctggctgtgaggcagaaacccaaactgaagagctcaagaattggaagccagcaaggccagtcggaattgagaaaagcctccagctgtccacagagggcttcatcactctgacctacaaagggcctctctctgccaaaggtaccgctgatgcttttatcgtccgctttgtttgcaatgatgatgtttactcagggcccctcaaattcctgcatcaagatatcgactctgggcaagggatccgaaacacttactttgagtttgaaaccgcgttggcctgtgttccttctccagtggactgccaagtcaccgacctggctggaaatgagtacgacctgactggcctaagcacagtcaggaaaccttggacggctgttgacacctctgtcgatgggagaaagaggactttctatttgagcgtttgcaatcctctcccttacattcctggatgccagggcagcgcagtggggtcttgcttagtgtcagaaggcaatagctggaatctgggtgtggtgcagatgagtccccaagccgcggcgaatggatctttgagcatcatgtatgtcaacggtgacaagtgtgggaaccagcgcttctccaccaggatcacgtttgagtgtgctcagatatcgggctcaccagcatttcagcttcaggatggttgtgagtacgtgtttatctggagaactgtggaagcctgtcccgttgtcagagtggaaggggacaactgtgaggtgaaagacccaaggcatggcaacttgtatgacctgaagcccctgggcctcaacgacaccatcgtgagcgctggcgaatacacttattacttccgggtctgtgggaagctttcctcagacgtctgccccacaagtgacaagtccaaggtggtctcctcatgtcaggaaaagcgggaaccgcagggatttcacaaagtggcaggtctcctgactcagaagctaacttatgaaaatggcttgttaaaaatgaacttcacggggggggacacttgccataaggtttatcagcgctccacagccatcttcttctactgtgaccgcggcacccagcggccagtatttctaaaggagacttcagattgttcctacttgtttgagtggcgaacgcagtatgcctgcccacctttcgatctgactgaatgttcattcaaagatggggctggcaactccttcgacctctcgtccctgtcaaggtacagtgacaactgggaagccatcactgggacgggggacccggagcactacctcatcaatgtctgcaagtctctggccccgcaggctggcactgagccgtgccctccagaagcagccgcgtgtctgctgggtggctccaagcccgtgaacctcggcagggtaagggacggacctcagtggagagatggcataattgtcctgaaatacgttgatggcgacttatgtccagatgggattcggaaaaagtcaaccaccatccgattcacctgcagcgagagccaagtgaactccaggcccatgttcatcagcgccgtggaggactgtgagtacacctttgcctggcccacagccacagcctgtcccatgaagagcaacgagcatgatgactgccaggtcaccaacccaagcacaggacacctgtttgatctgagctccttaagtggcagggcgggattcacagctgcttacagcgagaaggggttggtttacatgagcatctgtggggaggagggaggccaggcgggcatggcgtggaggaggagggaggccgggcggtcacagcatggaggaggagggaggcgctgctggtgttcttattctggcggcagcgcctttcctgccatgtttagtgaatgacttttctcgcattgtagaattgtatatagactctggtgttctattgctgagaagcaaaccgccctgcagcatccctcagcctgtaccggtttggctggcttgtttgatttcaacatgagtgtattttttaaaattgatttttctcttcatttttttttcaatcaactttactgtaatataaagtattcaacaatttcaataaaagataaa

SEQ ID NO: 452030 - DNA, 3845 bp, Homo sapiens
  misc_feature (1674)..(1674): n is a, c, g, or t
gagcccagtcgagccgcgctcacctcgggctcccgctccgtctccacctccgcctttgccctggcggcgcgaccccgtcccgggcgcggccccagcagtcgcgcgccgttagcctcgcgcccgccgcgcagtccgggcccggcgcgatgggggccgccgccggccggagcccccacctggggcccgcgcccgcccgccgcccgcagcgctctctgctcctgctgcagctgctgctgctcgtcgctgccccggggtccacgcaggcccaggccgccccgttccccgagctgtgcagttatacatgggaagctgttgataccaaaaataatgtactttataaaatcaacatctgtggaagtgtggatattgtccagtgcgggccatcaagtgctgtttgtatgcacgacttgaagacacgcacttatcattcagtgggtgactctgttttgagaagtgcaaccagatctctcctggaattcaacacaacagtgagctgtgaccagcaaggcacaaatcacagagtccagagcagcattgccttcctgtgtgggaaaaccctgggaactcctgaatttgtaactgcaacagaatgtgtgcactactttgagtggaggaccactgcagcctgcaagaaagacatatttaaagcaaataaggaggtgccatgctatgtgtttgatgaagagttgaggaagcatgatctcaatcctctgatcaagcttagtggtgcctacttggtggatgactccgatccggacacttctctattcatcaatgtttgtagagacatagacacactacgagacccaggttcacagctgcgggcctgtccccccggcactgccgcctgcctggtaagaggacaccaggcgtttgatgttggccagccccgggacggactgaagctggtgcgcaaggacaggcttgtcctgagttacgtgagggaagaggcaggaaagctagacttttgtgatggtcacagccctgcggtgactattacatttgtttgcccgtcggagcggagagagggcaccattcccaaactcacagctaaatccaactgccgctatgaaattgagtggattactgagtatgcctgccacagagattacctggaaagtaaaacttgttctctgagcggcgagcagcaggatgtctccatagacctcacaccacttgcccagagcggaggttcatcctatatttcagatggaaaagaatatttgttttatttgaatgtctgtggagaaactgaaatacagttctgtaataaaaaacaagctgcagtttgccaagtgaaaaagagcgatacctctcaagtcaaagcagcaggaagataccacaatcagaccctccgatattcggatggagacctcaccttgatatattttggaggtgatgaatgcagctcagggtttcagcggatgagcgtcataaactttgagtgcaataaaaccgcaggtaacgatgggaaaggaactcctgtattcacaggggaggttgactgcacctacttcttcacatgggacacggaatacgcctgtgttaaggagaaggaagacctcctctgcggtgccaccgacgggaagaagcgctatgacctgtccgcgctggtccgccatgcagaaccagagcagaattgggaagctgtggatggcagtcagacggaaacanagaagaagcattttttcattaatatttgtcacagagtgctgcaggaaggcaaggcacgagggtgtcccgaggacgcggcagtgtgtgcagtggataaaaatggaagtaaaaatctgggaaaatttatttcctctcccatgaaagagaaaggaaacattcaactctcttattcagatggtgatgattgtggtcatggcaagaaaattaaaactaatatcacacttgtatgcaagccaggtgatctggaaagtgcaccagtgttgagaacttctggggaaggcggttgcttttatgagtttgagtggcacacagctgcggcctgtgtgctgtctaagacagaaggggagaactgcacggtctttgactcccaggcagggttttcttttgacttatcacctctcacaaagaaaaatggtgcctataaagttgagacaaagaagtatgacttttatataaatgtgtgtggcccggtgtctgtgagcccctgtcagccagactcaggagcctgccaggtggcaaaaagtgatgagaagacttggaacttgggtctgagtaatgcgaagctttcatattatgatgggatgatccaactgaactacagaggcggcacaccctataacaatgaaagacacacaccgagagctacgctcatcacctttctctgtgatcgagacgcgggagtgggcttccctgaatatcaggaagaggataactccacctacaacttccggtggtacaccagctatgcctgcccggaggagcccctggaatgcgtagtgaccgacccctccacgctggagcagtacgacctctccagtctggcaaaatctgaaggtggccttggaggaaactggtatgccatggacaactcaggggaacatgtcacgtggaggaaatactacattaacgtgtgtcggcctctgaatccagtgccgggctgcaaccgatatgcatcggcttgccagatgaagtatgaaaaagatcagggctccttcactgaagtggtttccatcagtaacttgggaatggcaaagaccggcccggtggttgaggacagcggcagcctccttctggaatacgtgaatgggtcggcctgcaccaccagcgatggcagacagaccacatataccacgaggatccatctcgtctgctccaggggcaggctgaacagccaccccatcttttctctcaactgggagtgtgtggtcagtttcctgtggaacacagaggctgcctgtcccattcagacaacgacggatacagaccaggcttgctctataagggatcccaacagtggatttgtgtttaatcttaatccgctaaacagttcgcaaggatataacgtctctggcattgggaagatttttatgtttaatgtctgcggcacaatgcctgtctgtgggaccatcctgggaaaacctgcttctggctgtgaggcagaaacccaaactgaagagctcaagaattggaagccagcaaggccagtcggaattgagaaaagcctccagctgtccacagagggcttcatcactctgacctacaaagggcctctctctgccaaaggtaccgctgatgcttttatcgtccgctttgtttgcaatgatgatgtttactcagggcccctcaaattcctgcatcaagatatcgactctgggcaagggatccgaaacacttactttgagtttgaaaccgcgttggcctgtgttccttctccagtggactgccaagtcaccgacctggctggaaatgagtacgacctgactggcctaagcacagtcaggaaaccttggacggctgttgacacctctgtcgatgggagaaagaggactttctatttgagcgtttgcaatcctctcccttacattcctggatgccagggcagcgcagtggggtcttgcttagtgtcagaaggcaatagctggaatctgggtgtggtgcagatgagtccccaagccgcggcgaatggatctttgagcatcatgtatgtcaacggtgacaagtgtgggaaccagcgcttctccaccaggatcacgtttgagtgtgctcagatatcgggctcaccagcatttcagcttcaggatggttgtgagtacgtgtttatctggagaactgtggaagcctgtcccgttgtcagagtggaaggtaggactgggcctgtccctacaagtcat

SEQ ID NO: 452031 - DNA, 286 bp, Homo sapiens
aggacacattctgaccctttgcttttcctaatctgcgcctcatcccacaggcacatggagacagaaatgtcacatgctgtggagtttttcagagaagcttccacttgtaagttgaaatcatgatagacatggagtttttgcgtgatcccttcaggacctgtctgtgctttgttgtagaactccaggcccatgttcatcagcgccgtggaggactgtgagtacacctttgcctggcccacagccacagcctgtcccatgaagagcaacgagcatgatgactgccagg

SEQ ID NO: 452032 - DNA, 778 bp, Homo sapiens
gttgcttggtttatatcattgttgaaattaaataatattgtgctatatttgtgtttaattattcaggaccataattatggtgctcgtcctcctccgacacctccggcttcccctcctccatcagtccttattagcaaaaatgaagtaggcatatttaccactcctaattttgatgaaacttccagtgctactacaatcagcacatctgaggatggaagttatggtactgatgtaaccaggtgcatatgtggttttacacatgatgatggatacatgatctgttgtgacaaatgcaggtaaaatattttacaccattattttatttttcttgaatgctgataacctttggtaatgttggaaaagataactaaagtcactttcaagggaattaatggatacatattttaagtgggacttctactattgatgcagtcctagaaaaagcctcctatgtgaaaaaagagtttactagaaatccctgttgttaactgagtaatagacagtcagttctgaactttttttcatgtaggatcacatttttctgttcacttagttcaatagtagtacaagtacataaacatagcagtagacaagatagaaatgagagaatttagtcttttgtatttcctttggaataatttgtgcttagtcaactgtgattttccagtttgcggaaattaaacattttcattgatgtttgtttgacctgactctctcacctccttttgacttgaaccttgcagcactctggagtctccttgaaccagaaccacagtct

SEQ ID NO: 452033 - DNA, 581 bp, Homo sapiens
cttcactaaatatgccgtagtaatcttcttgtggcattctaaattcattccctcagaaagattgtgatttagaaacttttcttttgatcatgatcacataactcaattccagaaaaattaatgagagagactctaagcaaatttcaatttatattgagattttaataaagaatgttttcttcatgttattttacttactgttatagtgtgactgttgcttttttgtctccttttcttttaaacagggtttgtggatgcacttagatgtttgcaatgagcactgtggctggcatgccccagtgttttggataccaatgcataggactccatagtaatcgaatttaccagaggcgaacgtcatgagcatagtgatcccattgggggttgatacagcagagacgtcatacttggaaatggctgcaggttcagagtaagtatttaaattggttacataagcaaaaaaaaaaaaaaacccttctggagctagaaagtaggaagaagtataagtggaaaatattaaatttcttctttcctagccattttttaaagtaaaaaaaaaaaaagcgaagttacctttcttt

SEQ ID NO: 452034 - DNA, 216 bp, Homo sapiens
aggtatataagcaatttctaattttataattttgggcaatttgaatttcctttattactataatccatgtctctgatgccagttagtattactatactgtacttaggaatgcagaatcacatttggaacttgaaaatttgcacttttgcatagttgggattctagagagttagtcaagtcagttgtcatactataaattcaccatagaacaaccaa

SEQ ID NO: 452035 - DNA, 3227 bp, Homo sapiens
agcgggcgcgcggcgccgcgccgccgccgccattttcccagagcgagaggcagtgacactgagcgggcgcagggggccgagtcggagaccgtgccggagttcgggagcggcaacagagtgggcatagacactccgagcagcctcgccgtcgtctctgcgttcctgttgactgcctggctgccccctcccctactcctcggttcctggtgaagaggctgcgcgctgctgtttggggagggggtgtgtggagccgggtcctgtgtccgcagtggctgctgtcggggggtcgcctgttcgcggaggtgcggagagactccttgggggtcgagcacataacggggttcgggtgtctcgtgtgtgaacatcacaggtctattctggataagcaggttttgtgaagacatttattctttcttggacctcagatttaccagacatctcatgggtttgtggatgcacttagatgtttgcaatgagcactgtggctggcatgccccagtgttttggataccaatgcataggactccatagtaatcgaatttaccagaggcgaacgtcatgagcatagtgatcccattgggggttgatacagcagagacgtcatacttggaaatggctgcaggttcagaaccagaatccgtagaagctagccctgtggtagttgagaaatccaacagttatccccaccagttatataccagcagctcacatcattcacacagttacattggtttgccctatgcggaccataattatggtgctcgtcctcctccgacacctccggcttcccctcctccatcagtccttattagcaaaaatgaagtaggcatatttaccactcctaattttgatgaaacttccagtgctactacaatcagcacatctgaggatggaagttatggtactgatgtaaccaggtgcatatgtggttttacacatgatgatggatacatgatctgttgtgacaaatgcagcgtttggcaacatattgactgcatggggattgataggcagcatattcctgatacatatctatgtgaacgttgtcagcctaggaatttggataaagagagggcagtgctactacaacgccggaaaagggaaaatatgtcagatggtgataccagtgcaactgagagtggtgatgaggttcctgtggaattatatactgcatttcagcatactccaacatcaattactttaactgcttcaagagtttccaaagttaatgataaaagaaggaaaaaaagcggggagaaagaacaacacatttcaaaatgtaaaaaggcatttcgtgaaggatctaggaagtcatcaagagttaagggttcagctccagagattgatccttcatctgatggttcaaattttggatgggagacaaagatcaaagcatggatggatcgatatgaagaagcaaataacaaccagtacagtgagggtgttcagagggaggcacaaagaatagctctgagattaggcaatggaaatgacaaaaaagagatgaataaatccgatttgaataccaacaatttgctcttcaaacctcctgtagagagccatatacaaaagaataagaaaattcttaaatctgcaaaagatttgcctcctgatgcacttatcattgaatacagagggaagtttatgctgagagaacagtttgaagcaaatgggtatttctttaaaagaccatacccttttgtgttattctactctaaatttcatgggctagaaatgtgtgttgatgcaaggacttttgggaatgaggctcgattcatcaggcggtcttgtacacccaatgcagaggtgaggcatgaaattcaagatggaaccatacatctttatatttattctatacacagtattccaaagggaactgaaattactattgcctttgattttgactatggaaattgtaagtacaaggtggactgtgcatgcctcaaagaaaacccagagtgccctgttctaaaacgtagttctgaatccatggaaaatatcaatagtggttatgagaccagacggaaaaaaggaaaaaaagacaaagatatttcaaaagaaaaagatacacaaaatcagaatattactttggattgtgaaggaacgaccaacaaaatgaagagcccagaaactaaacaaagaaagctttctccactgagactatcagtatcaaataatcaggaaccagattttattgatgatatagaagaaaaaactcctattagtaatgaagtagaaatggaatcagaggagcagattgcagaaaggaaaaggaagatgacaagagaagaaagaaaaatggaagcaattttgcaagcttttgccagacttgaaaagagagagaaaagaagagaacaagctttggaaaggatcagcacagccaaaactgaagttaaaactgaatgtaaagatacacagattgtcagtgatgctgaagttattcaggaacaagcaaaagaagaaaatgctagcaagccaacccctgccaaagtaaatagaactaaacagagaaaaagtttttctcggagtaggactcacattggacagcagcgtcggagacacagaactgtcagcatgtgttcagatatccagccatcttctcctgatatagaagttacttcacaacaaaatgatattgaaaatactgtacttacaatagaaccagaaactgaaactgcactagcagaaataattactgaaactgaagttccagcacttaataaatgtcctaccaagtaccccaaaacaaagaagcacttggttaatgaatggttaagtgagaagaatgagaagacaggaaaaccttcagatggcctttcagaaaggcctctacgcataactacagatcctgaagtgttagctacacaactcaattctttaccaggtctcacttacagcccccatgtatactccactcctaagcattatattagatttacttcaccattcctttcagaaaaaaggagaagaaaagaacctactgaaaacatttctggttcatgcaagaagcgatggttgaaacaagctctggaagaagaaaattcagcaattttacatagatttaattcaccctgtcaagaaagatccagaagtcctgcagtcaatggtgaaaataaaagtccactactattaaatgacagctgttcccttccagatttaactacaccactaaaaaaacgaagattttatcagttgctagattcggtttactcagaaacctccacacc

SEQ ID NO: 452036 - DNA, 3523 bp, Homo sapiens
agcgggcgcgcggcgccgcgccgccgccgccattttcccagagcgagaggcagtgacactgagcgggcgcagggggccgagtcggagaccgtgccggagttcgggagcggcaacagagtgggcatagacactccgagcagcctcgccgtcgtctctgcgttcctgttgactgcctggctgccccctcccctactcctcggttcctggtgaagaggctgcgcgctgctgtttggggagggggtgtgtggagccgggtcctgtgtccgcagtggctgctgtcggggggtcgcctgttcgcggaggtgcggagagactccttgggggtcgagcacataacggggttcgggtgtctcgtgtgtgaacatcacaggtctattctggataagcaggttttgtgaagacatttattctttcttggacctcagatttaccagacatctcatgggtttgtggatgcacttagatgtttgcaatgagcactgtggctggcatgccccagtgttttggataccaatgcataggactccatagtaatcgaatttaccagaggcgaacgtcatgagcatagtgatcccattgggggttgatacagcagagacgtcatacttggaaatggctgcaggttcagaaccagaatccgtagaagctagccctgtggtagttgagaaatccaacagttatccccaccagttatataccagcagctcacatcattcacacagttacattggtttgccctatgcggaccataattatggtgctcgtcctcctccgacacctccggcttcccctcctccatcagtccttattagcaaaaatgaagtaggcatatttaccactcctaattttgatgaaacttccagtgctactacaatcagcacatctgaggatggaagttatggtactgatgtaaccaggtgcatatgtggttttacacatgatgatggatacatgatctgttgtgacaaatgcagcgtttggcaacatattgactgcatggggattgataggcagcatattcctgatacatatctatgtgaacgttgtcagcctaggaatttggataaagagagggcagtgctactacaacgccggaaaagggaaaatatgtcagatggtgataccagtgcaactgagagtggtgatgaggttcctgtggaattatatactgcatttcagcatactccaacatcaattactttaactgcttcaagagtttccaaagttaatgataaaagaaggaaaaaaagcggggagaaagaacaacacatttcaaaatgtaaaaaggcatttcgtgaaggatctaggaagtcatcaagagttaagggttcagctccagagattgatccttcatctgatggttcaaattttggatgggagacaaagatcaaagcatggatggatcgatatgaagaagcaaataacaaccagtacagtgagggtgttcagagggaggcacaaagaatagctctgagattaggcaatggaaatgacaaaaaagagatgaataaatccgatttgaataccaacaatttgctcttcaaacctcctgtagagagccatatacaaaagaataagaaaattcttaaatctgcaaaagatttgcctcctgatgcacttatcattgaatacagagggaagtttatgctgagagaacagtttgaagcaaatgggtatttctttaaaagaccatacccttttgtgttattctactctaaatttcatgggctagaaatgtgtgttgatgcaaggacttttgggaatgaggctcgattcatcaggcggtcttgtacacccaatgcagaggtgaggcatgaaattcaagatggaaccatacatctttatatttattctatacacagtattccaaagggaactgaaattactattgcctttgattttgactatggaaattgtaagtacaaggtggactgtgcatgcctcaaagaaaacccagagtgccctgttctaaaacgtagttctgaatccatggaaaatatcaatagtggttatgagaccagacggaaaaaaggaaaaaaagacaaagatatttcaaaagaaaaagatacacaaaatcagaatattactttggattgtgaaggaacgaccaacaaaatgaagagcccagaaactaaacaaagaaagctttctccactgagactatcagtatcaaataatcaggaaccagattttattgatgatatagaagaaaaaactcctattagtaatgaagtagaaatggaatcagaggagcagattgcagaaaggaaaaggaagatgacaagagaagaaagaaaaatggaagcaattttgcaagcttttgccagacttgaaaagagagagaaaagaagagaacaagctttggaaaggatcagcacagccaaaactgaagttaaaactgaatgtaaagatacacagattgtcagtgatgctgaagttattcaggtattatttattcaggtcgttttattttcttaaacactttaaaataaaatgtctatacttgcattaattacttataaggaatttaaaataatgtctattagctttttaatagcatttttcagatcctatgggagtttcagcttgagataaaagactatatattatctctgttctttattatatatcagaattcaaaaattccagaaagttggcttctgaagtagaataatgctattatatttaaactttatatatatgtagtataaaaacttccattcgcttgtattttgaattaggaacaagcaaaagaagaaaatgctagcaagccaacccctgccaaagtaaatagaactaaacagagaaaaagtttttctcggagtaggactcacattggacagcagcgtcggagacacagaactgtcagcatgtgttcagatatccagccatcttctcctgatatagaagttacttcacaacaaaatgatattgaaaatactgtacttacaatagaaccagaaactgaaactgcactagcagaaataattactgaaactgaagttccagcacttaataaatgtcctaccaagtaccccaaaacaaagaagcacttggttaatgaatggttaagtgagaagaatgagaagacaggaaaaccttcagatggcctttcagaaaggcctctacgcataactacagatcctgaagtgttagctacacaactcaattctttaccaggtctcacttacagcccccatgtatactccactcctaagcattatattagatttacttcaccattcctttcagaaaaaaggagaagaaaagaacctactgaaaacatttctggttcatgcaagaagcgatggttgaaacaagctctggaagaagaaaattcagcaattttacatagatttaattcaccctgtcaagaaagatccagaagtcctgcagtcaatggtgaaaataaaagtccactactattaaatgacagctgttcccttccagatttaactacaccactaaaaaaacgaagattttatcagttgctagattcggtttactcagaaacctccacacc

SEQ ID NO: 452037 - DNA, 3163 bp, Homo sapiens
  misc_feature (3127)..(3127): n is a, c, g, or t
  misc_feature (3129)..(3129): n is a, c, g, or t
  misc_feature (3132)..(3132): n is a, c, g, or t
  misc_feature (3134)..(3134): n is a, c, g, or t
  misc_feature (3136)..(3136): n is a, c, g, or t
agcgggcgcgcggcgccgcgccgccgccgccattttcccagagcgagaggcagtgacactgagcgggcgcagggggccgagtcggagaccgtgccggagttcgggagcggcaacagagtgggcatagacactccgagcagcctcgccgtcgtctctgcgttcctgttgactgcctggctgccccctcccctactcctcggttcctggtgaagaggctgcgcgctgctgtttggggagggggtgtgtggagccgggtcctgtgtccgcagtggctgctgtcggggggtcgcctgttcgcggaggtgcggagagactccttgggggtcgagcacataacggggttcgggtgtctcgtgtgtgaacatcacaggtctattctggataagcaggttttgtgaagacatttattctttcttggacctcagatttaccagacatctcatgggtttgtggatgcacttagatgtttgcaatgagcactgtggctggcatgccccagtgttttggataccaatgcataggactccatagtaatcgaatttaccagaggcgaacgtcatgagcatagtgatcccattgggggttgatacagcagagacgtcatacttggaaatggctgcaggttcagaaccagaatccgtagaagctagccctgtggtagttgagaaatccaacagttatccccaccagttatataccagcagctcacatcattcacacagttacattggtttgccctatgcggaccataattatggtgctcgtcctcctccgacacctccggcttcccctcctccatcagtccttattagcaaaaatgaagtaggcatatttaccactcctaattttgatgaaacttccagtgctactacaatcagcacatctgaggatggaagttatggtactgatgtaaccaggtgcatatgtggttttacacatgatgatggatacatgatctgttgtgacaaatgcagcgtttggcaacatattgactgcatggggattgataggcagcatattcctgatacatatctatgtgaacgttgtcagcctaggaatttggataaagagagggcagtgctactacaacgccggaaaagggaaaatatgtcagatggtgataccagtgcaactgagagtggtgatgaggttcctgtggaattatatactgcatttcagcatactccaacatcaattactttaactgcttcaagagtttccaaagttaatgataaaagaaggaaaaaaagcggggagaaagaacaacacatttcaaaatgtaaaaaggcatttcgtgaaggatctaggaagtcatcaagagttaagggttcagctccagagattgatccttcatctgatggttcaaattttggatgggagacaaagatcaaagcatggatggatcgatatgaagaagcaaataacaaccagtacagtgagggtgttcagagggaggcacaaagaatagctctgagattaggcaatggaaatgacaaaaaagagatgaataaatccgatttgaataccaacaatttgctcttcaaacctcctgtagagagccatatacaaaagaataagaaaattcttaaatctgcaaaagatttgcctcctgatgcacttatcattgaatacagagggaagtttatgctgagagaacagtttgaagcaaatgggtatttctttaaaagaccatacccttttgtgttattctactctaaatttcatgggctagaaatgtgtgttgatgcaaggacttttgggaatgaggctcgattcatcaggcggtcttgtacacccaatgcagaggtgaggcatgaaattcaagatggaaccatacatctttatatttattctatacacagtattccaaagggaactgaaattactattgcctttgattttgactatggaaattgtaagtacaaggtggactgtgcatgcctcaaagaaaacccagagtgccctgttctaaaacgtagttctgaatccatggaaaatatcaatagtggttatgagaccagacggaaaaaaggaaaaaaagacaaagatatttcaaaagaaaaagatacacaaaatcagaatattactttggattgtgaaggaacgaccaacaaaatgaagagcccagaaactaaacaaagaaagctttctccactgagactatcagtatcaaataatcaggaaccagattttattgatgatatagaagaaaaaactcctattagtaatgaagtagaaatggaatcagaggagcagattgcagaaaggaaaaggaagatgacaagagaagaaagaaaaatggaagcaattttgcaagcttttgccagacttgaaaagagagagaaaagaagagaacaagctttggaaaggatcagcacagccaaaactgaagttaaaactgaatgtaaagatacacagattgtcagtgatgctgaagttattcaggtattatttattcaggtcgttttattttcttaaacactttaaaataaaatgtctatacttgcattaattacttataaggaatttaaaataatgtctattagctttttaatagcatttttcagatcctatgggagtttcagcttgagataaaagactatatattatctctgttctttattatatatcagaattcaaaaattccagaaagttggcttctgaagtagaataatgctattatatttaaactttatatatatgtagtataaaaacttccattcgcttgtattttgaattaggaacaagcaaaagaagaaaatgctagcaagccaacccctgccaaagtaaatagaactaaacagagaaaaagtttttctcggagtaggactcacattggacagcagcgtcggagacacagaactgtcagcatgtgttcagatatccagccatcttctcctgatatagaagttacttcacaacaaaatgaagagcccagaaactaaacaaagaaagctttctccactgagactatcagtatcaaataatcaggaaccagattttattgatgatatagaagaaaaaactcctattagtaatgaagtagaaatggaatcagaggagcagattgcagaaaggaaaaggaagatgacaagagaagaaagaaaaatggaagcaatttgaactngncanantngctcagatcttgggaagtaacatcttc

SEQ ID NO: 452038 - DNA, 3153 bp, Homo sapiens
agcgggcgcgcggcgccgcgccgccgccgccattttcccagagcgagaggcagtgacactgagcgggcgcagggggccgagtcggagaccgtgccggagttcgggagcggcaacagagtgggcatagacactccgagcagcctcgccgtcgtctctgcgttcctgttgactgcctggctgccccctcccctactcctcggttcctggtgaagaggctgcgcgctgctgtttggggagggggtgtgtggagccgggtcctgtgtccgcagtggctgctgtcggggggtcgcctgttcgcggaggtgcggagagactccttgggggtcgagcacataacggggttcgggtgtctcgtgtgtgaacatcacagggtttgtggatgcacttagatgtttgcaatgagcactgtggctggcatgccccagtgttttggataccaatgcataggactccatagtaatcgaatttaccagaggcgaacgtcatgagcatagtgatcccattgggggttgatacagcagagacgtcatacttggaaatggctgcaggttcagaaccagaatccgtagaagctagccctgtggtagttgagaaatccaacagttatccccaccagttatataccagcagctcacatcattcacacagttacattggtttgccctatgcggaccataattatggtgctcgtcctcctccgacacctccggcttcccctcctccatcagtccttattagcaaaaatgaagtaggcatatttaccactcctaattttgatgaaacttccagtgctactacaatcagcacatctgaggatggaagttatggtactgatgtaaccaggtgcatatgtggttttacacatgatgatggatacatgatctgttgtgacaaatgcagcgtttggcaacatattgactgcatggggattgataggcagcatattcctgatacatatctatgtgaacgttgtcagcctaggaatttggataaagagagggcagtgctactacaacgccggaaaagggaaaatatgtcagatggtgataccagtgcaactgagagtggtgatgaggttcctgtggaattatatactgcatttcagcatactccaacatcaattactttaactgcttcaagagtttccaaagttaatgataaaagaaggaaaaaaagcggggagaaagaacaacacatttcaaaatgtaaaaaggcatttcgtgaaggatctaggaagtcatcaagagttaagggttcagctccagagattgatccttcatctgatggttcaaattttggatgggagacaaagatcaaagcatggatggatcgatatgaagaagcaaataacaaccagtacagtgagggtgttcagagggaggcacaaagaatagctctgagattaggcaatggaaatgacaaaaaagagatgaataaatccgatttgaataccaacaatttgctcttcaaacctcctgtagagagccatatacaaaagaataagaaaattcttaaatctgcaaaagatttgcctcctgatgcacttatcattgaatacagagggaagtttatgctgagagaacagtttgaagcaaatgggtatttctttaaaagaccatacccttttgtgttattctactctaaatttcatgggctagaaatgtgtgttgatgcaaggacttttgggaatgaggctcgattcatcaggcggtcttgtacacccaatgcagaggtgaggcatgaaattcaagatggaaccatacatctttatatttattctatacacagtattccaaagggaactgaaattactattgcctttgattttgactatggaaattgtaagtacaaggtggactgtgcatgcctcaaagaaaacccagagtgccctgttctaaaacgtagttctgaatccatggaaaatatcaatagtggttatgagaccagacggaaaaaaggaaaaaaagacaaagatatttcaaaagaaaaagatacacaaaatcagaatattactttggattgtgaaggaacgaccaacaaaatgaagagcccagaaactaaacaaagaaagctttctccactgagactatcagtatcaaataatcaggaaccagattttattgatgatatagaagaaaaaactcctattagtaatgaagtagaaatggaatcagaggagcagattgcagaaaggaaaaggaagatgacaagagaagaaagaaaaatggaagcaattttgcaagcttttgccagacttgaaaagagagagaaaagaagagaacaagctttggaaaggatcagcacagccaaaactgaagttaaaactgaatgtaaagatacacagattgtcagtgatgctgaagttattcaggaacaagcaaaagaagaaaatgctagcaagccaacccctgccaaagtaaatagaactaaacagagaaaaagtttttctcggagtaggactcacattggacagcagcgtcggagacacagaactgtcagcatgtgttcagatatccagccatcttctcctgatatagaagttacttcacaacaaaatgatattgaaaatactgtacttacaatagaaccagaaactgaaactgcactagcagaaataattactgaaactgaagttccagcacttaataaatgtcctaccaagtaccccaaaacaaagaagcacttggttaatgaatggttaagtgagaagaatgagaagacaggaaaaccttcagatggcctttcagaaaggcctctacgcataactacagatcctgaagtgttagctacacaactcaattctttaccaggtctcacttacagcccccatgtatactccactcctaagcattatattagatttacttcaccattcctttcagaaaaaaggagaagaaaagaacctactgaaaacatttctggttcatgcaagaagcgatggttgaaacaagctctggaagaagaaaattcagcaattttacatagatttaattcaccctgtcaagaaagatccagaagtcctgcagtcaatggtgaaaataaaagtccactactattaaatgacagctgttcccttccagatttaactacaccactaaaaaaacgaagattttatcagttgctagattcggtttactcagaaacctccacacc

SEQ ID NO: 452039 - DNA, 2353 bp, Homo sapiens
  misc_feature (2317)..(2317): n is a, c, g, or t
  misc_feature (2319)..(2319): n is a, c, g, or t
  misc_feature (2322)..(2322): n is a, c, g, or t
  misc_feature (2324)..(2324): n is a, c, g, or t
  misc_feature (2326)..(2326): n is a, c, g, or t
agcgggcgcgcggcgccgcgccgccgccgccattttcccagagcgagaggcagtgacactgagcgggcgcagggggccgagtcggagaccgtgccggagttcgggagcggcaacagagtgggcatagacactccgagcagcctcgccgtcgtctctgcgttcctgttgactgcctggctgccccctcccctactcctcggttcctggtgaagaggctgcgcgctgctgtttggggagggggtgtgtggagccgggtcctgtgtccgcagtggctgctgtcggggggtcgcctgttcgcggaggtgcggagagactccttgggggtcgagcacataacggggttcgggtgtctcgtgtgtgaacatcacaggtctattctggataagcaggttttgtgaagacatttattctttcttggacctcagatttaccagacatctcatgggtttgtggatgcacttagatgtttgcaatgagcactgtggctggcatgccccagtgttttggataccaatgcataggactccatagtaatcgaatttaccagaggcgaacgtcatgagcatagtgatcccattgggggttgatacagcagagacgtcatacttggaaatggctgcaggttcagaaccagaatccgtagaagctagccctgtggtagttgagaaatccaacagttatccccaccagttatataccagcagctcacatcattcacacagttacattggtttgccctatgcggaccataattatggtgctcgtcctcctccgacacctccggcttcccctcctccatcagtccttattagcaaaaatgaagtaggcatatttaccactcctaattttgatgaaacttccagtgctactacaatcagcacatctgaggatggaagttatggtactgatgtaaccaggtgcatatgtggttttacacatgatgatggatacatgatctgttgtgacaaatgcagcgtttggcaacatattgactgcatggggattgataggcagcatattcctgatacatatctatgtgaacgttgtcagcctaggaatttggataaagagagggcagtgctactacaacgccggaaaagggaaaatatgtcagatggtgataccagtgcaactgagagtggtgatgaggttcctgtggaattatatactgcatttcagcatactccaacatcaattactttaactgcttcaagagtttccaaagttaatgataaaagaaggaaaaaaagcggggagaaagaacaacacatttcaaaatgtaaaaaggcatttcgtgaaggatctaggaagtcatcaagagttaagggttcagctccagagattgatccttcatctgatggttcaaattttggatgggagacaaagatcaaagcatggatggatcgatatgaagaagcaaataacaaccagtacagtgagggtgttcagagggaggcacaaagaatagctctgagattaggcaatggaaatgacaaaaaagagatgaataaatccgatttgaataccaacaatttgctcttcaaacctcctgtagagagccatatacaaaagaataagaaaattcttaaatctgcaaaagatttgcctcctgatgcacttatcattgaatacagagggaagtttatgctgagagaacagtttgaagcaaatgggtatttctttaaaagaccatacccttttgtgttattctactctaaatttcatgggctagaaatgtgtgttgatgcaaggacttttgggaatgaggctcgattcatcaggcggtcttgtacacccaatgcagaggtgaggcatgaaattcaagatggaaccatacatctttatatttattctatacacagtattccaaagggaactgaaattactattgcctttgattttgactatggaaattgtaagtacaaggtggactgtgcatgcctcaaagaaaacccagagtgccctgttctaaaacgtagttctgaatccatggaaaatatcaatagtggttatgagaccagacggaaaaaaggaaaaaaagacaaagatatttcaaaagaaaaagatacacaaaatcagaatattactttggattgtgaaggaacgaccaacaaaatgaagagcccagaaactaaacaaagaaagctttctccactgagactatcagtatcaaataatcaggaaccagattttattgatgatatagaagaaaaaactcctattagtaatgaagtagaaatggaatcagaggagcagattgcagaaaggaaaaggaagatgacaagagaagaaagaaaaatggaagcaatttgaactngncanantngctcagatcttgggaagtaacatcttc

SEQ ID NO: 452040 - DNA, 3171 bp, Homo sapiens
  misc_feature (8)..(8): n is a, c, g, or t
  misc_feature (47)..(47): n is a, c, g, or t
ggccaagnccgtagtgacgtccctctctagaccggatgctctctacngtagcgagttcaggtataaatcctggtttattttgaaacttcctattacttaagtttactgacatttccaaggctttattatattaatatctggtcacactcaacacatgcatatatttttgaacactgaaatgcatacttcagttccatttgaggtccatatagattctgtgtgttttagtcttgcttaaattatttctactacttctttgcacccctttgctagttttctcagtgccgtagggtttattaaataataattggactctagtaattttttttaatgagagagagggaaactatatttgaaattggattgggacatttattttacttaaacagaagtttgcttatgacacataatctagatgggatatatcttatctatagtgtatccacctgctgtaagtagatactgtatttgtatagccattattttgctgtaagtactttatcattttaattaaattgattaagaggaaaaaaaaagaatggaattctctttgatgcaactttttccccccagaccagaatccgtagaagctagccctgtggtagttgagaaatccaacagttatccccaccagttatataccagcagctcacatcattcacacagttacattggtttgccctatgcggaccataattatggtgctcgtcctcctccgacacctccggcttcccctcctccatcagtccttattagcaaaaatgaagtaggcatatttaccactcctaattttgatgaaacttccagtgctactacaatcagcacatctgaggatggaagttatggtactgatgtaaccaggtgcatatgtggttttacacatgatgatggatacatgatctgttgtgacaaatgcagcgtttggcaacatattgactgcatggggattgataggcagcatattcctgatacatatctatgtgaacgttgtcagcctaggaatttggataaagagagggcagtgctactacaacgccggaaaagggaaaatatgtcagatggtgataccagtgcaactgagagtggtgatgaggttcctgtggaattatatactgcatttcagcatactccaacatcaattactttaactgcttcaagagtttccaaagttaatgataaaagaaggaaaaaaagcggggagaaagaacaacacatttcaaaatgtaaaaaggcatttcgtgaaggatctaggaagtcatcaagagttaagggttcagctccagagattgatccttcatctgatggttcaaattttggatgggagacaaagatcaaagcatggatggatcgatatgaagaagcaaataacaaccagtacagtgagggtgttcagagggaggcacaaagaatagctctgagattaggcaatggaaatgacaaaaaagagatgaataaatccgatttgaataccaacaatttgctcttcaaacctcctgtagagagccatatacaaaagaataagaaaattcttaaatctgcaaaagatttgcctcctgatgcacttatcattgaatacagagggaagtttatgctgagagaacagtttgaagcaaatgggtatttctttaaaagaccatacccttttgtgttattctactctaaatttcatgggctagaaatgtgtgttgatgcaaggacttttgggaatgaggctcgattcatcaggcggtcttgtacacccaatgcagaggtgaggcatgaaattcaagatggaaccatacatctttatatttattctatacacagtattccaaagggaactgaaattactattgcctttgattttgactatggaaattgtaagtacaaggtggactgtgcatgcctcaaagaaaacccagagtgccctgttctaaaacgtagttctgaatccatggaaaatatcaatagtggttatgagaccagacggaaaaaaggaaaaaaagacaaagatatttcaaaagaaaaagatacacaaaatcagaatattactttggattgtgaaggaacgaccaacaaaatgaagagcccagaaactaaacaaagaaagctttctccactgagactatcagtatcaaataatcaggaaccagattttattgatgatatagaagaaaaaactcctattagtaatgaagtagaaatggaatcagaggagcagattgcagaaaggaaaaggaagatgacaagagaagaaagaaaaatggaagcaattttgcaagcttttgccagacttgaaaagagagagaaaagaagagaacaagctttggaaaggatcagcacagccaaaactgaagttaaaactgaatgtaaagatacacagattgtcagtgatgctgaagttattcaggaacaagcaaaagaagaaaatgctagcaagccaacccctgccaaagtaaatagaactaaacagagaaaaagtttttctcggagtaggactcacattggacagcagcgtcggagacacagaactgtcagcatgtgttcagatatccagccatcttctcctgatatagaagttacttcacaacaaaatgatattgaaaatactgtacttacaatagaaccagaaactgaaactgcactagcagaaataattactgaaactgaagttccagcacttaataaatgtcctaccaagtaccccaaaacaaagaagcacttggttaatgaatggttaagtgagaagaatgagaagacaggaaaaccttcagatggcctttcagaaaggcctctacgcataactacagatcctgaagtgttagctacacaactcaattctttaccaggtctcacttacagcccccatgtatactccactcctaagcattatattagatttacttcaccattcctttcagaaaaaaggagaagaaaagaacctactgaaaacatttctggttcatgcaagaagcgatggttgaaacaagctctggaagaagaaaattcagcaattttacatagatttaattcaccctgtcaagaaagatccagaagtcctgcagtcaatggtgaaaataaaagtccactactattaaatgacagctgttcccttccagatttaactacaccactaaaaaaacgaagattttatcagttgctagattcggtttactcagaaacctccacacc

SEQ ID NO: 452041 - DNA, 2524 bp, Homo sapiens
taccgtggctccaactttctacagttcatgttgtcctagcggaccataattatggtgctcgtcctcctccgacacctccggcttcccctcctccatcagtccttattagcaaaaatgaagtaggcatatttaccactcctaattttgatgaaacttccagtgctactacaatcagcacatctgaggatggaagttatggtactgatgtaaccaggtgcatatgtggttttacacatgatgatggatacatgatctgttgtgacaaatgcagcgtttggcaacatattgactgcatggggattgataggcagcatattcctgatacatatctatgtgaacgttgtcagcctaggaatttggataaagagagggcagtgctactacaacgccggaaaagggaaaatatgtcagatggtgataccagtgcaactgagagtggtgatgaggttcctgtggaattatatactgcatttcagcatactccaacatcaattactttaactgcttcaagagtttccaaagttaatgataaaagaaggaaaaaaagcggggagaaagaacaacacatttcaaaatgtaaaaaggcatttcgtgaaggatctaggaagtcatcaagagttaagggttcagctccagagattgatccttcatctgatggttcaaattttggatgggagacaaagatcaaagcatggatggatcgatatgaagaagcaaataacaaccagtacagtgagggtgttcagagggaggcacaaagaatagctctgagattaggcaatggaaatgacaaaaaagagatgaataaatccgatttgaataccaacaatttgctcttcaaacctcctgtagagagccatatacaaaagaataagaaaattcttaaatctgcaaaagatttgcctcctgatgcacttatcattgaatacagagggaagtttatgctgagagaacagtttgaagcaaatgggtatttctttaaaagaccatacccttttgtgttattctactctaaatttcatgggctagaaatgtgtgttgatgcaaggacttttgggaatgaggctcgattcatcaggcggtcttgtacacccaatgcagaggtgaggcatgaaattcaagatggaaccatacatctttatatttattctatacacagtattccaaagggaactgaaattactattgcctttgattttgactatggaaattgtaagtacaaggtggactgtgcatgcctcaaagaaaacccagagtgccctgttctaaaacgtagttctgaatccatggaaaatatcaatagtggttatgagaccagacggaaaaaaggaaaaaaagacaaagatatttcaaaagaaaaagatacacaaaatcagaatattactttggattgtgaaggaacgaccaacaaaatgaagagcccagaaactaaacaaagaaagctttctccactgagactatcagtatcaaataatcaggaaccagattttattgatgatatagaagaaaaaactcctattagtaatgaagtagaaatggaatcagaggagcagattgcagaaaggaaaaggaagatgacaagagaagaaagaaaaatggaagcaattttgcaagcttttgccagacttgaaaagagagagaaaagaagagaacaagctttggaaaggatcagcacagccaaaactgaagttaaaactgaatgtaaagatacacagattgtcagtgatgctgaagttattcaggaacaagcaaaagaagaaaatgctagcaagccaacccctgccaaagtaaatagaactaaacagagaaaaagtttttctcggagtaggactcacattggacagcagcgtcggagacacagaactgtcagcatgtgttcagatatccagccatcttctcctgatatagaagttacttcacaacaaaatgatattgaaaatactgtacttacaatagaaccagaaactgaaactgcactagcagaaataattactgaaactgaagttccagcacttaataaatgtcctaccaagtaccccaaaacaaagaagcacttggttaatgaatggttaagtgagaagaatgagaagacaggaaaaccttcagatggcctttcagaaaggcctctacgcataactacagatcctgaagtgttagctacacaactcaattctttaccaggtctcacttacagcccccatgtatactccactcctaagcattatattagatttacttcaccattcctttcagaaaaaaggagaagaaaagaacctactgaaaacatttctggttcatgcaagaagcgatggttgaaacaagctctggaagaagaaaattcagcaattttacatagatttaattcaccctgtcaagaaagatccagaagtcctgcagtcaatggtgaaaataaaagtccactactattaaatgacagctgttcccttccagatttaactacaccactaaaaaaacgaagattttatcagttgctagattcggtttactcagaaacctccacacc

SEQ ID NO: 452042 - DNA, 1283 bp, Homo sapiens
agcgggcgcgcggcgccgcgccgccgccgccattttcccagagcgagaggcagtgacactgagcgggcgcagggggccgagtcggagaccgtgccggagttcgggagcggcaacagagtgggcatagacactccgagcagcctcgccgtcgtctctgcgttcctgttgactgcctggctgccccctcccctactcctcggttcctggtgaagaggctgcgcgctgctgtttggggagggggtgtgtggagccgggtcctgtgtccgcagtggctgctgtcggggggtcgcctgttcgcggaggtgcggagagactccttgggggtcgagcacataacggggttcgggtgtctcgtgtgtgaacatcacagggtttgtggatgcacttagatgtttgcaatgagcactgtggctggcatgccccagtgttttggataccaatgcataggactccatagtaatcgaatttaccagaggcgaacgtcatgagcatagtgatcccattgggggttgatacagcagagacgtcatacttggaaatggctgcaggttcagaaccagaatccgtagaagctagccctgtggtagttgagaaatccaacagttatccccaccagttatataccagcagctcacatcattcacacagttacattggtttgccctatgcggaccataattatggtgctcgtcctcctccgacacctccggcttcccctcctccatcagtccttattagcaaaaatgaagtaggcatatttaccactcctaattttgatgaaacttccagtgctactacaatcagcacatctgaggatggaagttatggtactgatgtaaccaggtgcatatgtggttttacacatgatgatggatacatgatctgttgtgacaaatgcagcgtttggcaacatattgactgcatggggattgataggcagcatattcctgatacatatctatgtgaacgttgtcagcctaggaatttggataaagagagggcagtgctactacaacgccggaaaagggaaaatatgtcagatggtgataccagtgcaactgagagtggtgatgaggttcctgtggaattatatactgcatttcagcatactccaacatcaattactttaactgcttcaagagtttccaaagttaatgataaaagaagtataaagcgttgagctcacgctttatactttctcagcgctttatacttcctcacgctttatacttccgtattgattcagtataatattaagtatgcatggagaagtataagcgtga

SEQ ID NO: 452043 - DNA, 2147 bp, Homo sapiens
  misc_feature (17)..(17): n is a, c, g, or t
gacattctcatgcacancgagtgttcaacacaagaagcaagtccatttataggtagtccaagcaatatttgtgtgtgtgtgtgtgtgtgtgtgtaagtccgtaagtccagatactaaagctcagtttatgattttagggttcagctccagagattgatccttcatctgatggttcaaattttggatgggagacaaagatcaaagcatggatggatcgatatgaagaagcaaataacaaccagtacagtgagggtgttcagagggaggcacaaagaatagctctgagattaggcaatggaaatgacaaaaaagagatgaataaatccgatttgaataccaacaatttgctcttcaaacctcctgtagaggtaaatacatcatttgtccaaaaattgtaaagcagttttatattgtgaatttttagttaaactgaaaacaagcaagtttatttaatctcaacatttactctgattttagagccatatacaaaagaataagaaaattcttaaatctgcaaaagatttgcctcctgatgcacttatcattgaatacagagggaagtttatgctgagagaacagtttgaagcaaatgggtatttctttaaaagaccatacccttttgtgttattctactctaaatttcatgggctagaaatgtgtgttgatgcaaggacttttgggaatgaggctcgattcatcaggcggtcttgtacacccaatgcagaggtgaggcatgaaattcaagatggaaccatacatctttatatttattctatacacagtattccaaagggaactgaaattactattgcctttgattttgactatggaaattgtaagtacaaggtggactgtgcatgcctcaaagaaaacccagagtgccctgttctaaaacgtagttctgaatccatggaaaatatcaatagtggttatgagaccagacggaaaaaaggaaaaaaagacaaagatatttcaaaagaaaaagatacacaaaatcagaatattactttggattgtgaaggaacgaccaacaaaatgaagagcccagaaactaaacaaagaaagctttctccactgagactatcagtatcaaataatcaggaaccagattttattgatgatatagaagaaaaaactcctattagtaatgaagtagaaatggaatcagaggagcagattgcagaaaggaaaaggaagatgacaagagaagaaagaaaaatggaagcaattttgcaagcttttgccagacttgaaaagagagagaaaagaagagaacaagctttggaaaggatcagcacagccaaaactgaagttaaaactgaatgtaaagatacacagattgtcagtgatgctgaagttattcaggaacaagcaaaagaagaaaatgctagcaagccaacccctgccaaagtaaatagaactaaacagagaaaaagtttttctcggagtaggactcacattggacagcagcgtcggagacacagaactgtcagcatgtgttcagatatccagccatcttctcctgatatagaagttacttcacaacaaaatgatattgaaaatactgtacttacaatagaaccagaaactgaaactgcactagcagaaataattactgaaactgaagttccagcacttaataaatgtcctaccaagtaccccaaaacaaagaagcacttggttaatgaatggttaagtgagaagaatgagaagacaggaaaaccttcagatggcctttcagaaaggcctctacgcataactacagatcctgaagtgttagctacacaactcaattctttaccaggtctcacttacagcccccatgtatactccactcctaagcattatattagatttacttcaccattcctttcagaaaaaaggagaagaaaagaacctactgaaaacatttctggttcatgcaagaagcgatggttgaaacaagctctggaagaagaaaattcagcaattttacatagatttaattcaccctgtcaagaaagatccagaagtcctgcagtcaatggtgaaaataaaagtccactactattaaatgacagctgttcccttccagatttaactacaccactaaaaaaacgaagattttatcagttgctagattcggtttactcagaaacctccacacc

SEQ ID NO: 452044 - DNA, 1241 bp, Homo sapiens
agcgggcgcgcggcgccgcgccgccgccgccattttcccagagcgagaggcagtgacactgagcgggcgcagggggccgagtcggagaccgtgccggagttcgggagcggcaacagagtgggcatagacactccgagcagcctcgccgtcgtctctgcgttcctgttgactgcctggctgccccctcccctactcctcggttcctggtgaagaggctgcgcgctgctgtttggggagggggtgtgtggagccgggtcctgtgtccgcagtggctgctgtcggggggtcgcctgttcgcggaggtgcggagagactccttgggggtcgagcacataacggggttcgggtgtctcgtgtgtgaacatcacagggtttgtggatgcacttagatgtttgcaatgagcactgtggctggcatgccccagtgttttggataccaatgcataggactccatagtaatcgaatttaccagaggcgaacgtcatgagcatagtgatcccattgggggttgatacagcagagacgtcatacttggaaatggctgcaggttcagaaccagaatccgtagaagctagccctgtggtagttgagaaatccaacagttatccccaccagttatataccagcagctcacatcattcacacagttacattggtttgccctatgcggaccataattatggtgctcgtcctcctccgacacctccggcttcccctcctccatcagtccttattagcaaaaatgaagtaggcatatttaccactcctaattttgatgaaacttccagtgctactacaatcagcacatctgaggatggaagttatggtactgatgtaaccaggtgcatatgtggttttacacatgatgatggatacatgatctgttgtgacaaatgcagcgtttggcaacatattgactgcatggggattgataggcagcatattcctgatacatatctatgtgaacgttgtcagcctaggtaagttgcacatatctgataacattgccagtaattttactgaggtaatactagttaacagaaattcctttatgaattcgagttaaaaaattaatgaatcacagccgggcatggtggctcatgcctgtagtgccaactacttgggaggctgaggcaggaagattgcttgagcacaggagtttgaggctgcagtgagctttgattgtgccactgcactccagcctgggtgacagagcaaaacccagtctctttttttttta

SEQ ID NO: 452045 - DNA, 1791 bp, Homo sapiens
ttctacacctgacctcatatgataggtcacagtcaaagtgcagtcagaactttgtttcaggcacagaattagtaaatatattatataaaattacttttagcctatatgaaacatgagtgaattttgtgtttagacctgaatcccattccccaagatatctcattatatatatgcaaacattccaaaatccacaacccttctggtcctaagcatttcaggtaaggcatgcttaacctgtaccagttatacttatgattgaaggcctaatatctggtcagaaatcaacatctaattattatattattttaatgaaaaaaattttttgtggtagttaactaggaatgtaaattactaaaaaggattgcttataattaatagtaattgcatacaattttgtggagttgcagcttaaaatggattagaaaatttccagttttgttttatattttgaaataaatatttaactggttatctttccagtaagtacaaggtggactgtgcatgcctcaaagaaaacccagagtgccctgttctaaaacgtagttctgaatccatggaaaatatcaatagtggttatgagaccagacggaaaaaaggaaaaaaagacaaagatatttcaaaagaaaaagatacacaaaatcagaatattactttggattgtgaaggaacgaccaacaaaatgaagagcccagaaactaaacaaagaaagctttctccactgagactatcagtatcaaataatcaggaaccagattttattgatgatatagaagaaaaaactcctattagtaatgaagtagaaatggaatcagaggagcagattgcagaaaggaaaaggaagatgacaagagaagaaagaaaaatggaagcaattttgcaagcttttgccagacttgaaaagagagagaaaagaagagaacaagctttggaaaggatcagcacagccaaaactgaagttaaaactgaatgtaaagatacacagattgtcagtgatgctgaagttattcaggaacaagcaaaagaagaaaatgctagcaagccaacccctgccaaagtaaatagaactaaacagagaaaaagtttttctcggagtaggactcacattggacagcagcgtcggagacacagaactgtcagcatgtgttcagatatccagccatcttctcctgatatagaagttacttcacaacaaaatgatattgaaaatactgtacttacaatagaaccagaaactgaaactgcactagcagaaataattactgaaactgaagttccagcacttaataaatgtcctaccaagtaccccaaaacaaagaagcacttggttaatgaatggttaagtgagaagaatgagaagacaggaaaaccttcagatggcctttcagaaaggcctctacgcataactacagatcctgaagtgttagctacacaactcaattctttaccaggtctcacttacagcccccatgtatactccactcctaagcattatattagatttacttcaccattcctttcagaaaaaaggagaagaaaagaacctactgaaaacatttctggttcatgcaagaagcgatggttgaaacaagctctggaagaagaaaattcagcaattttacatagatttaattcaccctgtcaagaaagatccagaagtcctgcagtcaatggtgaaaataaaagtccactactattaaatgacagctgttcccttccagatttaactacaccactaaaaaaacgaagattttatcagttgctagattcggtttactcagaaacctccacacc

SEQ ID NO: 452046 - DNA, 423 bp, Homo sapiens
gaggctgaagtggagggatcacacctgagcccagggggcggaggcttcagtaagccgagactgcaccactgcactccagcctgatgacagagatatcttgtctcaaaaaaaaaagtaatacaaatttcatgtaatataaatatttaaaaagcaaccatatgttttgttctacaaaataattgggtaaaaagtttcagaataacagtagataactaagaaatgtaaaaggacatactgatattttgatcacatatgaatgatttaaattacccaatttatcattttagataatacaccaatttcaaatctggtattagaatattcaagggagaatttggaattacatatataatgatccaatttttttcttttctctagcacttggttaatgaatggttaagtgagaagaatgagaagacagga

SEQ ID NO: 452047 - DNA, 238 bp, Homo sapiens
ggggtaaaagtcataactgccattgtttatattttatctttcccagaatgtgacacaaacagattttaacaaatagcaacagtgtaatttcttacagattattatttcaccaacagatttaactacaccactaaaaaaacgaagattttatcagttgctagattcggtttactcagaaacctccacacctactccttccccgtatgctacaccaactcacaccgatattactcctatg

SEQ ID NO: 452048 - DNA, 524 bp, Homo sapiens
tatgtccagttttttaggaaactaactagaattccatgtttattttaggcatttcgtgaaggatctaggaagtcatcaagagttaaggtaaatacattaattttaaggtgttgttatcaactgtcatttattcaggagctacatgcttgcttgaccatatctttacttaatgctctgtttattgtgtgtcatgtctttgcctattatctttaccaggagtgggaccttagttctaattggagtaatatactactcttgtagttaacactgttaaaatattaatcaaaagggggaggtatataagcaatttctaattttataattttgggcaatttgaatttcctttattactataatccatgtctctgatgccagttagtattactatactgtacttaggaatgcagaatcacatttggaacttgaaaatttgcacttttgcatagttgggattctagagagttagtcaagtcagttgtcatactataaattcaccatagaacaaccaaatcaatacaaaccag

SEQ ID NO: 452049 - DNA, 706 bp, Homo sapiens
agcgggcgcgcggcgccgcgccgccgccgccattttcccagagcgagaggcagtgacactgagcgggcgcagggggccgagtcggagaccgtgccggagttcgggagcggcaacagagtgggcatagacactccgagcagcctcgccgtcgtctctgcgttcctgttgactgcctggctgccccctcccctactcctcggttcctggtgaagaggctgcgcgctgctgtttggggagggggtgtgtggagccgggtcctgtgtccgcagtggctgctgtcggggggtcgcctgttcgcggaggtgcggagagactccttgggggtcgagcacataacggggttcgggtgtctcgtgtgtgaacatcacagggtttgtggatgcacttagatgtttgcaatgagcactgtggctggcatgccccagtgttttggataccaatgcataggactccatagtaatcgaatttaccagaggcgaacgtcatgagcatagtgatcccattgggggttgatacagcagagacgtcatacttggaaatggctgcaggttcagagtaagtatttaaattggttacataagcaaaaaaaaaaaaaaacccttctggagctagaaagtaggaagaagtataagtggaaaatattaaatttcttctttcctagccattttttaaagtaaaaaaaaaaaaagcgaagttacctttcttt

SEQ ID NO: 452050 - DNA, 2682 bp, Homo sapiens
agcgggcgcgcggcgccgcgccgccgccgccattttcccagagcgagaggcagtgacactgagcgggcgcagggggccgagtcggagaccgtgccggagttcgggagcggcaacagagtgggcatagacactccgagcagcctcgccgtcgtctctgcgttcctgttgactgcctggctgccccctcccctactcctcggttcctggtgaagaggctgcgcgctgctgtttggggagggggtgtgtggagccgggtcctgtgtccgcagtggctgctgtcggggggtcgcctgttcgcggaggtgcggagagactccttgggggtcgagcacataacggggttcgggtgtctcgtgtgtgaacatcacaggtctattctggataagcaggttttgtgaagacatttattctttcttggacctcagatttaccagacatctcatgggtttgtggatgcacttagatgtttgcaatgagcactgtggctggcatgccccagtgttttggataccaatgcataggactccatagtaatcgaatttaccagaggcgaacgtcatgagcatagtgatcccattgggggttgatacagcagagacgtcatacttggaaatggctgcaggttcagaaccagaatccgtagaagctagccctgtggtagttgagaaatccaacagttatccccaccagttatataccagcagctcacatcattcacacagttacattggtttgccctatgcggaccataattatggtgctcgtcctcctccgacacctccggcttcccctcctccatcagtccttattagcaaaaatgaagtaggcatatttaccactcctaattttgatgaaacttccagtgctactacaatcagcacatctgaggatggaagttatggtactgatgtaaccaggtgcatatgtggttttacacatgatgatggatacatgatctgttgtgacaaatgcagcgtttggcaacatattgactgcatggggattgataggcagcatattcctgatacatatctatgtgaacgttgtcagcctaggaatttggataaagagagggcagtgctactacaacgccggaaaagggaaaatatgtcagatggtgataccagtgcaactgagagtggtgatgaggttcctgtggaattatatactgcatttcagcatactccaacatcaattactttaactgcttcaagagtttccaaagttaatgataaaagaaggaaaaaaagcggggagaaagaacaacacatttcaaaatgtaaaaaggcatttcgtgaaggatctaggaagtcatcaagagttaagggttcagctccagagattgatccttcatctgatggttcaaattttggatgggagacaaagatcaaagcatggatggatcgatatgaagaagcaaataacaaccagtacagtgagggtgttcagagggaggcacaaagaatagctctgagattaggcaatggaaatgacaaaaaagagatgaataaatccgatttgaataccaacaatttgctcttcaaacctcctgtagagagccatatacaaaagaataagaaaattcttaaatctgcaaaagatttgcctcctgatgcacttatcattgaatacagagggaagtttatgctgagagaacagtttgaagcaaatgggtatttctttaaaagaccatacccttttgtgttattctactctaaatttcatgggctagaaatgtgtgttgatgcaaggacttttgggaatgaggctcgattcatcaggcggtcttgtacacccaatgcagaggtgaggcatgaaattcaagatggaaccatacatctttatatttattctatacacagtattccaaagggaactgaaattactattgcctttgattttgactatggaaattgtaagtacaaggtggactgtgcatgcctcaaagaaaacccagagtgccctgttctaaaacgtagttctgaatccatggaaaatatcaatagtggttatgagaccagacggaaaaaaggaaaaaaagacaaagatatttcaaaagaaaaagatacacaaaatcagaatattactttggattgtgaaggaacgaccaacaaaatgaagagcccagaaactaaacaaagaaagctttctccactgagactatcagtatcaaataatcaggaaccagattttattgatgatatagaagaaaaaactcctattagtaatgaagtagaaatggaatcagaggagcagattgcagaaaggaaaaggaagatggtaagttgggaagccagtagtttgggcttagtgacagctgctctgcatatggtaattgttgctgcctttacatgggcttttacattattctttgaagttagcgaatgatgtgccattgagcatttttatttggtttggtcattgccatttaaataaattccattaatcttgtatttttattggttgttcattagagatttaagaatgtatgacatttaagaaatatgaacattttggaagtaataatattttaataatgccacactgaactattaataaattttaatgccacaattactgttcagaatgtcttttattagctaaatgtatcctctcatgatttgaaatataataaaagtacaaatttaaaccttactatagcaccaaataaattgcttatgc

SEQ ID NO: 452051 - DNA, 2370 bp, Homo sapiens
  misc_feature (2354)..(2354): n is a, c, g, or t
agcgggcgcgcggcgccgcgccgccgccgccattttcccagagcgagaggcagtgacactgagcgggcgcagggggccgagtcggagaccgtgccggagttcgggagcggcaacagagtgggcatagacactccgagcagcctcgccgtcgtctctgcgttcctgttgactgcctggctgccccctcccctactcctcggttcctggtgaagaggctgcgcgctgctgtttggggagggggtgtgtggagccgggtcctgtgtccgcagtggctgctgtcggggggtcgcctgttcgcggaggtgcggagagactccttgggggtcgagcacataacggggttcgggtgtctcgtgtgtgaacatcacaggtctattctggataagcaggttttgtgaagacatttattctttcttggacctcagatttaccagacatctcatgggtttgtggatgcacttagatgtttgcaatgagcactgtggctggcatgccccagtgttttggataccaatgcataggactccatagtaatcgaatttaccagaggcgaacgtcatgagcatagtgatcccattgggggttgatacagcagagacgtcatacttggaaatggctgcaggttcagaaccagaatccgtagaagctagccctgtggtagttgagaaatccaacagttatccccaccagttatataccagcagctcacatcattcacacagttacattggtttgccctatgcggaccataattatggtgctcgtcctcctccgacacctccggcttcccctcctccatcagtccttattagcaaaaatgaagtaggcatatttaccactcctaattttgatgaaacttccagtgctactacaatcagcacatctgaggatggaagttatggtactgatgtaaccaggtgcatatgtggttttacacatgatgatggatacatgatctgttgtgacaaatgcagcgtttggcaacatattgactgcatggggattgataggcagcatattcctgatacatatctatgtgaacgttgtcagcctaggaatttggataaagagagggcagtgctactacaacgccggaaaagggaaaatatgtcagatggtgataccagtgcaactgagagtggtgatgaggttcctgtggaattatatactgcatttcagcatactccaacatcaattactttaactgcttcaagagtttccaaagttaatgataaaagaaggaaaaaaagcggggagaaagaacaacacatttcaaaatgtaaaaaggcatttcgtgaaggatctaggaagtcatcaagagttaagggttcagctccagagattgatccttcatctgatggttcaaattttggatgggagacaaagatcaaagcatggatggatcgatatgaagaagcaaataacaaccagtacagtgagggtgttcagagggaggcacaaagaatagctctgagattaggcaatggaaatgacaaaaaagagatgaataaatccgatttgaataccaacaatttgctcttcaaacctcctgtagagagccatatacaaaagaataagaaaattcttaaatctgcaaaagatttgcctcctgatgcacttatcattgaatacagagggaagtttatgctgagagaacagtttgaagcaaatgggtatttctttaaaagaccatacccttttgtgttattctactctaaatttcatgggctagaaatgtgtgttgatgcaaggacttttgggaatgaggctcgattcatcaggcggtcttgtacacccaatgcagaggtgaggcatgaaattcaagatggaaccatacatctttatatttattctatacacagtattccaaagggaactgaaattactattgcctttgattttgactatggaaattgtaagtacaaggtggactgtgcatgcctcaaagaaaacccagagtgccctgttctaaaacgtagttctgaatccatggaaaatatcaatagtggttatgagaccagacggaaaaaaggaaaaaaagacaaagatatttcaaaagaaaaagatacacaaaatcagaatattactttggattgtgaaggaacgaccaacaaaatgaagagcccagaaactaaacaaagaaagctttctccactgagactatcagtatcaaataatcaggaaccagattttattgatgatatagaagaaaaaactcctattagtaatgaagtagaaatggaatcagaggagcagattgcagaaaggaaaaggaagatgacaagagaagaaagaaaaatggaagcaattttgcaagcttttgccagacttgaaaagagaaatttagagaaggnactggggatcctctag

SEQ ID NO: 452052 - DNA, 3078 bp, Homo sapiens
agcgggcgcgcggcgccgcgccgccgccgccattttcccagagcgagaggcagtgacactgagcgggcgcagggggccgagtcggagaccgtgccggagttcgggagcggcaacagagtgggcatagacactccgagcagcctcgccgtcgtctctgcgttcctgttgactgcctggctgccccctcccctactcctcggttcctggtgaagaggctgcgcgctgctgtttggggagggggtgtgtggagccgggtcctgtgtccgcagtggctgctgtcggggggtcgcctgttcgcggaggtgcggagagactccttgggggtcgacactgtggctggcatgccccagtgttttggataccaatgcataggactccatagtaatcgaatttaccagaggcgaacgtcatgagcatagtgatcccattgggggttgatacagcagagacgtcatacttggaaatggctgcaggttcagaaccagaatccgtagaagctagccctgtggtagttgagaaatccaacagttatccccaccagttatataccagcagctcacatcattcacacagttacattggtttgccctatgcggaccataattatggtgctcgtcctcctccgacacctccggcttcccctcctccatcagtccttattagcaaaaatgaagtaggcatatttaccactcctaattttgatgaaacttccagtgctactacaatcagcacatctgaggatggaagttatggtactgatgtaaccaggtgcatatgtggttttacacatgatgatggatacatgatctgttgtgacaaatgcagcgtttggcaacatattgactgcatggggattgataggcagcatattcctgatacatatctatgtgaacgttgtcagcctaggaatttggataaagagagggcagtgctactacaacgccggaaaagggaaaatatgtcagatggtgataccagtgcaactgagagtggtgatgaggttcctgtggaattatatactgcatttcagcatactccaacatcaattactttaactgcttcaagagtttccaaagttaatgataaaagaaggaaaaaaagcggggagaaagaacaacacatttcaaaatgtaaaaaggcatttcgtgaaggatctaggaagtcatcaagagttaagggttcagctccagagattgatccttcatctgatggttcaaattttggatgggagacaaagatcaaagcatggatggatcgatatgaagaagcaaataacaaccagtacagtgagggtgttcagagggaggcacaaagaatagctctgagattaggcaatggaaatgacaaaaaagagatgaataaatccgatttgaataccaacaatttgctcttcaaacctcctgtagagagccatatacaaaagaataagaaaattcttaaatctgcaaaagatttgcctcctgatgcacttatcattgaatacagagggaagtttatgctgagagaacagtttgaagcaaatgggtatttctttaaaagaccatacccttttgtgttattctactctaaatttcatgggctagaaatgtgtgttgatgcaaggacttttgggaatgaggctcgattcatcaggcggtcttgtacacccaatgcagaggtgaggcatgaaattcaagatggaaccatacatctttatatttattctatacacagtattccaaagggaactgaaattactattgcctttgattttgactatggaaattgtaagtacaaggtggactgtgcatgcctcaaagaaaacccagagtgccctgttctaaaacgtagttctgaatccatggaaaatatcaatagtggttatgagaccagacggaaaaaaggaaaaaaagacaaagatatttcaaaagaaaaagatacacaaaatcagaatattactttggattgtgaaggaacgaccaacaaaatgaagagcccagaaactaaacaaagaaagctttctccactgagactatcagtatcaaataatcaggaaccagattttattgatgatatagaagaaaaaactcctattagtaatgaagtagaaatggaatcagaggagcagattgcagaaaggaaaaggaagatgacaagagaagaaagaaaaatggaagcaattttgcaagcttttgccagacttgaaaagagagagaaaagaagagaacaagctttggaaaggatcagcacagccaaaactgaagttaaaactgaatgtaaagatacacagattgtcagtgatgctgaagttattcaggaacaagcaaaagaagaaaatgctagcaagccaacccctgccaaagtaaatagaactaaacagagaaaaagtttttctcggagtaggactcacattggacagcagcgtcggagacacagaactgtcagcatgtgttcagatatccagccatcttctcctgatatagaagttacttcacaacaaaatgatattgaaaatactgtacttacaatagaaccagaaactgaaactgcactagcagaaataattactgaaactgaagttccagcacttaataaatgtcctaccaagtaccccaaaacaaagaagcacttggttaatgaatggttaagtgagaagaatgagaagacaggaaaaccttcagatggcctttcagaaaggcctctacgcataactacagatcctgaagtgttagctacacaactcaattctttaccaggtctcacttacagcccccatgtatactccactcctaagcattatattagatttacttcaccattcctttcagaaaaaaggagaagaaaagaacctactgaaaacatttctggttcatgcaagaagcgatggttgaaacaagctctggaagaagaaaattcagcaattttacatagatttaattcaccctgtcaagaaagatccagaagtcctgcagtcaatggtgaaaataaaagtccactactattaaatgacagctgttcccttccagatttaactacaccactaaaaaaacgaagattttatcagttgctagattcggtttactcagaaacctccacacc

SEQ ID NO: 452053 - DNA, 4128 bp, Homo sapiens
ctatcttacccaagctactcctgaactccaggcttcaagtgaccctcctgtctcagactcccaaagtgttgagatcataggcatgagccaccacacccagcccttattttctatgtttagatgtgtttagatacagaatacttagcattgtgttacctacaatattcagtgcattgtgttacctacgatattcagcgcataacatgctgtatagatttgtagcctaggagcaatagttatgccatttagcctaggtgtatagtaggctataccatctaggtttgtgtaaagtacactctatcatgttcacacaacggtgaaatcacctaatgatgtatttctcagaatgtatctccaatgttaagcaaagcatgactatattcagaacataatggagactcttcacaatctcctttagaaccattagataacctcagtttgtatctcctctttttgctgattctggcacacagcgcttacaacagcagccactgagagctaaattgagacttcgtgaagggatgacagtatattaagaagcagttgactgtaaaaaatgttttttatgctgctagtctcatgactaatcagaatataaccactaaatatccttaaactaaataatagtgcaaatagtactaagttctaatgtaaagttttaataggaggtaggataaagattgtcatgaaaaatttttcaagtgatgttatagttttgtaaaataaaggcacagaaacaaatcatgttattgagtatttgcaagggagagattaattttagtgtgaactgacctcagatgtaggttcacaaccttgttgatcaataggaattaaccaagtagagctcaggaggattggtaagagtaaagaagttgggaaagtgatgtatgtaaaatgctaggccagggagcttgtaagtcaacaacagtgggcaaattgtatcagtagttgatcagtctccatcatctaagaccagaattgctcatcttacagatagctgtttatgttttttttcaggtataaatcctggtttattttgaaacttcctattacttaagtttactgacatttccaaggctttattatattaatatctggtcacactcaacacatgcatatatttttgaacactgaaatgcatacttcagttccatttgaggtccatatagattctgtgtgttttagtcttgcttaaattatttctactacttctttgcacccctttgctagttttctcagtgccgtagggtttattaaataataattggactctagtaattttttttaatgagagagagggaaactatatttgaaattggattgggacatttattttacttaaacagaagtttgcttatgacacataatctagatgggatatatcttatctatagtgtatccacctgctgtaagtagatactgtatttgtatagccattattttgctgtaagtactttatcattttaattaaattgattaagaggaaaaaaaaagaatggaattctctttgatgcaactttttccccccagaccagaatccgtagaagctagccctgtggtagttgagaaatccaacagttatccccaccagttatataccagcagctcacatcattcacacagttacattggtttgccctatgcggaccataattatggtgctcgtcctcctccgacacctccggcttcccctcctccatcagtccttattagcaaaaatgaagtaggcatatttaccactcctaattttgatgaaacttccagtgctactacaatcagcacatctgaggatggaagttatggtactgatgtaaccaggtgcatatgtggttttacacatgatgatggatacatgatctgttgtgacaaatgcagcgtttggcaacatattgactgcatggggattgataggcagcatattcctgatacatatctatgtgaacgttgtcagcctaggaatttggataaagagagggcagtgctactacaacgccggaaaagggaaaatatgtcagatggtgataccagtgcaactgagagtggtgatgaggttcctgtggaattatatactgcatttcagcatactccaacatcaattactttaactgcttcaagagtttccaaagttaatgataaaagaaggaaaaaaagcggggagaaagaacaacacatttcaaaatgtaaaaaggcatttcgtgaaggatctaggaagtcatcaagagttaagggttcagctccagagattgatccttcatctgatggttcaaattttggatgggagacaaagatcaaagcatggatggatcgatatgaagaagcaaataacaaccagtacagtgagggtgttcagagggaggcacaaagaatagctctgagattaggcaatggaaatgacaaaaaagagatgaataaatccgatttgaataccaacaatttgctcttcaaacctcctgtagagagccatatacaaaagaataagaaaattcttaaatctgcaaaagatttgcctcctgatgcacttatcattgaatacagagggaagtttatgctgagagaacagtttgaagcaaatgggtatttctttaaaagaccatacccttttgtgttattctactctaaatttcatgggctagaaatgtgtgttgatgcaaggacttttgggaatgaggctcgattcatcaggcggtcttgtacacccaatgcagaggtgaggcatgaaattcaagatggaaccatacatctttatatttattctatacacagtattccaaagggaactgaaattactattgcctttgattttgactatggaaattgtaagtacaaggtggactgtgcatgcctcaaagaaaacccagagtgccctgttctaaaacgtagttctgaatccatggaaaatatcaatagtggttatgagaccagacggaaaaaaggaaaaaaagacaaagatatttcaaaagaaaaagatacacaaaatcagaatattactttggattgtgaaggaacgaccaacaaaatgaagagcccagaaactaaacaaagaaagctttctccactgagactatcagtatcaaataatcaggaaccagattttattgatgatatagaagaaaaaactcctattagtaatgaagtagaaatggaatcagaggagcagattgcagaaaggaaaaggaagatgacaagagaagaaagaaaaatggaagcaattttgcaagcttttgccagacttgaaaagagagagaaaagaagagaacaagctttggaaaggatcagcacagccaaaactgaagttaaaactgaatgtaaagatacacagattgtcagtgatgctgaagttattcaggaacaagcaaaagaagaaaatgctagcaagccaacccctgccaaagtaaatagaactaaacagagaaaaagtttttctcggagtaggactcacattggacagcagcgtcggagacacagaactgtcagcatgtgttcagatatccagccatcttctcctgatatagaagttacttcacaacaaaatgatattgaaaatactgtacttacaatagaaccagaaactgaaactgcactagcagaaataattactgaaactgaagttccagcacttaataaatgtcctaccaagtaccccaaaacaaagaagcacttggttaatgaatggttaagtgagaagaatgagaagacaggaaaaccttcagatggcctttcagaaaggcctctacgcataactacagatcctgaagtgttagctacacaactcaattctttaccaggtctcacttacagcccccatgtatactccactcctaagcattatattagatttacttcaccattcctttcagaaaaaaggagaagaaaagaacctactgaaaacatttctggttcatgcaagaagcgatggttgaaacaagctctggaagaagaaaattcagcaattttacatagatttaattcaccctgtcaagaaagatccagaagtcctgcagtcaatggtgaaaataaaagtccactactattaaatgacagctgttcccttccagatttaactacaccactaaaaaaacgaagattttatcagttgctagattcggtttactcagaaacctccacacc

SEQ ID NO: 452054 - DNA, 2995 bp, Homo sapiens
cttcagattgggtaccaccgtatccctcacaagctacacatcataccactttgggaccgggaccccagcaccagccttctggaacagggccacattgtccattacctgtcacaggtcctcatctccagccccaaggaccaaacagtattccaacacctactgcctcagcgtcctgagtagctgggattacaggcacatgccaccaagcccagggtttgtggatgcacttagatgtttgcaatgagcactgtggctggcatgccccagtgttttggataccaatgcataggactccatagtaatcgaatttaccagaggcgaacgtcatgagcatagtgatcccattgggggttgatacagcagagacgtcatacttggaaatggctgcaggttcagaaccagaatccgtagaagctagccctgtggtagttgagaaatccaacagttatccccaccagttatataccagcagctcacatcattcacacagttacattggtttgccctatgcggaccataattatggtgctcgtcctcctccgacacctccggcttcccctcctccatcagtccttattagcaaaaatgaagtaggcatatttaccactcctaattttgatgaaacttccagtgctactacaatcagcacatctgaggatggaagttatggtactgatgtaaccaggtgcatatgtggttttacacatgatgatggatacatgatctgttgtgacaaatgcagcgtttggcaacatattgactgcatggggattgataggcagcatattcctgatacatatctatgtgaacgttgtcagcctaggaatttggataaagagagggcagtgctactacaacgccggaaaagggaaaatatgtcagatggtgataccagtgcaactgagagtggtgatgaggttcctgtggaattatatactgcatttcagcatactccaacatcaattactttaactgcttcaagagtttccaaagttaatgataaaagaaggaaaaaaagcggggagaaagaacaacacatttcaaaatgtaaaaaggcatttcgtgaaggatctaggaagtcatcaagagttaagggttcagctccagagattgatccttcatctgatggttcaaattttggatgggagacaaagatcaaagcatggatggatcgatatgaagaagcaaataacaaccagtacagtgagggtgttcagagggaggcacaaagaatagctctgagattaggcaatggaaatgacaaaaaagagatgaataaatccgatttgaataccaacaatttgctcttcaaacctcctgtagagagccatatacaaaagaataagaaaattcttaaatctgcaaaagatttgcctcctgatgcacttatcattgaatacagagggaagtttatgctgagagaacagtttgaagcaaatgggtatttctttaaaagaccatacccttttgtgttattctactctaaatttcatgggctagaaatgtgtgttgatgcaaggacttttgggaatgaggctcgattcatcaggcggtcttgtacacccaatgcagaggtgaggcatgaaattcaagatggaaccatacatctttatatttattctatacacagtattccaaagggaactgaaattactattgcctttgattttgactatggaaattgtaagtacaaggtggactgtgcatgcctcaaagaaaacccagagtgccctgttctaaaacgtagttctgaatccatggaaaatatcaatagtggttatgagaccagacggaaaaaaggaaaaaaagacaaagatatttcaaaagaaaaagatacacaaaatcagaatattactttggattgtgaaggaacgaccaacaaaatgaagagcccagaaactaaacaaagaaagctttctccactgagactatcagtatcaaataatcaggaaccagattttattgatgatatagaagaaaaaactcctattagtaatgaagtagaaatggaatcagaggagcagattgcagaaaggaaaaggaagatgacaagagaagaaagaaaaatggaagcaattttgcaagcttttgccagacttgaaaagagagagaaaagaagagaacaagctttggaaaggatcagcacagccaaaactgaagttaaaactgaatgtaaagatacacagattgtcagtgatgctgaagttattcaggaacaagcaaaagaagaaaatgctagcaagccaacccctgccaaagtaaatagaactaaacagagaaaaagtttttctcggagtaggactcacattggacagcagcgtcggagacacagaactgtcagcatgtgttcagatatccagccatcttctcctgatatagaagttacttcacaacaaaatgatattgaaaatactgtacttacaatagaaccagaaactgaaactgcactagcagaaataattactgaaactgaagttccagcacttaataaatgtcctaccaagtaccccaaaacaaagaagcacttggttaatgaatggttaagtgagaagaatgagaagacaggaaaaccttcagatggcctttcagaaaggcctctacgcataactacagatcctgaagtgttagctacacaactcaattctttaccaggtctcacttacagcccccatgtatactccactcctaagcattatattagatttacttcaccattcctttcagaaaaaaggagaagaaaagaacctactgaaaacatttctggttcatgcaagaagcgatggttgaaacaagctctggaagaagaaaattcagcaattttacatagatttaattcaccctgtcaagaaagatccagaagtcctgcagtcaatggtgaaaataaaagtccactactattaaatgacagctgttcccttccagatttaactacaccactaaaaaaacgaagattttatcagttgctagattcggtttactcagaaacctccacacc

SEQ ID NO: 452055 - DNA, 3045 bp, Homo sapiens
gtctctactataaatacaaaattagccaggtgtggtagcacatgcccggaaccccagctacttgggaggctgaggcagggaatcgcttgaaccaggaggcagaggttgcagtgagccaagattgcgccattgcactccagcctgggcaataagagcgaaactccatctcaaaaaaaaagcagtatttatttcaaaagtgaaaataattaaaggcaatggtaataatggaatagattcaattcagtgtcatacatttgctttaagaaatttaatttatgattttaattacattgttaacattatgggtttttttttttcagactttttgctttaaatattctgtttgaaaaaaatactggtttcctaagtaaattattttcttggccattcactgtggctcacatctgtgatcccagctctttgggaggcaggggtgggaggatcacttgatccaggagttcaagaccagcctgggtaacccatctctacaaaaaattaaaaaattagcccggcatgatggtgcaggcctgtagtctcagctactcaggaggctgaggcaggaggatcccttgaacctggaaggttgaggctgcagcaaactgtgattgcatcactgcactccagcctgggtgatagggtgagaccctgtctggggaaaaaaaaaaaaaaaaaaatcagagtgaaatggagtcatctatctggcatctactgctactattagactgtatgtaaactgtattgcaagggattttgtatatattttatactgttggtttttcactgagaacattaaataaattaaaaagtttatcacatttaagacagatctgcttcatgtatttgataaataattatgctaattttttaatgtaggaatttggataaagagagggcagtgctactacaacgccggaaaagggaaaatatgtcagatggtgataccagtgcaactgagagtggtgatgaggttcctgtggaattatatactgcatttcagcatactccaacatcaattactttaactgcttcaagagtttccaaagttaatgataaaagaaggaaaaaaagcggggagaaagaacaacacatttcaaaatgtaaaaaggcatttcgtgaaggatctaggaagtcatcaagagttaagggttcagctccagagattgatccttcatctgatggttcaaattttggatgggagacaaagatcaaagcatggatggatcgatatgaagaagcaaataacaaccagtacagtgagggtgttcagagggaggcacaaagaatagctctgagattaggcaatggaaatgacaaaaaagagatgaataaatccgatttgaataccaacaatttgctcttcaaacctcctgtagagagccatatacaaaagaataagaaaattcttaaatctgcaaaagatttgcctcctgatgcacttatcattgaatacagagggaagtttatgctgagagaacagtttgaagcaaatgggtatttctttaaaagaccatacccttttgtgttattctactctaaatttcatgggctagaaatgtgtgttgatgcaaggacttttgggaatgaggctcgattcatcaggcggtcttgtacacccaatgcagaggtgaggcatgaaattcaagatggaaccatacatctttatatttattctatacacagtattccaaagggaactgaaattactattgcctttgattttgactatggaaattgtaagtacaaggtggactgtgcatgcctcaaagaaaacccagagtgccctgttctaaaacgtagttctgaatccatggaaaatatcaatagtggttatgagaccagacggaaaaaaggaaaaaaagacaaagatatttcaaaagaaaaagatacacaaaatcagaatattactttggattgtgaaggaacgaccaacaaaatgaagagcccagaaactaaacaaagaaagctttctccactgagactatcagtatcaaataatcaggaaccagattttattgatgatatagaagaaaaaactcctattagtaatgaagtagaaatggaatcagaggagcagattgcagaaaggaaaaggaagatgacaagagaagaaagaaaaatggaagcaattttgcaagcttttgccagacttgaaaagagagagaaaagaagagaacaagctttggaaaggatcagcacagccaaaactgaagttaaaactgaatgtaaagatacacagattgtcagtgatgctgaagttattcaggaacaagcaaaagaagaaaatgctagcaagccaacccctgccaaagtaaatagaactaaacagagaaaaagtttttctcggagtaggactcacattggacagcagcgtcggagacacagaactgtcagcatgtgttcagatatccagccatcttctcctgatatagaagttacttcacaacaaaatgatattgaaaatactgtacttacaatagaaccagaaactgaaactgcactagcagaaataattactgaaactgaagttccagcacttaataaatgtcctaccaagtaccccaaaacaaagaagcacttggttaatgaatggttaagtgagaagaatgagaagacaggaaaaccttcagatggcctttcagaaaggcctctacgcataactacagatcctgaagtgttagctacacaactcaattctttaccaggtctcacttacagcccccatgtatactccactcctaagcattatattagatttacttcaccattcctttcagaaaaaaggagaagaaaagaacctactgaaaacatttctggttcatgcaagaagcgatggttgaaacaagctctggaagaagaaaattcagcaattttacatagatttaattcaccctgtcaagaaagatccagaagtcctgcagtcaatggtgaaaataaaagtccactactattaaatgacagctgttcccttccagatttaactacaccactaaaaaaacgaagattttatcagttgctagattcggtttactcagaaacctccacacc

SEQ ID NO: 452056 - DNA, 1382 bp, Homo sapiens
agcgggcgcgcggcgccgcgccgccgccgccattttcccagagcgagaggcagtgacactgagcgggcgcagggggccgagtcggagaccgtgccggagttcgggagcggcaacagagtgggcatagacactccgagcagcctcgccgtcgtctctgcgttcctgttgactgcctggctgccccctcccctactcctcggttcctggtgaagaggctgcgcgctgctgtttggggagggggtgtgtggagccgggtcctgtgtccgcagtggctgctgtcggggggtcgcctgttcgcggaggtgcggagagactccttgggggtcgagcacataacggggttcgggtgtctcgtgtgtgaacatcacagggtttgtggatgcacttagatgtttgcaatgagcactgtggctggcatgccccagtgttttggataccaatgcataggactccatagtaatcgaatttaccagaggcgaacgtcatgagcatagtgatcccattgggggttgatacagcagagacgtcatacttggaaatggctgcaggttcagaaccagaatccgtagaagctagccctgtggtagttgagaaatccaacagttatccccaccagttatataccagcagctcacatcattcacacagttacattggtttgccctatgcggaccataattatggtgctcgtcctcctccgacacctccggcttcccctcctccatcagtccttattagcaaaaatgaagtaggcatatttaccactcctaattttgatgaaacttccagtgctactacaatcagcacatctgaggatggaagttatggtactgatgtaaccaggtgcatatgtggttttacacatgatgatggatacatgatctgttgtgacaaatgcaggtaaaatattttacaccattattttatttttcttgaatgctgataacctttggtaatgttggaaaagataactaaagtcactttcaagggaattaatggatacatattttaagtgggacttctactattgatgcagtcctagaaaaagcctcctatgtgaaaaaagagtttactagaaatccctgttgttaactgagtaatagacagtcagttctgaactttttttcatgtaggatcacatttttctgttcacttagttcaatagtagtacaagtacataaacatagcagtagacaagatagaaatgagagaatttagtcttttgtatttcctttggaataatttgtgcttagtcaactgtgattttccagtttgcggaaattaaacattttcattgatgtttgtttgacctgactctctcacctccttttgacttgaaccttgcagcactctggagtctccttgaaccagaaccacagtct

SEQ ID NO: 452057 - DNA, 1734 bp, Homo sapiens
agcgggcgcgcggcgccgcgccgccgccgccattttcccagagcgagaggcagtgacactgagcgggcgcagggggccgagtcggagaccgtgccggagttcgggagcggcaacagagtgggcatagacactccgagcagcctcgccgtcgtctctgcgttcctgttgactgcctggctgccccctcccctactcctcggttcctggtgaagaggctgcgcgctgctgtttggggagggggtgtgtggagccgggtcctgtgtccgcagtggctgctgtcggggggtcgcctgttcgcggaggtgcggagagactccttgggggtcgagcacataacggggttcgggtgtctcgtgtgtgaacatcacagggtttgtggatgcacttagatgtttgcaatgagcactgtggctggcatgccccagtgttttggataccaatgcataggactccatagtaatcgaatttaccagaggcgaacgtcatgagcatagtgatcccattgggggttgatacagcagagaccagacggaaaaaaggaaaaaaagacaaagatatttcaaaagaaaaagatacacaaaatcagaatattactttggattgtgaaggaacgaccaacaaaatgaagagcccagaaactaaacaaagaaagctttctccactgagactatcagtatcaaataatcaggaaccagattttattgatgatatagaagaaaaaactcctattagtaatgaagtagaaatggaatcagaggagcagattgcagaaaggaaaaggaagatgacaagagaagaaagaaaaatggaagcaattttgcaagcttttgccagacttgaaaagagagagaaaagaagagaacaagctttggaaaggatcagcacagccaaaactgaagttaaaactgaatgtaaagatacacagattgtcagtgatgctgaagttattcaggaacaagcaaaagaagaaaatgctagcaagccaacccctgccaaagtaaatagaactaaacagagaaaaagtttttctcggagtaggactcacattggacagcagcgtcggagacacagaactgtcagcatgtgttcagatatccagccatcttctcctgatatagaagttacttcacaacaaaatgatattgaaaatactgtacttacaatagaaccagaaactgaaactgcactagcagaaataattactgaaactgaagttccagcacttaataaatgtcctaccaagtaccccaaaacaaagaagcacttggttaatgaatggttaagtgagaagaatgagaagacaggaaaaccttcagatggcctttcagaaaggcctctacgcataactacagatcctgaagtgttagctacacaactcaattctttaccaggtctcacttacagcccccatgtatactccactcctaagcattatattagatttacttcaccattcctttcagaaaaaaggagaagaaaagaacctactgaaaacatttctggttcatgcaagaagcgatggttgaaacaagctctggaagaagaaaattcagcaattttacatagatttaattcaccctgtcaagaaagatccagaagtcctgcagtcaatggtgaaaataaaagtccactactattaaatgacagctgttcccttccagatttaactacaccactaaaaaaacgaagattttatcagttgctagattcggtttactcagaaacctccacacc

SEQ ID NO: 452058 - DNA, 1749 bp, Homo sapiens
gagcctgacttcagcgctcccactctcggccgacacccctcatggccaaccgttacaccatggatctgactgccatctacgagagcctcctgtcgctgagccctgacgtgcccgtgccatccgaccatggagggactgagtccagcccaggctggggctcctcgggaccctggagcctgagcccctccgactccagcccgtctggggtcacctcccgcctgcctggccgctccaccagcctagtggagggccgcagctgtggctgggtgcccccaccccctggcttcgcaccgctggctccccgcctgggccctgagctgtcaccctcacccacttcgcccactgcaacctccaccaccccctcgcgctacaagactgagctatgtcggaccttctcagagagtgggcgctgccgctacggggccaagtgccagtttgcccatggcctgggcgagctgcgccaggccaatcgccaccccaaatacaagacggaactctgtcacaagttctacctccagggccgctgcccctacggctctcgctgccacttcatccacaaccctagcgaagacctggcggccccgggccaccctcctgtgcttcgccagagcatcagcttctccggcctgccctctggccgccggacctcaccaccaccaccaggcctggccggcccttccctgtcctccagctccttctcgccctccagctccccaccaccacctggggaccttccactgtcaccctctgccttctctgctgcccctggcacccccctggctcgaagagaccccaccccagtctgttgcccctcctgccgaagggccactcctatcagcgtctgggggcccttgggtggcctggttcggaccccctctgtacagtccctgggatccgaccctgatgaatatgccagcagcggcagcagcctggggggctctgactctcccgtcttcgaggcgggagtttttgcaccaccccagcccgtggcagccccccggcgactccccatcttcaatcgcatctctgtttctgagtgacaaagtgactgcccggtcagatcagctggatctcagcggggagccacgtctcttgcactgtggtctctgcatggaccccagggctgtggggacttgggggacagtaatcaagtaatccccttttccagaatgcattaacccactcccctgacctcacgctggggcaggtccccaagtgtgcaagctcagtattcatgatggtgggggatggagtgtcttccgaggttcttgggggaaaaaaaattgtagcatatttaagggaggcaatgaaccctctcccccacctcttccctgcccaaatctgtctcctagaatcttatgtgctgtgaataataggccttcactgcccctccagtttttatagacctgaggttccagtgtctcctggtaactggaacctctcctgagggggaatcctggtgctcaaattaccctccaaaagcaagtagccaaagccgttgccaaaccccacccataaatcaatgggccctttatttatgacgactttatttattctaatatgattttatagtatttatatatattgggtcgtctgcttcccttgtatttttcttcctttttttgtaatattgaaaacgacgatataattattataagtagactataatatatttagtaatatatattattaccttaaaagtctatttttgtgttttgggcatttttaaataaacaatctgagtgtaaa

SEQ ID NO: 452059 - DNA, 135 bp, Homo sapiens
gcacgagctctctctctctctctctctctctctctctctctctctctcctataatatatttagtaatatatattattaccttaaaagtctatttttgtgttttgggcatttttaaataaacaatctgagtgtaaa

SEQ ID NO: 452060 - DNA, 2741 bp, Homo sapiens
  misc_feature (22)..(22): n is a, c, g, or t
ctacactgtcacacaaggcatngctcataaggaaaggttaaaaaaagtaaaaggaactcggcaaatcttaccccgcctgtttaccaaaaacatcacctctagcatcaccagtattagaggcaccgcctgcccagtgacacatgtttaacggccgcggtaccctaaccattcgtggattgccagctggcaatccacgcatcactctcggccgacacccctcatggccaaccgttacaccatggatctgactgccatctacgaggtgagtccccgccgcacggcatccccggtacctgcatgcctgagtccgagtccccacctctctagcgccgcaaactccagcccgggacgcttgcctcccttctccaactggggctccctagcgccgcgccctccagcctggggcccctgcctcccgctcagaccagcttggtgatttggaggtgaaaatggaacccgcgacacccggctcttcgctcaaacatgggtggggcggcccatgcaagtggaaagtcggagaacttttctcagaccgaggctgcctggaggcggaagtggcccccatacctggctcacccctagtcgttgctgagggcgtggttttgcgcggaggcgtctctggggctgaagtctcagggtggggggatccgacttctgtctctccagtccctgaccgtagagacagagaaccctaaaaccgaagcaatccggacttccaggtcaactttgcccggtttctccagttgtgaaactggagatcccgacgcgtgggtcatatccggggaggacaagagacccaaaattgggaaacagtggtgcgccctgacttcggggtccccctcttggtccagccggggaagccgggattcctgggtccctcgggataaggcctcggtggtgggtaaactcagaacctccaactctgggttcctggcatccggaacccaggggtttctgcgggcgggtggggctcaggcggggagccacaaaccggcctggcaagctctagttccctgcagctggggtggggcgtcgccctgcattttcaggtgccttaaccgacccatttccgcagagcctcctgtcgctgagccctgacgtgcccgtgccatccgaccatggagggactgagtccagcccaggctggggctcctcgggaccctggagcctgagcccctccgactccagcccgtctggggtcacctcccgcctgcctggccgctccaccagcctagtggagggccgcagctgtggctgggtgcccccaccccctggcttcgcaccgctggctccccgcctgggccctgagctgtcaccctcacccacttcgcccactgcaacctccaccaccccctcgcgctacaagactgagctatgtcggaccttctcagagagtgggcgctgccgctacggggccaagtgccagtttgcccatggcctgggcgagctgcgccaggccaatcgccaccccaaatacaagacggaactctgtcacaagttctacctccagggccgctgcccctacggctctcgctgccacttcatccacaaccctagcgaagacctggcggccccgggccaccctcctgtgcttcgccagagcatcagcttctccggcctgccctctggccgccggacctcaccaccaccaccaggcctggccggcccttccctgtcctccagctccttctcgccctccagctccccaccaccacctggggaccttccactgtcaccctctgccttctctgctgcccctggcacccccctggctcgaagagaccccaccccagtctgttgcccctcctgccgaagggccactcctatcagcgtctgggggcccttgggtggcctggttcggaccccctctgtacagtccctgggatccgaccctgatgaatatgccagcagcggcagcagcctggggggctctgactctcccgtcttcgaggcgggagtttttgcaccaccccagcccgtggcagccccccggcgactccccatcttcaatcgcatctctgtttctgagtgacaaagtgactgcccggtcagatcagctggatctcagcggggagccacgtctcttgcactgtggtctctgcatggaccccagggctgtggggacttgggggacagtaatcaagtaatccccttttccagaatgcattaacccactcccctgacctcacgctggggcaggtccccaagtgtgcaagctcagtattcatgatggtgggggatggagtgtcttccgaggttcttgggggaaaaaaaattgtagcatatttaagggaggcaatgaaccctctcccccacctcttccctgcccaaatctgtctcctagaatcttatgtgctgtgaataataggccttcactgcccctccagtttttatagacctgaggttccagtgtctcctggtaactggaacctctcctgagggggaatcctggtgctcaaattaccctccaaaagcaagtagccaaagccgttgccaaaccccacccataaatcaatgggccctttatttatgacgactttatttattctaatatgattttatagtatttatatatattgggtcgtctgcttcccttgtatttttcttcctttttttgtaatattgaaaacgacgatataattattataagtagactataatatatttagtaatatatattattaccttaaaagtctatttttgtgttttgggcatttttaaataaacaatctgagtgtaaa

SEQ ID NO: 452061 - DNA, 1515 bp, Homo sapiens
cacaccgagctactccagccctgggcaataagagctactccagcctgggcgaataagagctactccagcctgggcaataagagctgtcaccctcacccacttcgcccactgcaacctccaccaccccctcgcgctacaagactgagctatgtcggaccttctcagagagtgggcgctgccgctacggggccaagtgccagtttgcccatggcctgggcgagctgcgccaggccaatcgccaccccaaatacaagacggaactctgtcacaagttctacctccagggccgctgcccctacggctctcgctgccacttcatccacaaccctagcgaagacctggcggccccgggccaccctcctgtgcttcgccagagcatcagcttctccggcctgccctctggccgccggacctcaccaccaccaccaggcctggccggcccttccctgtcctccagctccttctcgccctccagctccccaccaccacctggggaccttccactgtcaccctctgccttctctgctgcccctggcacccccctggctcgaagagaccccaccccagtctgttgcccctcctgccgaagggccactcctatcagcgtctgggggcccttgggtggcctggttcggaccccctctgtacagtccctgggatccgaccctgatgaatatgccagcagcggcagcagcctggggggctctgactctcccgtcttcgaggcgggagtttttgcaccaccccagcccgtggcagccccccggcgactccccatcttcaatcgcatctctgtttctgagtgacaaagtgactgcccggtcagatcagctggatctcagcggggagccacgtctcttgcactgtggtctctgcatggaccccagggctgtggggacttgggggacagtaatcaagtaatccccttttccagaatgcattaacccactcccctgacctcacgctggggcaggtccccaagtgtgcaagctcagtattcatgatggtgggggatggagtgtcttccgaggttcttgggggaaaaaaaattgtagcatatttaagggaggcaatgaaccctctcccccacctcttccctgcccaaatctgtctcctagaatcttatgtgctgtgaataataggccttcactgcccctccagtttttatagacctgaggttccagtgtctcctggtaactggaacctctcctgagggggaatcctggtgctcaaattaccctccaaaagcaagtagccaaagccgttgccaaaccccacccataaatcaatgggccctttatttatgacgactttatttattctaatatgattttatagtatttatatatattgggtcgtctgcttcccttgtatttttcttcctttttttgtaatattgaaaacgacgatataattattataagtagactataatatatttagtaatatatattattaccttaaaagtctatttttgtgttttgggcatttttaaataaacaatctgagtgtaaa

SEQ ID NO: 452062 - DNA, 1718 bp, Homo sapiens
gagcctgacttcagcgctcccactctcggccgacacccctcatggccaaccgttacaccatggatctgactgccatctacgagagcctcctgtcgctgagccctgacgtgcccgtgccatccgaccatggagggactgagtccagcccaggctggggctcctcgggaccctggagcctgagcccctccgactccagcccgtctggggtcacctcccgcctgcctggccgctccaccagcctagtggagggccgcagctgtggctgggtgcccccaccccctggcttcgcaccgctggctccccgcctgggccctgagctgtcaccctcacccacttcgcccactgcaacctccaccaccccctcgcgctacaagactgagctatgtcggaccttctcagagagtgggcgctgccgctacggggccaagtgccagtttgcccatggcctgggcgagctgcgccaggccaatcgccaccccaaatacaagacggaactctgtcacaagttctacctccagggccgctgcccctacggctctcgctgccacttcatccacaaccctagcgaagacctggcggccccgggccaccctcctgtgcttcgccagagcatcagcttctccggcctgccctctggccgccggacctcaccaccaccaccaggcctggccggcccttccctgtcctccagctccttctcgccctccagctccccaccaccacctggggaccttccactgtcaccctctgccttctctgctgcccctggcacccccctggctcgaagagaccccaccccagtctgttgcccctcctgccgaagggccactcctatcagcgtctgggggcccttgggtggcctggttcggaccccctctgtacagtccctgggatccgaccctgatgaatatgccagcagcggcagcagcctggggggctctgactctcccgtcttcgaggcgggagtttttgcaccaccccagcccgtggcagccccccggcgactccccatcttcaatcgcatctctgtttctgagtgacaaagtgactgcccggtcagatcagctggatctcagcggggagccacgtctcttgcactgtggtctctgcatggaccccagggctgtggggacttgggggacagtaatcaagtaatccccttttccagaatgcattaacccactcccctgacctcacgctggggcaggtccccaagtgtgcaagctcagtattcatgatgggggaaaaaaaattgtagcatatttaagggaggcaatgaaccctctcccccacctcttccctgcccaaatctgtctcctagaatcttatgtgctgtgaataataggccttcactgcccctccagtttttatagacctgaggttccagtgtctcctggtaactggaacctctcctgagggggaatcctggtgctcaaattaccctccaaaagcaagtagccaaagccgttgccaaaccccacccataaatcaatgggccctttatttatgacgactttatttattctaatatgattttatagtatttatatatattgggtcgtctgcttcccttgtatttttcttcctttttttgtaatattgaaaacgacgatataattattataagtagactataatatatttagtaatatatattattaccttaaaagtctatttttgtgttttgggcatttttaaataaacaatctgagtgtaaa

SEQ ID NO: 452063 - DNA, 1750 bp, Homo sapiens
gagcctgacttcagcgctcccactctcggccgacacccctcatggccaaccgttacaccatggatctgactgccatctacgagagcctcctgtcgctgagccctgacgtgcccgtgccatccgaccatggagggactgagtccagcccaggctggggctcctcgggaccctggagcctgagcccctccgactccagcccgtctggggtcacctcccgcctgcctggccgctccaccagcctagtggagggccgcagctgtggctgggtgcccccaccccctggcttcgcaccgctggctccccgcctgggccctgagctgtcaccctcacccacttcgcccactgcaacctccaccaccccctcgcgctacaagactgagctatgtcggaccttctcagagagtgggcgctgccgctacggggccaagtgccagtttgcccatggcctgggcgagctgcgccaggccaatcgccaccccaaatacaagacggaactctgtcacaagttctacctccagggccgctgcccctacggctctcgctgccacttcatccacaaccctagcgaagacctggcggccccgggccaccctcctgtgcttcgccagagcatcagcttctccggcctgccctctggccgccggacctcaccaccaccaccaggcctggccggcccttccctgtcctccagctccttctcgccctccagctccccaccaccacctggggaccttccactgtcaccctctgccttctctgctgcccctggcacccccctggctcgaagagaccccaccccagtctgttgcccctcctgccgaagggccactcctatcagcgtctgggggcccttgggtggcctggttcggaccccctctgtacagtccctgggatccgaccctgatgaatatgccagcagcggcagcagcctggggggctctgactctcccgtcttcgaggcgggagtttttgcaccaccccagcccgtggcagccccccggcgactccccatcttcaatcgcatctctgtttctgagtgacaaagtgactgcccggtcagatcagctggatctcagcggggagccacgtctcttgcactgtggtctctgcatggaccccagggctgtggggacttgggggacagtaatcaagtaatccccttttccagaatgcattaacccactcccctgacctcacgctggggcaggtccccaagtgtgcaagctcagtattcatgatggtgggggatggagtgtcttccgaggttcttgggggaaaaaaaattgtagcatatttaagggaggcaatgaaccctctcccccacctcttccctgcccaaatctgtctcctagaatcttatgtgctgtgaataataggccttcactgcccctccagtttttatagacctgaggttccagtgtctcctggtaactggaacctctcctgagggggaatcctggtgctcaaattaccctccaaaagcaagtagccaaagccgttgccaaaccccacccataaatcaatgggccctttatttatgacgactttatttattctaatatgattttatagtatttatatatattgggtcgtctgcttcccttgtatttttcttcctttttttgtaatattgaaaacgacgatataattattataagtagactataatatatttagtaatatatattattaccttaaaagtctatttttgtgttttgggcactcattatggaggggtccgagctctgat

SEQ ID NO: 452064 - DNA, 1685 bp, Homo sapiens
gagcctgacttcagcgctcccactctcggccgacacccctcatggccaaccgttacaccatggatctgactgccatctacgagagcctcctgtcgctgagccctgacgtgcccgtgccatccgaccatggagggactgagtccagcccaggctggggctcctcgggaccctggagcctgagcccctccgactccagcccgtctggggtcacctcccgcctgcctggccgctccaccagcctagtggagggccgcagctgtggctgggtgcccccaccccctggcttcgcaccgctggctccccgcctgggccctgagctgtcaccctcacccacttcgcccactgcaacctccaccaccccctcgcgctacaagactgagctatgtcggaccttctcagagagtgggcgctgccgctacggggccaagtgccagtttgcccatggcctgggcgagctgcgccaggccaatcgccaccccaaatacaagacggaactctgtcacaagttctacctccagggccgctgcccctacggctctcgctgccacttcatccacaaccctagcgaagacctggcggccccgggccaccctcctgtgcttcgccagagcatcagcttctccggcctgccctctggccgccggacctcaccaccaccaccaggcctggccggcccttccctgtcctccagctccttctcgccctccagctccccaccaccacctggggaccttccactgtcaccctctgccttctctgctgcccctggcacccccctggctcgaagagaccccaccccagtctgttgcccctcctgccgaagggccactcctatcagcgtctgggggcccttgggtggcctggttcggaccccctctgtacagtccctgggatccgaccctgatgaatatgccagcagcggcagcagcctggggggctctgactctcccgtcttcgaggcgggagtttttgcaccaccccagcccgtggcagccccccggcgactccccatcttcaatcgcatctctgtttctgagtgacaaagtgactgcccggtcagatcagctggatctcagcggggagccacgtctcttgcactgtggtctctgcatggaccccagggctgtggggacttgggggacagtaatcaagtaatccccttttccagaatgcattaacccactcccctgacctcacgctggggcaggtccccaagtgtgcaagctcagtattcatgatggtgggggatggagtgtcttccgaggttcttgccaaatctgtctcctagaatcttatgtgctgtgaataataggccttcactgcccctccagtttttatagacctgaggttccagtgtctcctggtaactggaacctctcctgagggggaatcctggtgctcaaattaccctccaaaagcaagtagccaaagccgttgccaaaccccacccataaatcaatgggccctttatttatgacgactttatttattctaatatgattttatagtatttatatatattgggtcgtctgcttcccttgtatttttcttcctttttttgtaatattgaaaacgacgatataattattataagtagactataatatatttagtaatatatattattaccttaaaagtctatttttgtgttttgggcatttttaaataaacaatctgagtgtaaa

SEQ ID NO: 452065 - DNA, 1715 bp, Homo sapiens
  misc_feature (1617)..(1617): n is a, c, g, or t
  misc_feature (1634)..(1634): n is a, c, g, or t
  misc_feature (1713)..(1713): n is a, c, g, or t
gagcctgacttcagcgctcccactctcggccgacacccctcatggccaaccgttacaccatggatctgactgccatctacgagagcctcctgtcgctgagccctgacgtgcccgtgccatccgaccatggagggactgagtccagcccaggctggggctcctcgggaccctggagcctgagcccctccgactccagcccgtctggggtcacctcccgcctgcctggccgctccaccagcctagtggagggccgcagctgtggctgggtgcccccaccccctggcttcgcaccgctggctccccgcctgggccctgagctgtcaccctcacccacttcgcccactgcaacctccaccaccccctcgcgctacaagactgagctatgtcggaccttctcagagagtgggcgctgccgctacggggccaagtgccagtttgcccatggcctgggcgagctgcgccaggccaatcgccaccccaaatacaagacggaactctgtcacaagttctacctccagggccgctgcccctacggctctcgctgccacttcatccacaaccctagcgaagacctggcggccccgggccaccctcctgtgcttcgccagagcatcagcttctccggcctgccctctggccgccggacctcaccaccaccaccaggcctggccggcccttccctgtcctccagctccttctcgccctccagctccccaccaccacctggggaccttccactgtcaccctctgccttctctgctgcccctggcacccccctggctcgaagagaccccaccccagtctgttgcccctcctgccgaagggccactcctatcagcgtctgggggcccttgggtggcctggttcggaccccctctgtacagtccctgggatccgaccctgatgaatatgccagcagcggcagcagcctggggggctctgactctcccgtcttcgaggcgggagtttttgcaccaccccagcccgtggcagccccccggcgactccccatcttcaatcgcatctctgtttctgagtgacaaagtgactgcccggtcagatcagctggatctcagcggggagccacgtctcttgcactgtggtctctgcatggaccccagggctgtggggacttgggggacagtaatcaagtaatccccttttccagaatgcattaacccactcccctgacctcacgctggggcaggtccccaagtgtgcaagctcagtattcatgatggtgggggatggagtgtcttccgaggttcttgggggaaaaaaaattgtagcatatttaagggaggcaatgaaccctctcccccacctcttccctgcccaaatctgtctcctagaatcttatgtgctgtgaataataggccttcactgcccctccagtttttatagacctgaggttccagtgtctcctggtaactggaacctctcctgagggggaatcctggtgctcaaattaccctccaaaagcaagtagccaaagccgttgccaaaccccacccataaatcaatgggccctttatttatgacgactttatttattctaatatgattttatcacgccacccccccccccccccccccccgccccccttctatttttcnccccccctccccaacancgaaaacgacgactcactcacactctcactctcactcacacgctcacgcacactcactcacactcactcactctatcangt

SEQ ID NO: 452066 - DNA, 1521 bp, Homo sapiens
gagcctgacttcagcgctcccactctcggccgacacccctcatggccaaccgttacaccatggatctgactgccatctacgagagcctcctgtcgctgagccctgacgtgcccgtgccatccgaccatggagggactgagtccagcccaggctggggctcctcgggaccctggagcctgagcccctccgactccagcccgtctggggtcacctcccgcctgcctggccgctccaccagcctagtggagggccgcagctgtggctgggtgcccccaccccctggcttcgcaccgctggctccccgcctgggccctgagctgtcaccctcacccacttcgcccactgcaacctccaccaccccctcgcgctacaagactgagctatgtcggaccttctcagagagtgggcgctgccgctacggggccaagtgccagtttgcccatggcctgggcgagctgcgccaggccaatcgccaccccaaatacaagacggaactctgtcacaagttctacctccagggccgctgcccctacggctctcgctgccacttcatccacaaccctagcgaagacctggcggccccgggccaccctcctgtgcttcgccagagcatcagcttctccggcctgccctctggccgccggacctcaccaccaccaccaggcctggccggcccttccctgtcctccagctccttctcgccctccagctccccaccaccacctggggaccttccactgtcaccctctgccttctctgctgcccctggcacccccctggctcgaagagaccccaccccagtctgttgcccctcctgccgaagggccactcctatcagcgtctgggggcccttgggtggcctggttcggaccccctctgtacagtccctgggatccgaccctgatgaatatgccagcagcggcagcagcctggggggctctgactctcccgtcttcgaggcgggagtttttgcaccaccccagcccgtggcagccccccggcgactccccatcttcaatcgcatctctgtttctgagtgacaaagtgactgcccggtcagatcagctggatctcagcggggagccacgtctcttgcactgtggtctctgcatggaccccagggctgtggggacttgggggacagtaatcaagtaatccccttttccagaatgcattaacccactcccctgacctcacgctggggcaggtccccaagtgtgcaagctcagtattcatgatggtgggggatggagtgtcttccgaggttcttgggggaaaaaaaattgtagcatatttaagggaggcaatgaaccctctcccccacctcttccctgcccaaatctgtctcctagaatcttatgtgctgtgaataataggccttcactgcccctccagtttttatagacctgaggttccagtgtctcctggtaactggaacctctcctgagggggaatcctggtgctcaaattaccctccaaaagcaagtagccaaacttggactagtggtaccgagctcgatg

SEQ ID NO: 452067 - DNA, 1658 bp, Homo sapiens
gagcctgacttcagcgctcccactctcggccgacacccctcatggccaaccgttacaccatggatctgactgccatctacgagagcctcctgtcgctgagccctgacgtgcccgtgccatccgaccatggagggactgagtccagcccaggctggggctcctcgggaccctggagcctgagcccctccgactccagcccgtctggggtcacctcccgcctgcctggccgctccaccagcctagtggagggccgcagctgtggctgggtgcccccaccccctggcttcgcaccgctggctccccgcctgggccctgagctgtcaccctcacccacttcgcccactgcaacctccaccaccccctcgcgctacaagactgagctatgtcggaccttctcagagagtgggcgctgccgctacggggccaagtgccagtttgcccatggcctgggcgagctgcgccaggccaatcgccaccccaaatacaagacggaactctgtcacaagttctacctccagggccgctgcccctacggctctcgctgccacttcatccacaaccctagcgaagacctggcggccccgggccaccctcctgtgcttcgccagagcatcagcttctccggcctgccctctggccgccggacctcaccaccaccaccaggcctggccggcccttccctgtcctccagctccttctcgccctccagctccccaccaccacctggggaccttccactgtcaccctctgccttctctgctgcccctggcacccccctggctcgaagagaccccaccccagtctgttgcccctcctgccgaagggccactcctatcagcgtctgggggcccttgggtggcctggttcggaccccctctgtacagtccctgggatccgaccctgatgaatatgccagcagcggcagcagcctggggggctctgactctcccgtcttcgaggcgggagtttttgcaccaccccagcccgtggcagccccccggcgactccccatcttcaatcgcatctctgtttctgagtgacaaagtgactgcccggtcagatcagctggatctcagcggggagccacgtctcttgcactgtggtctctgcatggaccccagggctgtggggacttgggggacagtaatcaagtaatccccttttccagaatgcattaacccactcccctgacctcacgctggggcaggtccccaagtgtgcaagctcagtattcatgatggtgggggatggagtgtcttccgaggttcttgccaaatctgtctcctagaatcttatgtgctgtgaataataggccttcactgcccctccagtttttatagacctgaggttccagtgtctcctggtaactggaacctctcctgagggggaatcctggtgctcaaattaccctccaaaagcaagtagccaaagccgttgccaaaccccacccataaatcaatgggccctttatttatgacgactttatttattctaatatgattttatagtatttatatatattgggtcgtctgcttcccttgtatttttcttcctttttttgtaatattgaaaacgacgatataattattataagtagactataatatatttagtaatatatattattaccttaaaagtctatttttgtgttttgggca

SEQ ID NO: 452068 - DNA, 1782 bp, Homo sapiens
gagcctgacttcagcgctcccactctcggccgacacccctcatggccaaccgttacaccatggatctgactgccatctacgagagcctcctgtcgctgagccctgacgtgcccgtgccatccgaccatggagggactgagtccagcccaggctggggctcctcgggaccctggagcctgagcccctccgactccagcccgtctggggtcacctcccgcctgcctggccgctccaccagcctagtggagggccgcagctgtggctgggtgcccccaccccctggcttcgcaccgctggctccccgcctgggccctgagctgtcaccctcacccacttcgcccactgcaacctccaccaccccctcgcgctacaagactgagctatgtcggaccttctcagagagtgggcgctgccgctacggggccaagtgccagtttgcccatggcctgggcgagctgcgccaggccaatcgccaccccaaatacaagacggaactctgtcacaagttctacctccagggccgctgcccctacggctctcgctgccacttcatccacaaccctagcgaagacctggcggccccgggccaccctcctgtgcttcgccagagcatcagcttctccggcctgccctctggccgccggacctcaccaccaccaccaggcctggccggcccttccctgtcctccagctccttctcgccctccagctccccaccaccacctggggaccttccactgtcaccctctgccttctctgctgcccctggcacccccctggctcgaagagaccccaccccagtctgttgcccctcctgccgaagggccactcctatcagcgtctgggggcccttgggtggcctggttcggaccccctctgtacagtccctgggatccgaccctgatgaatatgccagcagcggcagcagcctggggggctctgactctcccgtcttcgaggcgggagtttttgcaccaccccagcccgtggcagccccccggcgactccccatcttcaatcgcatctctgtttctgagtgacaaagtgactgcccggtcagatcagctggatctcagcggggagccacgtctcttgcactgtggtctctgcatggaccccagggctgtggggacttgggggacagtaatcaagtaatccccttttccagaatgcattaacccactcccctgacctcacgctggggcaggtccccaagtgtgcaagctcagtattcatgatgggggaaaaaaaattgtagcatatttaagggaggcaatgaaccctctcccccacctcttccctgcccaaatctgtctcctagaatcttatgtgctgtgaataataggccttcactgcccctccagtttttatagacctgaggttccagtgtctcctggtaactggaacctctcctgagggggaatcctggtgctcaaattaccctccaaaagcaagtagccaaagccgttgccaaaccccacccataaatcaatgggccctttatttatgacgactttatttattctaatatgattttatagtatttatatatattgggtcgtctgcttcccttgtatttttcttcctttttttgtaatattgaaaacgacgatataattattataagtagactataatatatttagtaatatatattattaccttaaaagtctatttttgtgttttgggcatttttaaataaacaatctgagtgtaaaaaaaaatagaagaaacaggaatgaaacacatttgggcggcctggccttggaaaaaggtttaagg

SEQ ID NO: 452069 - DNA, 746 bp, Homo sapiens
gagcctgacttcagcgctcccactctcggccgacacccctcatggccaaccgttacaccatggatctgactgccatctacgagagcctcctgtcgctgagccctgacgtgcccgtgccatccgaccatggagggactgagtccagcccaggctggggctcctcgggaccctggagcctgagcccctccgactccagcccgtctggggtcacctcccgcctgcctggccgctccaccagcctagtggagggccgcagctgtggctgggtgcccccaccccctggcttcgcaccgctggctccccgcctgggccctgagctgtcaccctcacccacttcgcccactgcaacctccaccaccccctcgcgctacaagactgagctatgtcggaccttctcagagagtgggcgctgccgctacggggccaagtgccagtttgcccatggcctgggcgagctgcgccaggccaatcgccaccccaaatacaagacggaactctgtcacaagttctacctccagggccgctgcccctacggctctcgctgccacttcatccacaaccctagcgaagacctggcggccccgggccaccctcctgtgcttcgccagagcatcagcttctccggcctgccctctggccgccggacctcaccaccaccaccaggcctggccggcccttccctgtcctccagctccttctcgccctccagctccccccaatgaaataaagttattttctcattccca

SEQ ID NO: 452070 - DNA, 422 bp, Homo sapiens
  misc_feature (22)..(22): n is a, c, g, or t
ctacactgtcacacaaggcatngctcataaggaaaggttaaaaaaagtaaaaggaactcggcaaatcttaccccgcctgtttaccaaaaacatcacctctagcatcaccagtattagaggcaccgcctgcccagtgacacatgtttaacggccgcggtaccctaaccattcgtggattgccagctggcaatccacgcatcactctcggccgacacccctcatggccaaccgttacaccatggatctgactgccatctacgaggtgagtccccgccgcacggcatccccggtacctgcatgcctgagtccgagtccccacctctctagcgccgcaaactccagcccgggacgcttgcctcccttctccaactgcatcgctcctcctctgttccatagatcccccgccatgcgtggattgccag

SEQ ID NO: 452071 - DNA, 1722 bp, Homo sapiens
gagcctgacttcagcgctcccactctcggccgacacccctcatggccaaccgttacaccatggatctgactgccatctacgagagcctcctgtcgctgagccctgacgtgcccgtgccatccgaccatggagggactgagtccagcccaggctggggctcctcgggaccctggagcctgagcccctccgactccagcccgtctggggtcacctcccgcctgcctggccgctccaccagcctagtggagggccgcagctgtggctgggtgcccccaccccctggcttcgcaccgctggctccccgcctgggccctgagctgtcaccctcacccacttcgcccactgcaacctccaccaccccctcgcgctacaagactgagctatgtcggaccttctcagagagtgggcgctgccgctacggggccaagtgccagtttgcccatggcctgggcgagctgcgccaggccaatcgccaccccaaatacaagacggaactctgtcacaagttctacctccagggccgctgcccctacggctctcgctgccacttcatccacaaccctagcgaagacctggcggccccgggccaccctcctgtgcttcgccagagcatcagcttctccggcctgccctctggccgccggacctcaccaccaccaccaggcctggccggcccttccctgtcctccagctccttctcgccctccagctccccaccaccacctggggaccttccactgtcaccctctgccttctctgctgcccctggcacccccctggctcgaagagaccccaccccagtctgttgcccctcctgccgaagggccactcctatcagcgtctgggggcccttgggtggcctggttcggaccccctctgtacagtccctgggatccgaccctgatgaatatgccagcagcggcagcagcctggggggctctgactctcccgtcttcgaggcgggagtttttgcaccaccccagcccgtggcagccccccggcgactccccatcttcaatcgcatctctgtttctgagtgacaaagtgactgcccggtcagatcagctggatctcagcggggagccacgtctcttgcactgtggtctctgcatggaccccagggctgtggggacttgggggacagtaatcaagtaatccccttttccagaatgcattaacccactcccctgacctcacgctggggcaggtccccaagtgtgcaagctcagtattcatgatggtgggggatggagtgtcttccgaggttcttgggggaaaaaaaattgtagcatatttaagggaggcaatgaaccctctcccccacctcttccctgcccaaatctgtctcctagaatcttatgtgctgtgaataataggccttcactgcccctccagtttttatagacctgaggttccagtgtctcctggtaactggaacctctcctgagggggaatcctggtgctcaaattaccctccaaaagcaagtagccaaagccgttgccaaaccccacccataaatcaatgggccctttatttatgacgactttatttattctaatatgattttatagtatttatatatattgggtcgtctgcttcccttgtatttttcttcctttttttgtaatattgaaaacgacgatataattattataagtagactataatatatttagtaatatatattattaccttaaaagtctatttttgtgttttgggca

SEQ ID NO: 452072 - DNA, 1276 bp, Homo sapiens
  misc_feature (22)..(22): n is a, c, g, or t
ctacactgtcacacaaggcatngctcataaggaaaggttaaaaaaagtaaaaggaactcggcaaatcttaccccgcctgtttaccaaaaacatcacctctagcatcaccagtattagaggcaccgcctgcccagtgacacatgtttaacggccgcggtaccctaaccattcgtggattgccagctggcaatccacgcatcactctcggccgacacccctcatggccaaccgttacaccatggatctgactgccatctacgagagcctcctgtcgctgagccctgacgtgcccgtgccacccccctggctcgaagagaccccaccccagtctgttgcccctcctgccgaagggccactcctatcagcgtctgggggcccttgggtggcctggttcggaccccctctgtacagtccctgggatccgaccctgatgaatatgccagcagcggcagcagcctggggggctctgactctcccgtcttcgaggcgggagtttttgcaccaccccagcccgtggcagccccccggcgactccccatcttcaatcgcatctctgtttctgagtgacaaagtgactgcccggtcagatcagctggatctcagcggggagccacgtctcttgcactgtggtctctgcatggaccccagggctgtggggacttgggggacagtaatcaagtaatccccttttccagaatgcattaacccactcccctgacctcacgctggggcaggtccccaagtgtgcaagctcagtattcatgatggtgggggatggagtgtcttccgaggttcttgggggaaaaaaaattgtagcatatttaagggaggcaatgaaccctctcccccacctcttccctgcccaaatctgtctcctagaatcttatgtgctgtgaataataggccttcactgcccctccagtttttatagacctgaggttccagtgtctcctggtaactggaacctctcctgagggggaatcctggtgctcaaattaccctccaaaagcaagtagccaaagccgttgccaaaccccacccataaatcaatgggccctttatttatgacgactttatttattctaatatgattttatagtatttatatatattgggtcgtctgcttcccttgtatttttcttcctttttttgtaatattgaaaacgacgatataattattataagtagactataatatatttagtaatatatattattaccttaaaagtctatttttgtgttttgggcatttttaaataaacaatctgagtgtaaa

SEQ ID NO: 452073 - DNA, 1813 bp, Homo sapiens
gagcctgacttcagcgctcccactctcggccgacacccctcatggccaaccgttacaccatggatctgactgccatctacgagagcctcctgtcgctgagccctgacgtgcccgtgccatccgaccatggagggactgagtccagcccaggctggggctcctcgggaccctggagcctgagcccctccgactccagcccgtctggggtcacctcccgcctgcctggccgctccaccagcctagtggagggccgcagctgtggctgggtgcccccaccccctggcttcgcaccgctggctccccgcctgggccctgagctgtcaccctcacccacttcgcccactgcaacctccaccaccccctcgcgctacaagactgagctatgtcggaccttctcagagagtgggcgctgccgctacggggccaagtgccagtttgcccatggcctgggcgagctgcgccaggccaatcgccaccccaaatacaagacggaactctgtcacaagttctacctccagggccgctgcccctacggctctcgctgccacttcatccacaaccctagcgaagacctggcggccccgggccaccctcctgtgcttcgccagagcatcagcttctccggcctgccctctggccgccggacctcaccaccaccaccaggcctggccggcccttccctgtcctccagctccttctcgccctccagctccccaccaccacctggggaccttccactgtcaccctctgccttctctgctgcccctggcacccccctggctcgaagagaccccaccccagtctgttgcccctcctgccgaagggccactcctatcagcgtctgggggcccttgggtggcctggttcggaccccctctgtacagtccctgggatccgaccctgatgaatatgccagcagcggcagcagcctggggggctctgactctcccgtcttcgaggcgggagtttttgcaccaccccagcccgtggcagccccccggcgactccccatcttcaatcgcatctctgtttctgagtgacaaagtgactgcccggtcagatcagctggatctcagcggggagccacgtctcttgcactgtggtctctgcatggaccccagggctgtggggacttgggggacagtaatcaagtaatccccttttccagaatgcattaacccactcccctgacctcacgctggggcaggtccccaagtgtgcaagctcagtattcatgatggtgggggatggagtgtcttccgaggttcttgggggaaaaaaaattgtagcatatttaagggaggcaatgaaccctctcccccacctcttccctgcccaaatctgtctcctagaatcttatgtgctgtgaataataggccttcactgcccctccagtttttatagacctgaggttccagtgtctcctggtaactggaacctctcctgagggggaatcctggtgctcaaattaccctccaaaagcaagtagccaaagccgttgccaaaccccacccataaatcaatgggccctttatttatgacgactttatttattctaatatgattttatagtatttatatatattgggtcgtctgcttcccttgtatttttcttcctttttttgtaatattgaaaacgacgatataattattataagtagactataatatatttagtaatatatattattaccttaaaagtctatttttgtgttttgggcatttttaaataaacaatctgagtgtaaaaaaaaatagaagaaacaggaatgaaacacatttgggcggcctggccttggaaaaaggtttaagg

SEQ ID NO: 452074 - DNA, 1462 bp, Homo sapiens
gagcctgacttcagcgctcccactctcggccgacacccctcatggccaaccgttacaccatggatctgactgccatctacgagagcctcctgtcgctgagccctgacgtgcccgtgccatccgaccatggagggactgagtccagcccaggctggggctcctcgggaccctggagcctgagcccctccgactccagcccgtctggggtcacctcccgcctgcctggccgctccaccagcctagtggagggccgcagctgtggctgggtgcccccaccccctggcttcgcaccgctggctccccgcctgggccctgagctgtcaccctcacccacttcgcccactgcaacctccaccaccccctcgcgctacaagactgagctatgtcggaccttctcagagagtgggcgctgccgctacggggccaagtgccagtttgcccatggcctgggcgagctgcgccaggccaatcgccaccccaaatacaagacggaactctgtcacaagttctacctccagggccgctgcccctacggctctcgctgccacttcatccacaaccctagcgaagacctggcggccccgggccaccctcctgtgcttcgccagagcatcagcttctccggcctgccctctggccgccggacctcaccaccaccaccaggcctggccggcccttccctgtcctccagctccttctcgccctccagctccccaccaccacctggggaccttccactgtcaccctctgccttctctgctgcccctggcacccccctggctcgaagagaccccaccccagtctgttgcccctcctgccgaagggccactcctatcagcgtctgggggcccttgggtggcctggttcggaccccctctgtacagtccctgggatccgaccctgatgaatatgccagcagcggcagcagcctggggggctctgactctcccgtcttcgaggcgggagtttttgcaccaccccagcccgtggcagccccccggcgactccccatcttcaatcgcatctctgtttctgagtgacaaagtgaccaaatctgtctcctagaatcttatgtgctgtgaataataggccttcactgcccctccagtttttatagacctgaggttccagtgtctcctggtaactggaacctctcctgagggggaatcctggtgctcaaattaccctccaaaagcaagtagccaaagccgttgccaaaccccacccataaatcaatgggccctttatttatgacgactttatttattctaatatgattttatagtatttatatatattgggtcgtctgcttcccttgtatttttcttcctttttttgtaatattgaaaacgacgatataattattataagtagactataatatatttagtaatatatattattaccttaaaagtctatttttgtgttttgggcatttttaaataaacaatctgagtgtaaa

SEQ ID NO: 452075 - DNA, 1533 bp, Homo sapiens
gagcctgacttcagcgctcccactctcggccgacacccctcatggccaaccgttacaccatggatctgactgccatctacgagagcctcctgtcgctgagccctgacgtgcccgtgccatccgaccatggagggactgagtccagcccaggctggggctcctcgggaccctggagcctgagcccctccgactccagcccgtctggggtcacctcccgcctgcctggccgctccaccagcctagtggagggccgcagctgtggctgggtgcccccaccccctggcttcgcaccgctggctccccgcctgggccctgagctgtcaccctcacccacttcgcccactgcaacctccaccaccccctcgcgctacaagactgagctatgtcggaccttctcagagagtgggcgctgccgctacggggccaagtgccagtttgcccatggcctgggcgagctgcgccaggccaatcgccaccccaaatacaagacggaactctgtcacaagttctacctccagggccgctgcccctacggctctcgctgccacttcatccacaaccctagcgaagacctggcggccccgggccaccctcctgtgcttcgccagagcatcagcttctccggcctgccctctggccgccggacctcaccaccaccaccaggcctggccggcccttccctgtcctccagctccttctcgccctccagctccccaccaccacctggggaccttccactgtcaccctctgccttctctgctgcccctggcacccccctggctcgaagagaccccaccccagtctgttgcccctcctgccgaagggccactcctatcagcgtctgggggcccttgggtggcctggttcggaccccctctgtacagtccctgggatccgaccctgatgaatatgccagcagcggcagcagcctggggggctctgactctcccgtcttcgaggcgggagtttttgcaccaccccagcccgtggcagccccccggcgactccccatcttcaatcgcatctctgtttctgagtgacaaagtgactgcccggtcagatcagctggatctcagcggggagccacgtctcttgcactgtggtctctgcatggaccccagggctgtggggacttgggggacagtaatcaagtaatccccttttccagaatgcattaacccactcccctgacctcacgctggggcaggtccccaagtgtgcaagctcagtattcatgatggtgggggatggagtgtcttccgaggttcttgggggaaaaaaaattgtagcatatttaagggaggcaatgaaccctctcccccacctcttccctgcccaaatctgtctcctagaatcttatgtgctgtgaataataggccttcactgcccctccagtttttatagacctgaggttccagtgtctcctggtaactggaacctctcctgagggggaatcctggtgctcaaattaccctccaaaagcaagtagccaaagctgctgaaatgggtatcctctagagtacctcagcatca

SEQ ID NO: 452076 - DNA, 1877 bp, Homo sapiens
  misc_feature (1813)..(1813): n is a, c, g, or t
  misc_feature (1861)..(1861): n is a, c, g, or t
gagcctgacttcagcgctcccactctcggccgacacccctcatggccaaccgttacaccatggatctgactgccatctacgagagcctcctgtcgctgagccctgacgtgcccgtgccatccgaccatggagggactgagtccagcccaggctggggctcctcgggaccctggagcctgagcccctccgactccagcccgtctggggtcacctcccgcctgcctggccgctccaccagcctagtggagggccgcagctgtggctgggtgcccccaccccctggcttcgcaccgctggctccccgcctgggccctgagctgtcaccctcacccacttcgcccactgcaacctccaccaccccctcgcgctacaagactgagctatgtcggaccttctcagagagtgggcgctgccgctacggggccaagtgccagtttgcccatggcctgggcgagctgcgccaggccaatcgccaccccaaatacaagacggaactctgtcacaagttctacctccagggccgctgcccctacggctctcgctgccacttcatccacaaccctagcgaagacctggcggccccgggccaccctcctgtgcttcgccagagcatcagcttctccggcctgccctctggccgccggacctcaccaccaccaccaggcctggccggcccttccctgtcctccagctccttctcgccctccagctccccaccaccacctggggaccttccactgtcaccctctgccttctctgctgcccctggcacccccctggctcgaagagaccccaccccagtctgttgcccctcctgccgaagggccactcctatcagcgtctgggggcccttgggtggcctggttcggaccccctctgtacagtccctgggatccgaccctgatgaatatgccagcagcggcagcagcctggggggctctgactctcccgtcttcgaggcgggagtttttgcaccaccccagcccgtggcagccccccggcgactccccatcttcaatcgcatctctgtttctgagtgacaaagtgactgcccggtcagatcagctggatctcagcggggagccacgtctcttgcactgtggtctctgcatggaccccagggctgtggggacttgggggacagtaatcaagtaatccccttttccagaatgcattaacccactcccctgacctcacgctggggcaggtccccaagtgtgcaagctcagtattcatgatggtgggggatggagtgtcttccgaggttcttgggggaaaaaaaattgtagcatatttaagggaggcaatgaaccctctcccccacctcttccctgcccaaatctgtctcctagaatcttatgtgctgtgaataataggccttcactgcccctccagtttttatagacctgaggttccagtgtctcctggtaactggaacctctcctgagggggaatcctggtgctcaaattaccctccaaaagcaagtagccaaaacagtacaagaaaactacaaatcaatatcctttttgaacaatgatgtaaaactcctcaacaaaatacttgcatactaaattcagcagcatattaaaaggattatacaccatgaccaagtgggatttattcctggaatagatgatttgacatgtgaaaatcaatcaatataaatttcattaacagtgaaggaggaaaaaagttacatgatcatctcaattgacacagagaaggtatttgacaaaattcaacaccttttcatgataaaaacacttaacaaactagaaataaaaggaaactaccttaacataataaaagctntatatgaaaaaccctcagtaaatatcatactcagtggtgaaacaccanaagcatttaagaatca

SEQ ID NO: 452077 - DNA, 1297 bp, Homo sapiens
gagcctgacttcagcgctcccactctcggccgacacccctcatggccaaccgttacaccatggatctgactgccatctacgagagcctcctgtcgctgagccctgacgtgcccgtgccatccgaccatggagggactgagtccagcccaggctggggctcctcgggaccctggagcctgagcccctccgactccagcccgtctggggtcacctcccgcctgcctggccgctccaccagcctagtggagggccgcagctgtggctgggtgcccccaccccctggcttcgcaccgctggctccccgcctgggccctgagctgtcaccctcacccacttcgcccactgcaacctccaccaccccctcgcgctacaagactgagctatgtcggaccttctcagagagtgggcgctgccgctacggggccaagtgccagtttgcccatggcctgggcgagctgcgccaggccaatcgccaccccaaatacaagacggaactctgtcacaagttctacctccagggccgctgcccctacggctctcgctgccacttcatccacaaccctagcgaagacctggcggccccgggccaccctcctgtgcttcgccagagcatcagcttctccggcctgccctctggccgccggacctcaccaccaccaccaggcctggccggcccttccctgtcctccagctccttctcgccctccagctccccaccaccacctggggaccttccactgtcaccctctgccttctctgctgcccctggcacccccctggctcgaagagaccccaccccagtctgttgcccctcctgccgaagggccactcctatcagcgtctgggggcccttgggtggcctggttcggaccccctctgtacaccaaatctgtctcctagaatcttatgtgctgtgaataataggccttcactgcccctccagtttttatagacctgaggttccagtgtctcctggtaactggaacctctcctgagggggaatcctggtgctcaaattaccctccaaaagcaagtagccaaagccgttgccaaaccccacccataaatcaatgggccctttatttatgacgactttatttattctaatatgattttatagtatttatatatattgggtcgtctgcttcccttgtatttttcttcctttttttgtaatattgaaaacgacgatataattattataagtagactataatatatttagtaatatatattattaccttaaaagtctatttttgtgttttgggcatttttaaataaacaatctgagtgtaaa

SEQ ID NO: 452078 - DNA, 553 bp, Homo sapiens
  misc_feature (492)..(492): n is a, c, g, or t
gagcctgacttcagcgctcccactctcggccgacacccctcatggccaaccgttacaccatggatctgactgccatctacgagagcctcctgtcgctgagccctgacgtgcccgtgccatccgaccatggagggactgagtccagcccaggctggggctcctcgggaccctggagcctgagcccctccgactccagcccgtctggggtcacctcccgcctgcctggccgctccaccagcctagtggagggccgcagctgtggctgggtgcccccaccccctggcttcgcaccgctggctccccgcctgggccctgagctgtcaccctcacccacttcgcccactgcaacctccaccaccccctcgcgctacaagactgagctatgtcggaccttctcagagagtgggcgctgccgctacggggccaagtgccagtttgcccatggcctgggcgagctgcgccaggccaatcgccaccccaaataaaaaaagnaaatatataaaaaattctaaataaagggaaaataaacctaaagatataataaaattaataa

SEQ ID NO: 452079 - DNA, 963 bp, Homo sapiens
  misc_feature (771)..(771): n is a, c, g, or t
  misc_feature (809)..(809): n is a, c, g, or t
  misc_feature (852)..(852): n is a, c, g, or t
ccaccaagggcgttgtgaataatcttactaatctgtgccatttgtaggttaaaggctgcctcttctccctgtggtttggtttaaaaagcattttcattctctctttgtttactgcacaggtggtacaatttcatggtagaatcatcagaaaggagaaggatatcagatgagggaagaaacaagagagtaattgctcccctggtcctactccccagagagaaccacttttacctttttggtgtgctgcttttccaggctctcttctctccctctctctcctttgctcacccccaccccgccttcccttttaacacaccgttatagaatggttcatgtatgtggtgtttcttaacctgctttttcagcaactaaaaccaaacaaaaatcaacccattgaacttctttccatgttatcaacaggcttatgaaacgtcatcttcagtgcctgcagagtgctccagtgtatccgtggaccttaacatttctgtaatcattcccgcattggtggacattcaggtggtgcctagttctttccctgtgttaagaccaacattgcgtgctctgtgctttgatgagtgaatccttccttgtcaagccaaatctttgctagcatcccggtggtctccttaactgcggacttgcaagatccacatatagacattttaaagacttttcctgtgtgttgccaaaaggcccccttcataagcattgtaccgatttgcactcgtgccggccagcgcagctagtaagagtatgccgttcccttgatanttctgtacttgaatgatcgttttttcctccttgttttntctggtgtgggtggtgtttgccaattgcggctccaaggtgttncttgccttgaagttgctgaacaacatggttgacccatcctggcttttctgctttcttgtgacgaagtattcggcttgacgacttttgcccacttgtttttaactcgaacac

SEQ ID NO: 452080 - DNA, 909 bp, Homo sapiens
  misc_feature (717)..(717): n is a, c, g, or t
  misc_feature (755)..(755): n is a, c, g, or t
  misc_feature (798)..(798): n is a, c, g, or t
ccaccaagggcgttgtgaataatcttactaatctgtgccatttgtaggttaaaggctgcctcttctccctgtggtttggtttaaaaagcattttcattctctctttgtttactgcacaggtggtacaatttcatggtagaatcatcagaaaggagaaggatatcagatgagggaagaaacaagagagtaattgctcccctggtcctactccccagagagaaccacttttacctttttggtgtgctgcttttccaggctctcttctctccctctctctcctttgctcacccccaccccgccttcccttttaacacaccgttatagaatggttcatgtatgtggtgtttcttaacctgctttttcagcaactaaaaccaaacatcttcagtgcctgcagagtgctccagtgtatccgtggaccttaacatttctgtaatcattcccgcattggtggacattcaggtggtgcctagttctttccctgtgttaagaccaacattgcgtgctctgtgctttgatgagtgaatccttccttgtcaagccaaatctttgctagcatcccggtggtctccttaactgcggacttgcaagatccacatatagacattttaaagacttttcctgtgtgttgccaaaaggcccccttcataagcattgtaccgatttgcactcgtgccggccagcgcagctagtaagagtatgccgttcccttgatanttctgtacttgaatgatcgttttttcctccttgttttntctggtgtgggtggtgtttgccaattgcggctccaaggtgttncttgccttgaagttgctgaacaacatggttgacccatcctggcttttctgctttcttgtgacgaagtattcggcttgacgacttttgcccacttgtttttaactcgaacac

SEQ ID NO: 452081 - DNA, 103 bp, Homo sapiens
gtgatctgcccaccttgaccttccaaaatgccaggattacagtcatgagctaccatgtccagctgttagttgtattttgacctatagtcttgcagaagactgg

SEQ ID NO: 452082 - DNA, 4269 bp, Homo sapiens
agccattttggtcaacaccctgcttactgcgcacggccaatcctatgagaactcagcatcccagctcatctgagcagatcctggaagtgatttctgcagctcaggattttttttttaagctacattgaaaatataggtttattttttgttcaggtttttcttttatattttttttctgcacaaaggaggaggatttttcacttactcatatcgaggccagatttttaaagccagctaaggcagcatcagctgtgcgggatttaaagcctatagctcagctgaaaaaaaaggtggggggcagggaagggaagataaaaggagaggaagctgggagaagacaagcatcatcttattttgctatgtggtaggaactgtctataagatagtgtagaattgtttatcttgagcagtttgttcttaacctataaggtatttttccttttttttttttttaaacctcccccacccttttcctgaaagctttgtttcagagctttgtattgggtttttttggtgaggaggttgtatttatttttttggtgtgtgtgtgtgagtgtgtgtgtgtctgtgtgtgtgttgtggtcccagctgagtcatcatgtctgctctgacgcctccgaccgatatgccaacccccaccactgacaagatcacacaggctgccatggagaccatctacctttgcaaattccgagtgtccatggatggagaatggctctgcctgcgagagctggatgacatctcacttacacctgacccagagcctacccatgaagatcctaattatctcatggctaatgaacgcatgaacctcatgaacatggccaagctgagtatcaagggcttgattgaatcagctctgaacctggggaggactcttgactctgactatgcacctctccagcaattctttgtggtgatggagcactgtctgaaacatggcttgaaagctaaaaaaacttttctcggacaaaataaatccttctgggggcctctagaactggtagaaaagcttgttccagaagccgcagagataacagcaagtgttaaagatcttccaggacttaagacaccagtaggtagaggaagagcctggcttcgtttggcattaatgcaaaagaaactttcagaatatatgaaagctttgatcaataagaaagaacttctcagtgaattctacgaacccaatgccctcatgatggaagaagaaggagccataattgctggtctgttggtgggtctgaatgtcattgatgccaatttctgtatgaaaggagaagacttggactctcaggttggagttatagatttttcaatgtatctcaaggacgggaacagcagtaaaggtactgaaggagacggtcagattactgcaattctggaccagaagaactatgtagaagaactgaacagacatttgaatgctactgtaaacaaccttcaggcaaaagtagatgcattagaaaaatccaacactaaactgacagaggagcttgcagttgcaaacaacaggatcattaccttacaagaagaaatggaacgagttaaagaggaaagttcctacatactggaatccaatcggaagggtcccaagcaagacagaactgcagaagggcaagcactaagtgaagcaagaaagcatttaaaagaagagacacaattacgattggatgttgagaaagaactggagatgcagatcagcatgaggcaggagatggaattggctatgaagatgctggagaaggatgtctgtgagaagcaggatgccctggtatctcttcggcagcagctggatgacctcagagctctcaagcatgaacttgcctttaagctgcagagttcagacttaggagtaaaacagaaaagtgaactaaacagtcgcttggaagagaagactaatcagatggctgctaccattaaacaacttgaacaaagtgaaaaggatttggtgaaacaggcaaagaccttaaatagtgcagcaaataaactgatcccaaaacatcattaggcatttttaagttggtcacgtcgcaagtccgatatcacaacttaattgtaaaaggaagaaatctgaaagttactacatttaagctctgattctatataaaatgtcaccaaaaagttgactttgaatttgttggacttttaaaaaaccagttggaaatataggttgggtttttttcttattgttttctccccagggttagaaaaattggtataagttcctaattaaaagctgaataaactttgagaaattatttctgagttgaccaataaataaaaataccactttctttaaaaaagcctagggaattgaagctctgtacatatactaatgatgcctttacaacccagtccttgataataccagattctcggtgcattgttcatgtctgtatctgcaagcctgttctgccattgcagtgtgatgaacctagaggtaactaccatgtgaacttgaactcttctaaaatagttctgtgtctcttagaccatgaccccttttcacttttgttatataggtttaatccccaagccaaggatagtacttagtatttcactacacttctattctcagtaaccaagattgcttgcaactttttttgccttggtgacttttgaaaaaaaaagaaaagaaaaagcagcatccttatatttctttaaaatacatagaaataaagttagtaattaggtaacctatgataacataataatgtggacgcctggggaaaccctcctcatgtttgtcatcttctacctctgccattttcctgcaattccgcttcctacttaggcagttcagagagaacaattctaataaaaacactcctctcctattaacaaaaaatgatgcagtacccatttttcgtatcctgcttttcttatattggagtaaaaaggacagggtatagacatgaatgatgatattctgcctggcctgtcatttcttacctggaaacatttacttaagagtttctgttactttttgttcagatggggatttgctaaaggttctgggaagctaataattgaattattagaaaaacatttcagaatagggaagtaaatgataaacttatattctttattattatttagtacaaaaatagattcccagtagatatccacaagcaatattagcagggcttctgtttctaagtgaccacagactaaccctttctaggctttaacattgtaaataatcctataaacagtttgattttttaagatgatttttgatttgaagagacaggctttacataagccttcattccttcaaaaggtcctgacaaaatacttgggtttttttctctttttttcattctggtatgctttgcagcatttcagctgctttggtggggacacagataaccccttcgcttccagctcttaaaattctttatctttttcttggcaaaaccagaattaagagtgtaagatagattccatgtgtgcttatataggtccctgcacagattggacttgaaccaaaattaagtccaaagaacatatgtttagaccaacttcatggaagtggaagatcctgtgctcttgaacttattttaattcttataatttgcacctatataaacaaagctcctactgtattcttctcttcatcaaccttttgtggtgatgggttgccttttctacgagcatttggaaggagtgatcaaataccgaaattgaactttctaaaacctacacatagcatgcgtttaaattctattatataaagccccaagtgctttaccttctaaaacatgcttctctataggtgcaaagttataagatatgtagaagaaaacatccatcagaatcttctggagaatatggtcagagtcttaaacaggcccagtgctgagttctttgtccacttagtcacacatcttttgtgggaatgggaaaggaaggagacagccaaactctgacaaaggcttttccttatagaataacccaaagcctaggtgagggttgatatataatgtcccatgatttaatatatgtggtttgggggaaaggacaagaaaaaactataattccacatataagaaggtagttgcccatttacaagttccagttatgtgtgtaaaacagaaaaattaagtaccaaacctattaggaaatttttttaaaaagtggatttaacttaaattactgtgtacttgaggttggctttggatatggattttctaaaaagtgatgttttattgtttatcatctaatggctgtaaactgtagtactagaataaaaaaaatggaaaatca

SEQ ID NO: 452083 - DNA, 2474 bp, Homo sapiens
tttgaatacttggatgctaggggatatagaggcactgagagataggtgtcctccaaggatctattctggatctttctctcccttctttaacccttttctcttatctcccttttctttctcctgggtagttctgtagcttccactgtcacctccagtgtgttttcccagctcttaccttcatctggagaccagtcttgagttttcatcctttgggcagctatcttccaccagtatctacaattcagtctgcccaaagcacatcttcttcctatgctactctctttctgtgcttatgtgaaaccaccattttctctctggcaacttagcagccaagagaaatggctgagtcttcaaggatgaatgtgacgtggtacccaaggtcatttgatgtttctacccttaacacctgtttgtcacccttcttgcacttgagcaaaactaaactgctggtccctgtacttcccatttttcccatttatttctttcccaatagttccaccaattagaaatgtcctaattcttcccactcccttattcgtcagatacatttttaagtttaggctcaaatgccacctccccagagtttcctctgatacctctttgcagctagaaatgatctgtctttctgggaactcccatagcttcatactcatatctatctatactgcttatggcacttctcactgtctactgtaccttttaactctttatatatgtctcctccgatgcgagtgtaagctccctgagattagttaacgaatcttttaagttcccgtattagatctgtcgcagtgccttgaatatacaagcattcattcagtagatatatgaatgaatggattaatgggtgatttcttatatttctttaaaatacatagaaataaagttagtaattaggtaacctatgataacataataatgtggacgcctggggaaaccctcctcatgtttgtcatcttctacctctgccattttcctgcaattccgcttcctacttaggcagttcagagagaacaattctaataaaaacactcctctcctattaacaaaaaatgatgcagtacccatttttcgtatcctgcttttcttatattggagtaaaaaggacagggtatagacatgaatgatgatattctgcctggcctgtcatttcttacctggaaacatttacttaagagtttctgttactttttgttcagatggggatttgctaaaggttctgggaagctaataattgaattattagaaaaacatttcagaatagggaagtaaatgataaacttatattctttattattatttagtacaaaaatagattcccagtagatatccacaagcaatattagcagggcttctgtttctaagtgaccacagactaaccctttctaggctttaacattgtaaataatcctataaacagtttgattttttaagatgatttttgatttgaagagacaggctttacataagccttcattccttcaaaaggtcctgacaaaatacttgggtttttttctctttttttcattctggtatgctttgcagcatttcagctgctttggtggggacacagataaccccttcgcttccagctcttaaaattctttatctttttcttggcaaaaccagaattaagagtgtaagatagattccatgtgtgcttatataggtccctgcacagattggacttgaaccaaaattaagtccaaagaacatatgtttagaccaacttcatggaagtggaagatcctgtgctcttgaacttattttaattcttataatttgcacctatataaacaaagctcctactgtattcttctcttcatcaaccttttgtggtgatgggttgccttttctacgagcatttggaaggagtgatcaaataccgaaattgaactttctaaaacctacacatagcatgcgtttaaattctattatataaagccccaagtgctttaccttctaaaacatgcttctctataggtgcaaagttataagatatgtagaagaaaacatccatcagaatcttctggagaatatggtcagagtcttaaacaggcccagtgctgagttctttgtccacttagtcacacatcttttgtgggaatgggaaaggaaggagacagccaaactctgacaaaggcttttccttatagaataacccaaagcctaggtgagggttgatatataatgtcccatgatttaatatatgtggtttgggggaaaggacaagaaaaaactataattccacatataagaaggtagttgcccatttacaagttccagttatgtgtgtaaaacagaaaaattaagtaccaaacctattaggaaatttttttaaaaagtggatttaacttaaattactgtgtacttgaggttggctttggatatggattttctaaaaagtgatgttttattgtttatcatctaatggctgtaaactgtagtactagaataaaaaaaatggaaaatca

SEQ ID NO: 452084 - DNA, 888 bp, Homo sapiens
agcggacgctgtcaggttctctgagctgtgattatgtgttcagaaggcagtctcagtgaacttctcaaagtgagaaggttgtagcttttaatacagtctcagaagcctatgggacaaagttttctggacacggttcatcccttcttgttgctctgccctgaaaataacctggctagtcaccctttcaagatcctaattatctcatggctaatgaacgcatgaacctcatgaacatggccaagctgagtatcaagggcttgattgaatcagctctgaacctggggaggactcttgactctgactatgcacctctccagcaattctttgtggtgatggagcactgtctgaaacatggcttgaaagctaaaaaaacttttctcggacaaaataaatccttctgggggcctctagaactggtagaaaagcttgttccagaagccgcagagataacagcaagtgttaaagatcttccaggacttaagacaccagtaggtagaggaagagcctggcttcgtttggcattaatgcaaaagaaactttcagaatatatgaaagctttgatcaataagaaagaacttctcagtgaattctacgaacccaatgccctcatgatggaagaagaaggagccataattgctggtctgttggtgggtctgaatgtcattgatgccaatttctgtatgaaaggagaagacttggactctcaggttggagttatagatttttcaatgtatctcaaggacgggaacagcagtaaaggtactgaaggagacgggtcagattactgcaattctggaccccgcaagactatgttggaagaaactggaccgaactttgaatgcttctggtaaaaaactttcaggccaaagtgaatgcccttaaaaaccc

SEQ ID NO: 452085 - DNA, 628 bp, Homo sapiens
tcatgttattataaaaattaagagctggaagcataatgataggattatccgagttgtattatggtggtaggactacctatttataattggtttagtttccagatagtctatagtgtgattatattaatattgtaggtaaaaaatgcatattctgaaagtactaatatttctggcactaagaaaaactaaccagctccctgtgtggtttaggatcagctgctgctctctgaaaagccacagttgtgtcagctatgccaggaagacggcagcctaacaaaggtaactgtgatgagaaacggacaggcttttcatagggatgtctacagcagcccccagtccctccccaggagtaacagggactttcccgcatagagtgcagagtgcatgcagagtgctgggagtggggtgaaaagcaaaaggggcaagcatttactgggtacctgttttttcagtcataataattcatgtcagaaaattcccattaaaataaacataaatagccaggcgcggtgactcacgcctgtaatcccagcattttgggaggccgaggcgggccgatcacaaggtcaggagttcaagaccagcctgatcaacatggtaaaaccccgtctgtactaaaaatacaaaa

SEQ ID NO: 452086 - DNA, 7868 bp, Homo sapiens
agccattttggtcaacaccctgcttactgcgcacggccaatcctatgagaactcagcatcccagctcatctgagcagatcctggaagtgatttctgcagctcaggattttttttttaagctacattgaaaatataggtttattttttgttcaggtttttcttttatattttttttctgcacaaaggaggaggatttttcacttactcatatcgaggccagatttttaaagccagctaaggcagcatcagctgtgcgggatttaaagcctatagctcagctgaaaaaaaaggtggggggcagggaagggaagataaaaggagaggaagctgggagaagacaagcatcatcttattttgctatgtggtaggaactgtctataagatagtgtagaattgtttatcttgagcagtttgttcttaacctataaggtatttttccttttttttttttttaaacctcccccacccttttcctgaaagctttgtttcagagctttgtattgggtttttttggtgaggaggttgtatttatttttttggtgtgtgtgtgtgagtgtgtgtgtgtctgtgtgtgtgttgtggtcccagctgagtcatcatgtctgctctgacgcctccgaccgatatgccaacccccaccactgacaagatcacacaggctgccatggagaccatctacctttgcaaattccgagtgtccatggatggagaatggctctgcctgcgagagctggatgacatctcacttacacctgacccagagcctacccatgaagatcctaattatctcatggctaatgaacgcatgaacctcatgaacatggccaagctgagtatcaagggcttgattgaatcagctctgaacctggggaggactcttgactctgactatgcacctctccagcaattctttgtggtgatggagcactgtctgaaacatggcttgaaagctaaaaaaacttttctcggacaaaataaatccttctgggggcctctagaactggtagaaaagcttgttccagaagccgcagagataacagcaagtgttaaagatcttccaggacttaagacaccagtaggtagaggaagagcctggcttcgtttggcattaatgcaaaagaaactttcagaatatatgaaagctttgatcaataagaaagaacttctcagtgaattctacgaacccaatgccctcatgatggaagaagaaggagccataattgctggtctgttggtgggtctgaatgtcattgatgccaatttctgtatgaaaggagaagacttggactctcaggttggagttatagatttttcaatgtatctcaaggacgggaacagcagtaaaggtactgaaggagacggtcagattactgcaattctggaccagaagaactatgtagaagaactgaacagacatttgaatgctactgtaaacaaccttcaggcaaaagtagatgcattagaaaaatccaacactaaactgacagaggagcttgcagttgcaaacaacaggatcattaccttacaagaagaaatggaacgagttaaagaggaaagttcctacatactggaatccaatcggaagggtcccaagcaagacagaactgcagaagggcaagcactaagtgaagcaagaaagcatttaaaagaagagacacaattacgattggatgttgagaaagaactggagatgcagatcagcatgaggcaggagatggaattggctatgaagatgctggagaaggatgtctgtgagaagcaggatgccctggtatctcttcggcagcagctggatgacctcagagctctcaagcatgaacttgcctttaagctgcagagttcagacttaggagtaaaacagaaaagtgaactaaacagtcgcttggaagagaagactaatcagatggctgctaccattaaacaacttgaacaaagtgaaaaggatttggtgaaacaggcaaagaccttaaatagtgcagcaaataaactgatcccaaaacatcattaggcatttttaagttggtcacgtcgcaagtccgatatcacaacttaattgtaaaaggaagaaatctgaaagttactacatttaagctctgattctatataaaatgtcaccaaaaagttgactttgaatttgttggacttttaaaaaaccagttggaaatataggttgggtttttttcttattgttttctccccagggttagaaaaattggtataagttcctaattaaaagctgaataaactttgagaaattatttctgagttgaccaataaataaaaataccactttctttaaaaaagcctagggaattgaagctctgtacatatactaatgatgcctttacaacccagtccttgataataccagattctcggtgcattgttcatgtctgtatctgcaagcctgttctgccattgcagtgtgatgaacctagaggtaactaccatgtgaacttgaactcttctaaaatagttctgtgtctcttagaccatgaccccttttcacttttgttatataggtttaatccccaagccaaggatagtacttagtatttcactacacttctattctcagtaaccaagattgcttgcaactttttttgccttggtgacttttgaaaaaaaaagaaaagaaaaagcagcatccttatatttctttaaaatacatagaaataaagttagtaattaggtaacctatgataacataataatgtggacgcctggggaaaccctcctcatgtttgtcatcttctacctctgccattttcctgcaattccgcttcctacttaggcagttcagagagaacaattctaataaaaacactcctctcctattaacaaaaaatgatgcagtacccatttttcgtatcctgcttttcttatattggagtaaaaaggacagggtatagacatgaatgatgatattctgcctggcctgtcatttcttacctggaaacatttacttaagagtttctgttactttttgttcagatggggatttgctaaaggttctgggaagctaataattgaattattagaaaaacatttcagaatagggaagtaaatgataaacttatattctttattattatttagtacaaaaatagattcccagtagatatccacaagcaatattagcagggcttctgtttctaagtgaccacagactaaccctttctaggctttaacattgtaaataatcctataaacagtttgattttttaagatgatttttgatttgaagagacaggctttacataagccttcattccttcaaaaggtcctgacaaaatacttgggtttttttctctttttttcattctggtatgctttgcagcatttcagctgctttggtggggacacagataaccccttcgcttccagctcttaaaattctttatctttttcttggcaaaaccagaattaagagtgtaagatagattccatgtgtgcttatataggtccctgcacagattggacttgaaccaaaattaagtccaaagaacatatgtttagaccaacttcatggaagtggaagatcctgtgctcttgaacttattttaattcttataatttgcacctatataaacaaagctcctactgtattcttctcttcatcaaccttttgtggtgatgggttgccttttctacgagcatttggaaggagtgatcaaataccgaaattgaactttctaaaacctacacatagcatgcgtttaaattctattatataaagccccaagtgctttaccttctaaaacatgcttctctataggtgcaaagttataagatatgtagaagaaaacatccatcagaatcttctggagaatatggtcagagtcttaaacaggcccagtgctgagttctttgtccacttagtcacacatcttttgtgggaatgggaaaggaaggagacagccaaactctgacaaaggcttttccttatagaataacccaaagcctaggtgagggttgatatataatgtcccatgatttaatatatgtggtttgggggaaaggacaagaaaaaactataattccacatataagaaggtagttgcccatttacaagttccagttatgtgtgtaaaacagaaaaattaagtaccaaacctattaggaaatttttttaaaaagtggatttaacttaaattactgtgtacttgaggttggctttggatatggattttctaaaaagtgatgttttattgtttatcatctaatggctgtaaactgtagtactagaataaaaaaaatggaaaatcagcttttcctctgcctggttcaccttcatcttacttttctttagaatttgtttcttctccatcttttcccccccataatttcttcacctgtgtcctgcaaagtttttttcctctctctgtctctctgtgcattcttccttgggttattttattttgtgttgtgaacttggtcttcttccccaccatggcttttgttttttatcacaagttcatgtggctcacatccagattgcgccaggctgagcgaagccgccaatctgctgagttggacaaccggctcttcaaacaggactttggagacaagatcaacagtctgcagctggaagtcgaggagctcaccaggcagcggtgaagagggggtagcttgagctgacagggtggtcatgggtaattcttagggtagacagcaagaaaaggggtctcatgacttccagccaggttggctctgtctttgcaatgtcctttctctggaattggaattcagaaagcttcacgtacttcaacattccccaaatccgatcaacatgctttgtgatcaaagaattaggaaattagagcccaagatcccagataaatagtaattattagccaaaataacactaataataatatgtaatatttcctgaattcttactgtgtgccagatactttaggcacttcacatgcaaactctcctaatatcttcatatcaaccctattagtgatattattgcctccactttcagattaaagtagagcttaaggctgggcgcagtggttcatgcctgtaatcccagcactttgggaggccaaggcaggtgtatcacctgaggtcaggagttccagaccagcctggccaagatggtgaaaccccatctctactaaaaatacaaaaatttgccagacatagtggtgggtgccagtaatcccagctactcgggaggctgaggcaggagaattgcttgaacctaggaaatggaggttacggtgacctgagatcatgccactgcactccagcctggcaacagaacaagactccatctcaaaaaaaggtagagattagacaggttaaatgtgtccagattcacacagttaagcttagaagtagcaacattatcatttaaaaacctgtctctctgacagcaagcccttaaccattcgtaattactgcactttaagacaaggggttggcattctttagagaatatgtctgtatagaattccaatttttcatccttttcctctccaacttacctcaggaaccagcttgagttagaactaaaacaggaaaaagaaagaagattacaaaacgacaggagcatcccaggaaggggttcccagaagtcagaatccaagatggatgggaagcacaaaatgcaagaggaaaatgttaaactaaaaaagcccctggaagaaagccacaggctgcaaccccaccctatggatgaacaggatcagctgctgctctctgaaaagccacagttgtgtcagctatgccaggaagacggcagcctaacaaagaatgtgtgtaagaactgcagcggaaccttctgtgatgcctgttcaacaaatgaactgcctcttccttcaagtatcaagcttgagcgagtttgcaatccctgtcacaagcatctgatgaagcaatattctaccagcccatcataagactggaggccaagacctggaccaaaacgtttatgcaggctcctctgtacctgtgttttagctgtcaggatctcatagagcccagttcttagagtcaactaaagagttgataggaatttactaggtccagggagaaaaggcagtggttggggttactggaaattttgctcattttctctaatgactgtatgaataaaagtgaacttacttgagcctttctcttctaaatctaaacaacctgatattgaaggtttgctttatagcatatctttggaaaggcaactcatttttatgattagtgatactggggtggatttaataggagagagaatccaggcagataagaataaaaaggaaaatgatcatctccttctatagcatttgcagattcaagggggagaggtagatgctgagatcaaaatgacagttgttacttatttttccaggtgctgttagtataaacattgtttcctcttcacccctgctaactacctctttaaagtatttctaccaaactgtgaacccaatctcagggaaaagaaattaaaaagtaatataaattctgcatatattaaaaacaatattgtaatatgttataatttcaggaccagaattttctggtctttacctacaagggttttcattatcaaaaaaaagaacatttgtttttctactttatgacttcaaagtaaataactgcccttttcagaatctccttccacaaaacaagccaactcttccccattccctccatcttcctttccaagtcataatggaaattgtaaggagttttaaaaatagggtttggcttttgcaaatagaagatattgattaaagcaaagtcaaatatagagtaaaataagtttaatttgttttcttaagacagggtcttgctctgttgcacaagctggagggcagtagtgcaatcacagctcactgaatccctgttctcccgggcctcaagcaatcttcccaccttagcctcccaagtagctgggactggctttttttttttttttttggccggggagggggtctcattggttgctcagcctggtctcaaactcctgggcttaagcagtcctcccaccttgacttccacagtgccgagattacaggcatgagccaccacacctggccaagtttaatttgttcatggctgagaacagttagctcggaatacttacattgttttttgaataaggaattccttattctgagtgagtcacgaatgagagctgatagatgctttcttgaaaagggcaatacagtcatcccttggtatccatgggggattggttccaggaacccaacttgatatcagaatccatgggtgctcaagtcccattatagagaatgggttatatggtatttgcatataacctacatacatcctcctgtgtactttaaatcatctgaagatgattacttatacctaataaaatacctacacatcacttcatttgcatggattcaacatagtgcttggtgttcagtaaattcaagttttgcttttttggaactttgtggaatttttctttttctgaatatttttgattggcagttggttgaagccatggatgcagaacccatggatatggagggctgactgtacttacttacatatctatctatctttgagtaacaaactctttgggggaaaagagggaagtgtattgagcaagagaaggcaaaaaacattacataatattttgattctgttacgtgtgtctatagattgtttcattctaatcaagacctaagaaggtatgattctgtgactgatttagaattctggggtggaaatatcctggaaccatgttttttaataaattctgtctcttggaaagagttaacaacagcctgggaaagagttgttattccaaaagtcagcctgttacttggtgaagctgaagtttaagagttctggggaaaaataaaatctagtaattccag

SEQ ID NO: 452087 - DNA, 7922 bp, Homo sapiens
agccattttggtcaacaccctgcttactgcgcacggccaatcctatgagaactcagcatcccagctcatctgagcagatcctggaagtgatttctgcagctcaggattttttttttaagctacattgaaaatataggtttattttttgttcaggtttttcttttatattttttttctgcacaaaggaggaggatttttcacttactcatatcgaggccagatttttaaagccagctaaggcagcatcagctgtgcgggatttaaagcctatagctcagctgaaaaaaaaggtggggggcagggaagggaagataaaaggagaggaagctgggagaagacaagcatcatcttattttgctatgtggtaggaactgtctataagatagtgtagaattgtttatcttgagcagtttgttcttaacctataaggtatttttccttttttttttttttaaacctcccccacccttttcctgaaagctttgtttcagagctttgtattgggtttttttggtgaggaggttgtatttatttttttggtgtgtgtgtgtgagtgtgtgtgtgtctgtgtgtgtgttgtggtcccagctgagtcatcatgtctgctctgacgcctccgaccgatatgccaacccccaccactgacaagatcacacaggctgccatggagaccatctacctttgcaaattccgagtgtccatggatggagaatggctctgcctgcgagagctggatgacatctcacttacacctgacccagagcctacccatgaagactcttgggaggatttgacagatttggtggagcaaatgcgcgatgatacagaagatcctaattatctcatggctaatgaacgcatgaacctcatgaacatggccaagctgagtatcaagggcttgattgaatcagctctgaacctggggaggactcttgactctgactatgcacctctccagcaattctttgtggtgatggagcactgtctgaaacatggcttgaaagctaaaaaaacttttctcggacaaaataaatccttctgggggcctctagaactggtagaaaagcttgttccagaagccgcagagataacagcaagtgttaaagatcttccaggacttaagacaccagtaggtagaggaagagcctggcttcgtttggcattaatgcaaaagaaactttcagaatatatgaaagctttgatcaataagaaagaacttctcagtgaattctacgaacccaatgccctcatgatggaagaagaaggagccataattgctggtctgttggtgggtctgaatgtcattgatgccaatttctgtatgaaaggagaagacttggactctcaggttggagttatagatttttcaatgtatctcaaggacgggaacagcagtaaaggtactgaaggagacggtcagattactgcaattctggaccagaagaactatgtagaagaactgaacagacatttgaatgctactgtaaacaaccttcaggcaaaagtagatgcattagaaaaatccaacactaaactgacagaggagcttgcagttgcaaacaacaggatcattaccttacaagaagaaatggaacgagttaaagaggaaagttcctacatactggaatccaatcggaagggtcccaagcaagacagaactgcagaagggcaagcactaagtgaagcaagaaagcatttaaaagaagagacacaattacgattggatgttgagaaagaactggagatgcagatcagcatgaggcaggagatggaattggctatgaagatgctggagaaggatgtctgtgagaagcaggatgccctggtatctcttcggcagcagctggatgacctcagagctctcaagcatgaacttgcctttaagctgcagagttcagacttaggagtaaaacagaaaagtgaactaaacagtcgcttggaagagaagactaatcagatggctgctaccattaaacaacttgaacaaagtgaaaaggatttggtgaaacaggcaaagaccttaaatagtgcagcaaataaactgatcccaaaacatcattaggcatttttaagttggtcacgtcgcaagtccgatatcacaacttaattgtaaaaggaagaaatctgaaagttactacatttaagctctgattctatataaaatgtcaccaaaaagttgactttgaatttgttggacttttaaaaaaccagttggaaatataggttgggtttttttcttattgttttctccccagggttagaaaaattggtataagttcctaattaaaagctgaataaactttgagaaattatttctgagttgaccaataaataaaaataccactttctttaaaaaagcctagggaattgaagctctgtacatatactaatgatgcctttacaacccagtccttgataataccagattctcggtgcattgttcatgtctgtatctgcaagcctgttctgccattgcagtgtgatgaacctagaggtaactaccatgtgaacttgaactcttctaaaatagttctgtgtctcttagaccatgaccccttttcacttttgttatataggtttaatccccaagccaaggatagtacttagtatttcactacacttctattctcagtaaccaagattgcttgcaactttttttgccttggtgacttttgaaaaaaaaagaaaagaaaaagcagcatccttatatttctttaaaatacatagaaataaagttagtaattaggtaacctatgataacataataatgtggacgcctggggaaaccctcctcatgtttgtcatcttctacctctgccattttcctgcaattccgcttcctacttaggcagttcagagagaacaattctaataaaaacactcctctcctattaacaaaaaatgatgcagtacccatttttcgtatcctgcttttcttatattggagtaaaaaggacagggtatagacatgaatgatgatattctgcctggcctgtcatttcttacctggaaacatttacttaagagtttctgttactttttgttcagatggggatttgctaaaggttctgggaagctaataattgaattattagaaaaacatttcagaatagggaagtaaatgataaacttatattctttattattatttagtacaaaaatagattcccagtagatatccacaagcaatattagcagggcttctgtttctaagtgaccacagactaaccctttctaggctttaacattgtaaataatcctataaacagtttgattttttaagatgatttttgatttgaagagacaggctttacataagccttcattccttcaaaaggtcctgacaaaatacttgggtttttttctctttttttcattctggtatgctttgcagcatttcagctgctttggtggggacacagataaccccttcgcttccagctcttaaaattctttatctttttcttggcaaaaccagaattaagagtgtaagatagattccatgtgtgcttatataggtccctgcacagattggacttgaaccaaaattaagtccaaagaacatatgtttagaccaacttcatggaagtggaagatcctgtgctcttgaacttattttaattcttataatttgcacctatataaacaaagctcctactgtattcttctcttcatcaaccttttgtggtgatgggttgccttttctacgagcatttggaaggagtgatcaaataccgaaattgaactttctaaaacctacacatagcatgcgtttaaattctattatataaagccccaagtgctttaccttctaaaacatgcttctctataggtgcaaagttataagatatgtagaagaaaacatccatcagaatcttctggagaatatggtcagagtcttaaacaggcccagtgctgagttctttgtccacttagtcacacatcttttgtgggaatgggaaaggaaggagacagccaaactctgacaaaggcttttccttatagaataacccaaagcctaggtgagggttgatatataatgtcccatgatttaatatatgtggtttgggggaaaggacaagaaaaaactataattccacatataagaaggtagttgcccatttacaagttccagttatgtgtgtaaaacagaaaaattaagtaccaaacctattaggaaatttttttaaaaagtggatttaacttaaattactgtgtacttgaggttggctttggatatggattttctaaaaagtgatgttttattgtttatcatctaatggctgtaaactgtagtactagaataaaaaaaatggaaaatcagcttttcctctgcctggttcaccttcatcttacttttctttagaatttgtttcttctccatcttttcccccccataatttcttcacctgtgtcctgcaaagtttttttcctctctctgtctctctgtgcattcttccttgggttattttattttgtgttgtgaacttggtcttcttccccaccatggcttttgttttttatcacaagttcatgtggctcacatccagattgcgccaggctgagcgaagccgccaatctgctgagttggacaaccggctcttcaaacaggactttggagacaagatcaacagtctgcagctggaagtcgaggagctcaccaggcagcggtgaagagggggtagcttgagctgacagggtggtcatgggtaattcttagggtagacagcaagaaaaggggtctcatgacttccagccaggttggctctgtctttgcaatgtcctttctctggaattggaattcagaaagcttcacgtacttcaacattccccaaatccgatcaacatgctttgtgatcaaagaattaggaaattagagcccaagatcccagataaatagtaattattagccaaaataacactaataataatatgtaatatttcctgaattcttactgtgtgccagatactttaggcacttcacatgcaaactctcctaatatcttcatatcaaccctattagtgatattattgcctccactttcagattaaagtagagcttaaggctgggcgcagtggttcatgcctgtaatcccagcactttgggaggccaaggcaggtgtatcacctgaggtcaggagttccagaccagcctggccaagatggtgaaaccccatctctactaaaaatacaaaaatttgccagacatagtggtgggtgccagtaatcccagctactcgggaggctgaggcaggagaattgcttgaacctaggaaatggaggttacggtgacctgagatcatgccactgcactccagcctggcaacagaacaagactccatctcaaaaaaaggtagagattagacaggttaaatgtgtccagattcacacagttaagcttagaagtagcaacattatcatttaaaaacctgtctctctgacagcaagcccttaaccattcgtaattactgcactttaagacaaggggttggcattctttagagaatatgtctgtatagaattccaatttttcatccttttcctctccaacttacctcaggaaccagcttgagttagaactaaaacaggaaaaagaaagaagattacaaaacgacaggagcatcccaggaaggggttcccagaagtcagaatccaagatggatgggaagcacaaaatgcaagaggaaaatgttaaactaaaaaagcccctggaagaaagccacaggctgcaaccccaccctatggatgaacaggatcagctgctgctctctgaaaagccacagttgtgtcagctatgccaggaagacggcagcctaacaaagaatgtgtgtaagaactgcagcggaaccttctgtgatgcctgttcaacaaatgaactgcctcttccttcaagtatcaagcttgagcgagtttgcaatccctgtcacaagcatctgatgaagcaatattctaccagcccatcataagactggaggccaagacctggaccaaaacgtttatgcaggctcctctgtacctgtgttttagctgtcaggatctcatagagcccagttcttagagtcaactaaagagttgataggaatttactaggtccagggagaaaaggcagtggttggggttactggaaattttgctcattttctctaatgactgtatgaataaaagtgaacttacttgagcctttctcttctaaatctaaacaacctgatattgaaggtttgctttatagcatatctttggaaaggcaactcatttttatgattagtgatactggggtggatttaataggagagagaatccaggcagataagaataaaaaggaaaatgatcatctccttctatagcatttgcagattcaagggggagaggtagatgctgagatcaaaatgacagttgttacttatttttccaggtgctgttagtataaacattgtttcctcttcacccctgctaactacctctttaaagtatttctaccaaactgtgaacccaatctcagggaaaagaaattaaaaagtaatataaattctgcatatattaaaaacaatattgtaatatgttataatttcaggaccagaattttctggtctttacctacaagggttttcattatcaaaaaaaagaacatttgtttttctactttatgacttcaaagtaaataactgcccttttcagaatctccttccacaaaacaagccaactcttccccattccctccatcttcctttccaagtcataatggaaattgtaaggagttttaaaaatagggtttggcttttgcaaatagaagatattgattaaagcaaagtcaaatatagagtaaaataagtttaatttgttttcttaagacagggtcttgctctgttgcacaagctggagggcagtagtgcaatcacagctcactgaatccctgttctcccgggcctcaagcaatcttcccaccttagcctcccaagtagctgggactggctttttttttttttttttggccggggagggggtctcattggttgctcagcctggtctcaaactcctgggcttaagcagtcctcccaccttgacttccacagtgccgagattacaggcatgagccaccacacctggccaagtttaatttgttcatggctgagaacagttagctcggaatacttacattgttttttgaataaggaattccttattctgagtgagtcacgaatgagagctgatagatgctttcttgaaaagggcaatacagtcatcccttggtatccatgggggattggttccaggaacccaacttgatatcagaatccatgggtgctcaagtcccattatagagaatgggttatatggtatttgcatataacctacatacatcctcctgtgtactttaaatcatctgaagatgattacttatacctaataaaatacctacacatcacttcatttgcatggattcaacatagtgcttggtgttcagtaaattcaagttttgcttttttggaactttgtggaatttttctttttctgaatatttttgattggcagttggttgaagccatggatgcagaacccatggatatggagggctgactgtacttacttacatatctatctatctttgagtaacaaactctttgggggaaaagagggaagtgtattgagcaagagaaggcaaaaaacattacataatattttgattctgttacgtgtgtctatagattgtttcattctaatcaagacctaagaaggtatgattctgtgactgatttagaattctggggtggaaatatcctggaaccatgttttttaataaattctgtctcttggaaagagttaacaacagcctgggaaagagttgttattccaaaagtcagcctgttacttggtgaagctgaagtttaagagttctggggaaaaataaaatctagtaattccag

SEQ ID NO: 452088 - DNA, 7194 bp, Homo sapiens
tttgaatacttggatgctaggggatatagaggcactgagagataggtgtcctccaaggatctattctggatctttctctcccttctttaacccttttctcttatctcccttttctttctcctgggtagttctgtagcttccactgtcacctccagtgtgttttcccagctcttaccttcatctggagaccagtcttgagttttcatcctttgggcagctatcttccaccagtatctacaattcagtctgcccaaagcacatcttcttcctatgctactctctttctgtgcttatgtgaaaccaccattttctctctggcaacttagcagccaagagaaatggctgagtcttcaaggatgaatgtgacgtggtacccaaggtcatttgatgtttctacccttaacacctgtttgtcacccttcttgcacttgagcaaaactaaactgctggtccctgtacttcccatttttcccatttatttctttcccaatagttccaccaattagaaatgtcctaattcttcccactcccttattcgtcagatacatttttaagtttaggctcaaatgccacctccccagagtttcctctgatacctctttgcagctagaaatgatctgtctttctgggaactcccatagcttcatactcatatctatctatactgcttatggcacttctcactgtctactgtaccttttaactctttatatatgtctcctccgatgcgagtgtaagctccctgagattagttaacgaatcttttaagttcccgtattagatctgtcgcagtgccttgaatatacaagcattcattcagtagatatatgaatgaatggattaatgggtgatttcttatattcagatgattcttaaccagtaagggtcctgaacagcagtgcatattaatgttaactcaaaacttaatggcaaatttataaataaacctgaaacctcttacatagccaaatacaaatgtatcagtctacctaggaaagatggttaggtacttgctcataaacagttatatgtttatgatttaacaaaatgattttactgttcataaattgtgcttttgaaatgaaatgtatcaaatttcttttcaatgatgttttgacttggaatttaaagcaaacagaaagagaataatgacttatctctttgagtattaagctgacttattctcttgctatttttgtgtttcctgtttatccattttctcattctcctttcacttcattgtcatttttattttatttagtgaaaaggatttggtgaaacaggcaaagaccttaaatagtgcagcaaataaactgatcccaaaacatcattaggcatttttaagttggtcacgtcgcaagtccgatatcacaacttaattgtaaaaggaagaaatctgaaagttactacatttaagctctgattctatataaaatgtcaccaaaaagttgactttgaatttgttggacttttaaaaaaccagttggaaatataggttgggtttttttcttattgttttctccccagggttagaaaaattggtataagttcctaattaaaagctgaataaactttgagaaattatttctgagttgaccaataaataaaaataccactttctttaaaaaagcctagggaattgaagctctgtacatatactaatgatgcctttacaacccagtccttgataataccagattctcggtgcattgttcatgtctgtatctgcaagcctgttctgccattgcagtgtgatgaacctagaggtaactaccatgtgaacttgaactcttctaaaatagttctgtgtctcttagaccatgaccccttttcacttttgttatataggtttaatccccaagccaaggatagtacttagtatttcactacacttctattctcagtaaccaagattgcttgcaactttttttgccttggtgacttttgaaaaaaaaagaaaagaaaaagcagcatccttatatttctttaaaatacatagaaataaagttagtaattaggtaacctatgataacataataatgtggacgcctggggaaaccctcctcatgtttgtcatcttctacctctgccattttcctgcaattccgcttcctacttaggcagttcagagagaacaattctaataaaaacactcctctcctattaacaaaaaatgatgcagtacccatttttcgtatcctgcttttcttatattggagtaaaaaggacagggtatagacatgaatgatgatattctgcctggcctgtcatttcttacctggaaacatttacttaagagtttctgttactttttgttcagatggggatttgctaaaggttctgggaagctaataattgaattattagaaaaacatttcagaatagggaagtaaatgataaacttatattctttattattatttagtacaaaaatagattcccagtagatatccacaagcaatattagcagggcttctgtttctaagtgaccacagactaaccctttctaggctttaacattgtaaataatcctataaacagtttgattttttaagatgatttttgatttgaagagacaggctttacataagccttcattccttcaaaaggtcctgacaaaatacttgggtttttttctctttttttcattctggtatgctttgcagcatttcagctgctttggtggggacacagataaccccttcgcttccagctcttaaaattctttatctttttcttggcaaaaccagaattaagagtgtaagatagattccatgtgtgcttatataggtccctgcacagattggacttgaaccaaaattaagtccaaagaacatatgtttagaccaacttcatggaagtggaagatcctgtgctcttgaacttattttaattcttataatttgcacctatataaacaaagctcctactgtattcttctcttcatcaaccttttgtggtgatgggttgccttttctacgagcatttggaaggagtgatcaaataccgaaattgaactttctaaaacctacacatagcatgcgtttaaattctattatataaagccccaagtgctttaccttctaaaacatgcttctctataggtgcaaagttataagatatgtagaagaaaacatccatcagaatcttctggagaatatggtcagagtcttaaacaggcccagtgctgagttctttgtccacttagtcacacatcttttgtgggaatgggaaaggaaggagacagccaaactctgacaaaggcttttccttatagaataacccaaagcctaggtgagggttgatatataatgtcccatgatttaatatatgtggtttgggggaaaggacaagaaaaaactataattccacatataagaaggtagttgcccatttacaagttccagttatgtgtgtaaaacagaaaaattaagtaccaaacctattaggaaatttttttaaaaagtggatttaacttaaattactgtgtacttgaggttggctttggatatggattttctaaaaagtgatgttttattgtttatcatctaatggctgtaaactgtagtactagaataaaaaaaatggaaaatcagcttttcctctgcctggttcaccttcatcttacttttctttagaatttgtttcttctccatcttttcccccccataatttcttcacctgtgtcctgcaaagtttttttcctctctctgtctctctgtgcattcttccttgggttattttattttgtgttgtgaacttggtcttcttccccaccatggcttttgttttttatcacaagttcatgtggctcacatccagattgcgccaggctgagcgaagccgccaatctgctgagttggacaaccggctcttcaaacaggactttggagacaagatcaacagtctgcagctggaagtcgaggagctcaccaggcagcggtgaagagggggtagcttgagctgacagggtggtcatgggtaattcttagggtagacagcaagaaaaggggtctcatgacttccagccaggttggctctgtctttgcaatgtcctttctctggaattggaattcagaaagcttcacgtacttcaacattccccaaatccgatcaacatgctttgtgatcaaagaattaggaaattagagcccaagatcccagataaatagtaattattagccaaaataacactaataataatatgtaatatttcctgaattcttactgtgtgccagatactttaggcacttcacatgcaaactctcctaatatcttcatatcaaccctattagtgatattattgcctccactttcagattaaagtagagcttaaggctgggcgcagtggttcatgcctgtaatcccagcactttgggaggccaaggcaggtgtatcacctgaggtcaggagttccagaccagcctggccaagatggtgaaaccccatctctactaaaaatacaaaaatttgccagacatagtggtgggtgccagtaatcccagctactcgggaggctgaggcaggagaattgcttgaacctaggaaatggaggttacggtgacctgagatcatgccactgcactccagcctggcaacagaacaagactccatctcaaaaaaaggtagagattagacaggttaaatgtgtccagattcacacagttaagcttagaagtagcaacattatcatttaaaaacctgtctctctgacagcaagcccttaaccattcgtaattactgcactttaagacaaggggttggcattctttagagaatatgtctgtatagaattccaatttttcatccttttcctctccaacttacctcaggaaccagcttgagttagaactaaaacaggaaaaagaaagaagattacaaaacgacaggagcatcccaggaaggggttcccagaagtcagaatccaagatggatgggaagcacaaaatgcaagaggaaaatgttaaactaaaaaagcccctggaagaaagccacaggctgcaaccccaccctatggatgaacaggatcagctgctgctctctgaaaagccacagttgtgtcagctatgccaggaagacggcagcctaacaaagaatgtgtgtaagaactgcagcggaaccttctgtgatgcctgttcaacaaatgaactgcctcttccttcaagtatcaagcttgagcgagtttgcaatccctgtcacaagcatctgatgaagcaatattctaccagcccatcataagactggaggccaagacctggaccaaaacgtttatgcaggctcctctgtacctgtgttttagctgtcaggatctcatagagcccagttcttagagtcaactaaagagttgataggaatttactaggtccagggagaaaaggcagtggttggggttactggaaattttgctcattttctctaatgactgtatgaataaaagtgaacttacttgagcctttctcttctaaatctaaacaacctgatattgaaggtttgctttatagcatatctttggaaaggcaactcatttttatgattagtgatactggggtggatttaataggagagagaatccaggcagataagaataaaaaggaaaatgatcatctccttctatagcatttgcagattcaagggggagaggtagatgctgagatcaaaatgacagttgttacttatttttccaggtgctgttagtataaacattgtttcctcttcacccctgctaactacctctttaaagtatttctaccaaactgtgaacccaatctcagggaaaagaaattaaaaagtaatataaattctgcatatattaaaaacaatattgtaatatgttataatttcaggaccagaattttctggtctttacctacaagggttttcattatcaaaaaaaagaacatttgtttttctactttatgacttcaaagtaaataactgcccttttcagaatctccttccacaaaacaagccaactcttccccattccctccatcttcctttccaagtcataatggaaattgtaaggagttttaaaaatagggtttggcttttgcaaatagaagatattgattaaagcaaagtcaaatatagagtaaaataagtttaatttgttttcttaagacagggtcttgctctgttgcacaagctggagggcagtagtgcaatcacagctcactgaatccctgttctcccgggcctcaagcaatcttcccaccttagcctcccaagtagctgggactggctttttttttttttttttggccggggagggggtctcattggttgctcagcctggtctcaaactcctgggcttaagcagtcctcccaccttgacttccacagtgccgagattacaggcatgagccaccacacctggccaagtttaatttgttcatggctgagaacagttagctcggaatacttacattgttttttgaataaggaattccttattctgagtgagtcacgaatgagagctgatagatgctttcttgaaaagggcaatacagtcatcccttggtatccatgggggattggttccaggaacccaacttgatatcagaatccatgggtgctcaagtcccattatagagaatgggttatatggtatttgcatataacctacatacatcctcctgtgtactttaaatcatctgaagatgattacttatacctaataaaatacctacacatcacttcatttgcatggattcaacatagtgcttggtgttcagtaaattcaagttttgcttttttggaactttgtggaatttttctttttctgaatatttttgattggcagttggttgaagccatggatgcagaacccatggatatggagggctgactgtacttacttacatatctatctatctttgagtaacaaactctttgggggaaaagagggaagtgtattgagcaagagaaggcaaaaaacattacataatattttgattctgttacgtgtgtctatagattgtttcattctaatcaagacctaagaaggtatgattctgtgactgatttagaattctggggtggaaatatcctggaaccatgttttttaataaattctgtctcttggaaagagttaacaacagcctgggaaagagttgttattccaaaagtcagcctgttacttggtgaagctgaagtttaagagttctggggaaaaataaaatctagtaattccag

SEQ ID NO: 452089 - DNA, 7810 bp, Homo sapiens
agccattttggtcaacaccctgcttactgcgcacggccaatcctatgagaactcagcatcccagctcatctgagcagatcctggaagtgatttctgcagctcaggattttttttttaagctacattgaaaatataggtttattttttgttcaggtttttcttttatattttttttctgcacaaaggaggaggatttttcacttactcatatcgaggccagatttttaaagccagctaaggcagcatcagctgtgcgggatttaaagcctatagctcagctgaagcatcatcttattttgctatgtggtaggaactgtctataagatagtgtagaattgtttatcttgagcagtttgttcttaacctataaggtatttttccttttttttttttttaaacctcccccacccttttcctgaaagctttgtttcagagctttgtattgggtttttttggtgaggaggttgtatttatttttttggtgtgtgtgtgtgagtgtgtgtgtgtctgtgtgtgtgttgtggtcccagctgagtcatcatgtctgctctgacgcctccgaccgatatgccaacccccaccactgacaagatcacacaggctgccatggagaccatctacctttgcaaattccgagtgtccatggatggagaatggctctgcctgcgagagctggatgacatctcacttacacctgacccagagcctacccatgaagatcctaattatctcatggctaatgaacgcatgaacctcatgaacatggccaagctgagtatcaagggcttgattgaatcagctctgaacctggggaggactcttgactctgactatgcacctctccagcaattctttgtggtgatggagcactgtctgaaacatggcttgaaagctaaaaaaacttttctcggacaaaataaatccttctgggggcctctagaactggtagaaaagcttgttccagaagccgcagagataacagcaagtgttaaagatcttccaggacttaagacaccagtaggtagaggaagagcctggcttcgtttggcattaatgcaaaagaaactttcagaatatatgaaagctttgatcaataagaaagaacttctcagtgaattctacgaacccaatgccctcatgatggaagaagaaggagccataattgctggtctgttggtgggtctgaatgtcattgatgccaatttctgtatgaaaggagaagacttggactctcaggttggagttatagatttttcaatgtatctcaaggacgggaacagcagtaaaggtactgaaggagacggtcagattactgcaattctggaccagaagaactatgtagaagaactgaacagacatttgaatgctactgtaaacaaccttcaggcaaaagtagatgcattagaaaaatccaacactaaactgacagaggagcttgcagttgcaaacaacaggatcattaccttacaagaagaaatggaacgagttaaagaggaaagttcctacatactggaatccaatcggaagggtcccaagcaagacagaactgcagaagggcaagcactaagtgaagcaagaaagcatttaaaagaagagacacaattacgattggatgttgagaaagaactggagatgcagatcagcatgaggcaggagatggaattggctatgaagatgctggagaaggatgtctgtgagaagcaggatgccctggtatctcttcggcagcagctggatgacctcagagctctcaagcatgaacttgcctttaagctgcagagttcagacttaggagtaaaacagaaaagtgaactaaacagtcgcttggaagagaagactaatcagatggctgctaccattaaacaacttgaacaaagtgaaaaggatttggtgaaacaggcaaagaccttaaatagtgcagcaaataaactgatcccaaaacatcattaggcatttttaagttggtcacgtcgcaagtccgatatcacaacttaattgtaaaaggaagaaatctgaaagttactacatttaagctctgattctatataaaatgtcaccaaaaagttgactttgaatttgttggacttttaaaaaaccagttggaaatataggttgggtttttttcttattgttttctccccagggttagaaaaattggtataagttcctaattaaaagctgaataaactttgagaaattatttctgagttgaccaataaataaaaataccactttctttaaaaaagcctagggaattgaagctctgtacatatactaatgatgcctttacaacccagtccttgataataccagattctcggtgcattgttcatgtctgtatctgcaagcctgttctgccattgcagtgtgatgaacctagaggtaactaccatgtgaacttgaactcttctaaaatagttctgtgtctcttagaccatgaccccttttcacttttgttatataggtttaatccccaagccaaggatagtacttagtatttcactacacttctattctcagtaaccaagattgcttgcaactttttttgccttggtgacttttgaaaaaaaaagaaaagaaaaagcagcatccttatatttctttaaaatacatagaaataaagttagtaattaggtaacctatgataacataataatgtggacgcctggggaaaccctcctcatgtttgtcatcttctacctctgccattttcctgcaattccgcttcctacttaggcagttcagagagaacaattctaataaaaacactcctctcctattaacaaaaaatgatgcagtacccatttttcgtatcctgcttttcttatattggagtaaaaaggacagggtatagacatgaatgatgatattctgcctggcctgtcatttcttacctggaaacatttacttaagagtttctgttactttttgttcagatggggatttgctaaaggttctgggaagctaataattgaattattagaaaaacatttcagaatagggaagtaaatgataaacttatattctttattattatttagtacaaaaatagattcccagtagatatccacaagcaatattagcagggcttctgtttctaagtgaccacagactaaccctttctaggctttaacattgtaaataatcctataaacagtttgattttttaagatgatttttgatttgaagagacaggctttacataagccttcattccttcaaaaggtcctgacaaaatacttgggtttttttctctttttttcattctggtatgctttgcagcatttcagctgctttggtggggacacagataaccccttcgcttccagctcttaaaattctttatctttttcttggcaaaaccagaattaagagtgtaagatagattccatgtgtgcttatataggtccctgcacagattggacttgaaccaaaattaagtccaaagaacatatgtttagaccaacttcatggaagtggaagatcctgtgctcttgaacttattttaattcttataatttgcacctatataaacaaagctcctactgtattcttctcttcatcaaccttttgtggtgatgggttgccttttctacgagcatttggaaggagtgatcaaataccgaaattgaactttctaaaacctacacatagcatgcgtttaaattctattatataaagccccaagtgctttaccttctaaaacatgcttctctataggtgcaaagttataagatatgtagaagaaaacatccatcagaatcttctggagaatatggtcagagtcttaaacaggcccagtgctgagttctttgtccacttagtcacacatcttttgtgggaatgggaaaggaaggagacagccaaactctgacaaaggcttttccttatagaataacccaaagcctaggtgagggttgatatataatgtcccatgatttaatatatgtggtttgggggaaaggacaagaaaaaactataattccacatataagaaggtagttgcccatttacaagttccagttatgtgtgtaaaacagaaaaattaagtaccaaacctattaggaaatttttttaaaaagtggatttaacttaaattactgtgtacttgaggttggctttggatatggattttctaaaaagtgatgttttattgtttatcatctaatggctgtaaactgtagtactagaataaaaaaaatggaaaatcagcttttcctctgcctggttcaccttcatcttacttttctttagaatttgtttcttctccatcttttcccccccataatttcttcacctgtgtcctgcaaagtttttttcctctctctgtctctctgtgcattcttccttgggttattttattttgtgttgtgaacttggtcttcttccccaccatggcttttgttttttatcacaagttcatgtggctcacatccagattgcgccaggctgagcgaagccgccaatctgctgagttggacaaccggctcttcaaacaggactttggagacaagatcaacagtctgcagctggaagtcgaggagctcaccaggcagcggtgaagagggggtagcttgagctgacagggtggtcatgggtaattcttagggtagacagcaagaaaaggggtctcatgacttccagccaggttggctctgtctttgcaatgtcctttctctggaattggaattcagaaagcttcacgtacttcaacattccccaaatccgatcaacatgctttgtgatcaaagaattaggaaattagagcccaagatcccagataaatagtaattattagccaaaataacactaataataatatgtaatatttcctgaattcttactgtgtgccagatactttaggcacttcacatgcaaactctcctaatatcttcatatcaaccctattagtgatattattgcctccactttcagattaaagtagagcttaaggctgggcgcagtggttcatgcctgtaatcccagcactttgggaggccaaggcaggtgtatcacctgaggtcaggagttccagaccagcctggccaagatggtgaaaccccatctctactaaaaatacaaaaatttgccagacatagtggtgggtgccagtaatcccagctactcgggaggctgaggcaggagaattgcttgaacctaggaaatggaggttacggtgacctgagatcatgccactgcactccagcctggcaacagaacaagactccatctcaaaaaaaggtagagattagacaggttaaatgtgtccagattcacacagttaagcttagaagtagcaacattatcatttaaaaacctgtctctctgacagcaagcccttaaccattcgtaattactgcactttaagacaaggggttggcattctttagagaatatgtctgtatagaattccaatttttcatccttttcctctccaacttacctcaggaaccagcttgagttagaactaaaacaggaaaaagaaagaagattacaaaacgacaggagcatcccaggaaggggttcccagaagtcagaatccaagatggatgggaagcacaaaatgcaagaggaaaatgttaaactaaaaaagcccctggaagaaagccacaggctgcaaccccaccctatggatgaacaggatcagctgctgctctctgaaaagccacagttgtgtcagctatgccaggaagacggcagcctaacaaagaatgtgtgtaagaactgcagcggaaccttctgtgatgcctgttcaacaaatgaactgcctcttccttcaagtatcaagcttgagcgagtttgcaatccctgtcacaagcatctgatgaagcaatattctaccagcccatcataagactggaggccaagacctggaccaaaacgtttatgcaggctcctctgtacctgtgttttagctgtcaggatctcatagagcccagttcttagagtcaactaaagagttgataggaatttactaggtccagggagaaaaggcagtggttggggttactggaaattttgctcattttctctaatgactgtatgaataaaagtgaacttacttgagcctttctcttctaaatctaaacaacctgatattgaaggtttgctttatagcatatctttggaaaggcaactcatttttatgattagtgatactggggtggatttaataggagagagaatccaggcagataagaataaaaaggaaaatgatcatctccttctatagcatttgcagattcaagggggagaggtagatgctgagatcaaaatgacagttgttacttatttttccaggtgctgttagtataaacattgtttcctcttcacccctgctaactacctctttaaagtatttctaccaaactgtgaacccaatctcagggaaaagaaattaaaaagtaatataaattctgcatatattaaaaacaatattgtaatatgttataatttcaggaccagaattttctggtctttacctacaagggttttcattatcaaaaaaaagaacatttgtttttctactttatgacttcaaagtaaataactgcccttttcagaatctccttccacaaaacaagccaactcttccccattccctccatcttcctttccaagtcataatggaaattgtaaggagttttaaaaatagggtttggcttttgcaaatagaagatattgattaaagcaaagtcaaatatagagtaaaataagtttaatttgttttcttaagacagggtcttgctctgttgcacaagctggagggcagtagtgcaatcacagctcactgaatccctgttctcccgggcctcaagcaatcttcccaccttagcctcccaagtagctgggactggctttttttttttttttttggccggggagggggtctcattggttgctcagcctggtctcaaactcctgggcttaagcagtcctcccaccttgacttccacagtgccgagattacaggcatgagccaccacacctggccaagtttaatttgttcatggctgagaacagttagctcggaatacttacattgttttttgaataaggaattccttattctgagtgagtcacgaatgagagctgatagatgctttcttgaaaagggcaatacagtcatcccttggtatccatgggggattggttccaggaacccaacttgatatcagaatccatgggtgctcaagtcccattatagagaatgggttatatggtatttgcatataacctacatacatcctcctgtgtactttaaatcatctgaagatgattacttatacctaataaaatacctacacatcacttcatttgcatggattcaacatagtgcttggtgttcagtaaattcaagttttgcttttttggaactttgtggaatttttctttttctgaatatttttgattggcagttggttgaagccatggatgcagaacccatggatatggagggctgactgtacttacttacatatctatctatctttgagtaacaaactctttgggggaaaagagggaagtgtattgagcaagagaaggcaaaaaacattacataatattttgattctgttacgtgtgtctatagattgtttcattctaatcaagacctaagaaggtatgattctgtgactgatttagaattctggggtggaaatatcctggaaccatgttttttaataaattctgtctcttggaaagagttaacaacagcctgggaaagagttgttattccaaaagtcagcctgttacttggtgaagctgaagtttaagagttctggggaaaaataaaatctagtaattccag

SEQ ID NO: 452090 - DNA, 7347 bp, Homo sapiens
cgggggcacggaccgagagggcgaggcggggccgccgccggcctcccccggccgggcagtcggagcccgactcgccggtggccgcccccttcttcctgctgtaccccggcgatggaggcgccggcttcggagtgcgcccgccgccgcagcagcagcgctcctggaggaccccgccgtcccccggctcaccgctgcccttcctgctgctgagctacccgagcggcggcggcggcagcagcggcagcggcaagcaccatcctaattatctcatggctaatgaacgcatgaacctcatgaacatggccaagctgagtatcaagggcttgattgaatcagctctgaacctggggaggactcttgactctgactatgcacctctccagcaattctttgtggtgatggagcactgtctgaaacatggcttgaaagctaaaaaaacttttctcggacaaaataaatccttctgggggcctctagaactggtagaaaagcttgttccagaagccgcagagataacagcaagtgttaaagatcttccaggacttaagacaccagtaggtagaggaagagcctggcttcgtttggcattaatgcaaaagaaactttcagaatatatgaaagctttgatcaataagaaagaacttctcagtgaattctacgaacccaatgccctcatgatggaagaagaaggagccataattgctggtctgttggtgggtctgaatgtcattgatgccaatttctgtatgaaaggagaagacttggactctcaggttggagttatagatttttcaatgtatctcaaggacgggaacagcagtaaaggtactgaaggagacggtcagattactgcaattctggaccagaagaactatgtagaagaactgaacagacatttgaatgctactgtaaacaaccttcaggcaaaagtagatgcattagaaaaatccaacactaaactgacagaggagcttgcagttgcaaacaacaggatcattaccttacaagaagaaatggaacgagttaaagaggaaagttcctacatactggaatccaatcggaagggtcccaagcaagacagaactgcagaagggcaagcactaagtgaagcaagaaagcatttaaaagaagagacacaattacgattggatgttgagaaagaactggagatgcagatcagcatgaggcaggagatggaattggctatgaagatgctggagaaggatgtctgtgagaagcaggatgccctggtatctcttcggcagcagctggatgacctcagagctctcaagcatgaacttgcctttaagctgcagagttcagacttaggagtaaaacagaaaagtgaactaaacagtcgcttggaagagaagactaatcagatggctgctaccattaaacaacttgaacaaagtgaaaaggatttggtgaaacaggcaaagaccttaaatagtgcagcaaataaactgatcccaaaacatcattaggcatttttaagttggtcacgtcgcaagtccgatatcacaacttaattgtaaaaggaagaaatctgaaagttactacatttaagctctgattctatataaaatgtcaccaaaaagttgactttgaatttgttggacttttaaaaaaccagttggaaatataggttgggtttttttcttattgttttctccccagggttagaaaaattggtataagttcctaattaaaagctgaataaactttgagaaattatttctgagttgaccaataaataaaaataccactttctttaaaaaagcctagggaattgaagctctgtacatatactaatgatgcctttacaacccagtccttgataataccagattctcggtgcattgttcatgtctgtatctgcaagcctgttctgccattgcagtgtgatgaacctagaggtaactaccatgtgaacttgaactcttctaaaatagttctgtgtctcttagaccatgaccccttttcacttttgttatataggtttaatccccaagccaaggatagtacttagtatttcactacacttctattctcagtaaccaagattgcttgcaactttttttgccttggtgacttttgaaaaaaaaagaaaagaaaaagcagcatccttatatttctttaaaatacatagaaataaagttagtaattaggtaacctatgataacataataatgtggacgcctggggaaaccctcctcatgtttgtcatcttctacctctgccattttcctgcaattccgcttcctacttaggcagttcagagagaacaattctaataaaaacactcctctcctattaacaaaaaatgatgcagtacccatttttcgtatcctgcttttcttatattggagtaaaaaggacagggtatagacatgaatgatgatattctgcctggcctgtcatttcttacctggaaacatttacttaagagtttctgttactttttgttcagatggggatttgctaaaggttctgggaagctaataattgaattattagaaaaacatttcagaatagggaagtaaatgataaacttatattctttattattatttagtacaaaaatagattcccagtagatatccacaagcaatattagcagggcttctgtttctaagtgaccacagactaaccctttctaggctttaacattgtaaataatcctataaacagtttgattttttaagatgatttttgatttgaagagacaggctttacataagccttcattccttcaaaaggtcctgacaaaatacttgggtttttttctctttttttcattctggtatgctttgcagcatttcagctgctttggtggggacacagataaccccttcgcttccagctcttaaaattctttatctttttcttggcaaaaccagaattaagagtgtaagatagattccatgtgtgcttatataggtccctgcacagattggacttgaaccaaaattaagtccaaagaacatatgtttagaccaacttcatggaagtggaagatcctgtgctcttgaacttattttaattcttataatttgcacctatataaacaaagctcctactgtattcttctcttcatcaaccttttgtggtgatgggttgccttttctacgagcatttggaaggagtgatcaaataccgaaattgaactttctaaaacctacacatagcatgcgtttaaattctattatataaagccccaagtgctttaccttctaaaacatgcttctctataggtgcaaagttataagatatgtagaagaaaacatccatcagaatcttctggagaatatggtcagagtcttaaacaggcccagtgctgagttctttgtccacttagtcacacatcttttgtgggaatgggaaaggaaggagacagccaaactctgacaaaggcttttccttatagaataacccaaagcctaggtgagggttgatatataatgtcccatgatttaatatatgtggtttgggggaaaggacaagaaaaaactataattccacatataagaaggtagttgcccatttacaagttccagttatgtgtgtaaaacagaaaaattaagtaccaaacctattaggaaatttttttaaaaagtggatttaacttaaattactgtgtacttgaggttggctttggatatggattttctaaaaagtgatgttttattgtttatcatctaatggctgtaaactgtagtactagaataaaaaaaatggaaaatcagcttttcctctgcctggttcaccttcatcttacttttctttagaatttgtttcttctccatcttttcccccccataatttcttcacctgtgtcctgcaaagtttttttcctctctctgtctctctgtgcattcttccttgggttattttattttgtgttgtgaacttggtcttcttccccaccatggcttttgttttttatcacaagttcatgtggctcacatccagattgcgccaggctgagcgaagccgccaatctgctgagttggacaaccggctcttcaaacaggactttggagacaagatcaacagtctgcagctggaagtcgaggagctcaccaggcagcggtgaagagggggtagcttgagctgacagggtggtcatgggtaattcttagggtagacagcaagaaaaggggtctcatgacttccagccaggttggctctgtctttgcaatgtcctttctctggaattggaattcagaaagcttcacgtacttcaacattccccaaatccgatcaacatgctttgtgatcaaagaattaggaaattagagcccaagatcccagataaatagtaattattagccaaaataacactaataataatatgtaatatttcctgaattcttactgtgtgccagatactttaggcacttcacatgcaaactctcctaatatcttcatatcaaccctattagtgatattattgcctccactttcagattaaagtagagcttaaggctgggcgcagtggttcatgcctgtaatcccagcactttgggaggccaaggcaggtgtatcacctgaggtcaggagttccagaccagcctggccaagatggtgaaaccccatctctactaaaaatacaaaaatttgccagacatagtggtgggtgccagtaatcccagctactcgggaggctgaggcaggagaattgcttgaacctaggaaatggaggttacggtgacctgagatcatgccactgcactccagcctggcaacagaacaagactccatctcaaaaaaaggtagagattagacaggttaaatgtgtccagattcacacagttaagcttagaagtagcaacattatcatttaaaaacctgtctctctgacagcaagcccttaaccattcgtaattactgcactttaagacaaggggttggcattctttagagaatatgtctgtatagaattccaatttttcatccttttcctctccaacttacctcaggaaccagcttgagttagaactaaaacaggaaaaagaaagaagattacaaaacgacaggagcatcccaggaaggggttcccagaagtcagaatccaagatggatgggaagcacaaaatgcaagaggaaaatgttaaactaaaaaagcccctggaagaaagccacaggctgcaaccccaccctatggatgaacaggatcagctgctgctctctgaaaagccacagttgtgtcagctatgccaggaagacggcagcctaacaaagaatgtgtgtaagaactgcagcggaaccttctgtgatgcctgttcaacaaatgaactgcctcttccttcaagtatcaagcttgagcgagtttgcaatccctgtcacaagcatctgatgaagcaatattctaccagcccatcataagactggaggccaagacctggaccaaaacgtttatgcaggctcctctgtacctgtgttttagctgtcaggatctcatagagcccagttcttagagtcaactaaagagttgataggaatttactaggtccagggagaaaaggcagtggttggggttactggaaattttgctcattttctctaatgactgtatgaataaaagtgaacttacttgagcctttctcttctaaatctaaacaacctgatattgaaggtttgctttatagcatatctttggaaaggcaactcatttttatgattagtgatactggggtggatttaataggagagagaatccaggcagataagaataaaaaggaaaatgatcatctccttctatagcatttgcagattcaagggggagaggtagatgctgagatcaaaatgacagttgttacttatttttccaggtgctgttagtataaacattgtttcctcttcacccctgctaactacctctttaaagtatttctaccaaactgtgaacccaatctcagggaaaagaaattaaaaagtaatataaattctgcatatattaaaaacaatattgtaatatgttataatttcaggaccagaattttctggtctttacctacaagggttttcattatcaaaaaaaagaacatttgtttttctactttatgacttcaaagtaaataactgcccttttcagaatctccttccacaaaacaagccaactcttccccattccctccatcttcctttccaagtcataatggaaattgtaaggagttttaaaaatagggtttggcttttgcaaatagaagatattgattaaagcaaagtcaaatatagagtaaaataagtttaatttgttttcttaagacagggtcttgctctgttgcacaagctggagggcagtagtgcaatcacagctcactgaatccctgttctcccgggcctcaagcaatcttcccaccttagcctcccaagtagctgggactggctttttttttttttttttggccggggagggggtctcattggttgctcagcctggtctcaaactcctgggcttaagcagtcctcccaccttgacttccacagtgccgagattacaggcatgagccaccacacctggccaagtttaatttgttcatggctgagaacagttagctcggaatacttacattgttttttgaataaggaattccttattctgagtgagtcacgaatgagagctgatagatgctttcttgaaaagggcaatacagtcatcccttggtatccatgggggattggttccaggaacccaacttgatatcagaatccatgggtgctcaagtcccattatagagaatgggttatatggtatttgcatataacctacatacatcctcctgtgtactttaaatcatctgaagatgattacttatacctaataaaatacctacacatcacttcatttgcatggattcaacatagtgcttggtgttcagtaaattcaagttttgcttttttggaactttgtggaatttttctttttctgaatatttttgattggcagttggttgaagccatggatgcagaacccatggatatggagggctgactgtacttacttacatatctatctatctttgagtaacaaactctttgggggaaaagagggaagtgtattgagcaagagaaggcaaaaaacattacataatattttgattctgttacgtgtgtctatagattgtttcattctaatcaagacctaagaaggtatgattctgtgactgatttagaattctggggtggaaatatcctggaaccatgttttttaataaattctgtctcttggaaagagttaacaacagcctgggaaagagttgttattccaaaagtcagcctgttacttggtgaagctgaagtttaagagttctggggaaaaataaaatctagtaattccag

SEQ ID NO: 452091 - DNA, 7875 bp, Homo sapiens
agccattttggtcaacaccctgcttactgcgcacggccaatcctatgagaactcagcatcccagctcatctgagcagatcctggaagtgatttctgcagctcaggattttttttttaagctacattgaaaatataggtttattttttgttcaggtttttcttttatattttttttctgcacaaaggaggaggatttttcacttactcatatcgaggccagatttttaaagccagctaaggcagcatcagctgtgcgggatttaaagcctatagctcagctgaaaaaaaaggtggggggcagggaagggaagataaaaggagaggaagctgggagaagacaagcatcatcttattttgctatgtggtaggaactgtctataagatagtgtagaattgtttatcttgagcagtttgttcttaacctataaggtatttttccttttttttttttttaaacctcccccacccttttcctgaaagctttgtttcagagctttgtattgggtttttttggtgaggaggttgtatttatttttttggtgtgtgtgtgtgagtgtgtgtgtgtctgtgtgtgtgttgtggtcccagctgagtcatcatgtctgctctgacgcctccgaccgatatgccaacccccaccactgacaagatcacacaggctgccatggagaccatctacctttgcaaattccgagtgtccatggatggagaatggctctgcctgcgagagctggatgacatctcacttacacctgacccagagcctacccatgaagatcctaattatctcatggctaatgaacgcatgaacctcatgaacatggccaagctgagtatcaagggcttgattgaatcagctctgaacctggggaggactcttgactctgactatgcacctctccagcaattctttgtggtgatggagcactgtctgaaacatggcttgaaagctaaaaaaacttttctcggacaaaataaatccttctgggggcctctagaactggtagaaaagcttgttccagaagccgcagagataacagcaagtgttaaagatcttccaggacttaagacaccagtaggtagaggaagagcctggcttcgtttggcattaatgcaaaagaaactttcagaatatatgaaagctttgatcaataagaaagaacttctcagtgaattctacgaacccaatgccctcatgatggaagaagaaggagccataattgctggtctgttggtgggtctgaatgtcattgatgccaatttctgtatgaaaggagaagacttggactctcaggttggagttatagatttttcaatgtatctcaaggacgggaacagcagtaaaggtactgaaggagacggtcagattactgcaattctggaccagaagaactatgtagaagaactgaacagacatttgaatgctactgtaaacaaccttcaggcaaaagtagatgcattagaaaaatccaacactaaactgacagaggagcttgcagttgcaaacaacaggatcattaccttacaagaagaaatggaacgagttaaagaggaaagttcctacatactggaatccaatcggaagggtcccaagcaagacagaactgcagaagggcaagcactaagtgaagcaagaaagcatttaaaagaagagacacaattacgattggatgttgagaaagaactggagatgcagatcagcatgaggcaggagatggaattggctatgaagatgctggagaaggatgtctgtgagaagcaggatgccctggtatctcttcggcagcagctggatgacctcagagctctcaagcatgaacttgcctttaagctgcagagttcagacttaggagtaaaacagaaaagtgaactaaacagtcgcttggaagagaagactaatcagatggctgctaccattaaacaacttgaacaaagtgaaaaggatttggtgaaacaggcaaagaccttaaatagtgcagcaaataaactgatcccaaaacatcattaggcatttttaagttggtcacgtcgcaagtccgatatcacaacttaattgtaaaaggaagaaatctgaaagttactacatttaagctctgattctatataaaatgtcaccaaaaagttgactttgaatttgttggacttttaaaaaaccagttggaaatataggttgggtttttttcttattgttttctccccagggttagaaaaattggtataagttcctaattaaaagctgaataaactttgagaaattatttctgagttgaccaataaataaaaataccactttctttaaaaaagcctagggaattgaagctctgtacatatactaatgatgcctttacaacccagtccttgataataccagattctcggtgcattgttcatgtctgtatctgcaagcctgttctgccattgcagtgtgatgaacctagaggtaactaccatgtgaacttgaactcttctaaaatagttctgtgtctcttagaccatgaccccttttcacttttgttatataggtttaatccccaagccaaggatagtacttagtatttcactacacttctattctcagtaaccaagattgcttgcaactttttttgccttggtgacttttgaaaaaaaaagaaaagaaaaagcagcatccttatatttctttaaaatacatagaaataaagttagtaattaggtaacctatgataacataataatgtggacgcctggggaaaccctcctcatgtttgtcatcttctacctctgccattttcctgcaattccgcttcctacttaggcagttcagagagaacaattctaataaaaacactcctctcctattaacaaaaaatgatgcagtacccatttttcgtatcctgcttttcttatattggagtaaaaaggacagggtatagacatgaatgatgatattctgcctggcctgtcatttcttacctggaaacatttacttaagagtttctgttactttttgttcagatggggatttgctaaaggttctgggaagctaataattgaattattagaaaaacatttcagaatagggaagtaaatgataaacttatattctttattattatttagtacaaaaatagattcccagtagatatccacaagcaatattagcagggcttctgtttctaagtgaccacagactaaccctttctaggctttaacattgtaaataatcctataaacagtttgattttttaagatgatttttgatttgaagagacaggctttacataagccttcattccttcaaaaggtcctgacaaaatacttgggtttttttctctttttttcattctggtatgctttgcagcatttcagctgctttggtggggacacagataaccccttcgcttccagctcttaaaattctttatctttttcttggcaaaaccagaattaagagtgtaagatagattccatgtgtgcttatataggtccctgcacagattggacttgaaccaaaattaagtccaaagaacatatgtttagaccaacttcatggaagtggaagatcctgtgctcttgaacttattttaattcttataatttgcacctatataaacaaagctcctactgtattcttctcttcatcaaccttttgtggtgatgggttgccttttctacgagcatttggaaggagtgatcaaataccgaaattgaactttctaaaacctacacatagcatgcgtttaaattctattatataaagccccaagtgctttaccttctaaaacatgcttctctataggtgcaaagttataagatatgtagaagaaaacatccatcagaatcttctggagaatatggtcagagtcttaaacaggcccagtgctgagttctttgtccacttagtcacacatcttttgtgggaatgggaaaggaaggagacagccaaactctgacaaaggcttttccttatagaataacccaaagcctaggtgagggttgatatataatgtcccatgatttaatatatgtggtttgggggaaaggacaagaaaaaactataattccacatataagaaggtagttgcccatttacaagttccagttatgtgtgtaaaacagaaaaattaagtaccaaacctattaggaaatttttttaaaaagtggatttaacttaaattactgtgtacttgaggttggctttggatatggattttctaaaaagtgatgttttattgtttatcatctaatggctgtaaactgtagtactagaataaaaaaaatggaaaatcagcttttcctctgcctggttcaccttcatcttacttttctttagaatttgtttcttctccatcttttcccccccataatttcttcacctgtgtcctgcaaagtttttttcctctctctgtctctctgtgcattcttccttgggttattttattttgtgttgtgaacttggtcttcttccccaccatggcttttgttttttatcacaagttcatgtggctcacatccagattgcgccaggctgagcgaagccgccaatctgctgagttggacaaccggctcttcaaacaggactttggagacaagatcaacagtctgcagctggaagtcgaggagctcaccaggcagcggtgaagagggggtagcttgagctgacagggtggtcatgggtaattcttagggtagacagcaagaaaaggggtctcatgacttccagccaggttggctctgtctttgcaatgtcctttctctggaattggaattcagaaagcttcacgtacttcaacattccccaaatccgatcaacatgctttgtgatcaaagaattaggaaattagagcccaagatcccagataaatagtaattattagccaaaataacactaataataatatgtaatatttcctgaattcttactgtgtgccagatactttaggcacttcacatgcaaactctcctaatatcttcatatcaaccctattagtgatattattgcctccactttcagattaaagtagagcttaaggctgggcgcagtggttcatgcctgtaatcccagcactttgggaggccaaggcaggtgtatcacctgaggtcaggagttccagaccagcctggccaagatggtgaaaccccatctctactaaaaatacaaaaatttgccagacatagtggtgggtgccagtaatcccagctactcgggaggctgaggcaggagaattgcttgaacctaggaaatggaggttacggtgacctgagatcatgccactgcactccagcctggcaacagaacaagactccatctcaaaaaaaggtagagattagacaggttaaatgtgtccagattcacacagttaagcttagaagtagcaacattatcatttaaaaacctgtctctctgacagcaagcccttaaccattcgtaattactgcactttaagacaaggggttggcattctttagagaatatgtctgtatagaattccaatttttcatccttttcctctccaacttacctcaggaaccagcttgagttagaactaaaacaggaaaaagaaagaagattacaaaacgacaggagcatcccaggaaggggttcccagaagtcagaatccaagatggatgggaagcacaaaatgcaagaggaaaatgttaaactaaaaaagcccctggaagaaagccacaggctgcaaccccaccctatggatgaacaggtaacagagcctcctgtttcaaaacatcttgtatgaattatgaagttggttgtaccgtgcctagccagcaaataagaatgtgtgtaagaactgcagcggaaccttctgtgatgcctgttcaacaaatgaactgcctcttccttcaagtatcaagcttgagcgagtttgcaatccctgtcacaagcatctgatgaagcaatattctaccagcccatcataagactggaggccaagacctggaccaaaacgtttatgcaggctcctctgtacctgtgttttagctgtcaggatctcatagagcccagttcttagagtcaactaaagagttgataggaatttactaggtccagggagaaaaggcagtggttggggttactggaaattttgctcattttctctaatgactgtatgaataaaagtgaacttacttgagcctttctcttctaaatctaaacaacctgatattgaaggtttgctttatagcatatctttggaaaggcaactcatttttatgattagtgatactggggtggatttaataggagagagaatccaggcagataagaataaaaaggaaaatgatcatctccttctatagcatttgcagattcaagggggagaggtagatgctgagatcaaaatgacagttgttacttatttttccaggtgctgttagtataaacattgtttcctcttcacccctgctaactacctctttaaagtatttctaccaaactgtgaacccaatctcagggaaaagaaattaaaaagtaatataaattctgcatatattaaaaacaatattgtaatatgttataatttcaggaccagaattttctggtctttacctacaagggttttcattatcaaaaaaaagaacatttgtttttctactttatgacttcaaagtaaataactgcccttttcagaatctccttccacaaaacaagccaactcttccccattccctccatcttcctttccaagtcataatggaaattgtaaggagttttaaaaatagggtttggcttttgcaaatagaagatattgattaaagcaaagtcaaatatagagtaaaataagtttaatttgttttcttaagacagggtcttgctctgttgcacaagctggagggcagtagtgcaatcacagctcactgaatccctgttctcccgggcctcaagcaatcttcccaccttagcctcccaagtagctgggactggctttttttttttttttttggccggggagggggtctcattggttgctcagcctggtctcaaactcctgggcttaagcagtcctcccaccttgacttccacagtgccgagattacaggcatgagccaccacacctggccaagtttaatttgttcatggctgagaacagttagctcggaatacttacattgttttttgaataaggaattccttattctgagtgagtcacgaatgagagctgatagatgctttcttgaaaagggcaatacagtcatcccttggtatccatgggggattggttccaggaacccaacttgatatcagaatccatgggtgctcaagtcccattatagagaatgggttatatggtatttgcatataacctacatacatcctcctgtgtactttaaatcatctgaagatgattacttatacctaataaaatacctacacatcacttcatttgcatggattcaacatagtgcttggtgttcagtaaattcaagttttgcttttttggaactttgtggaatttttctttttctgaatatttttgattggcagttggttgaagccatggatgcagaacccatggatatggagggctgactgtacttacttacatatctatctatctttgagtaacaaactctttgggggaaaagagggaagtgtattgagcaagagaaggcaaaaaacattacataatattttgattctgttacgtgtgtctatagattgtttcattctaatcaagacctaagaaggtatgattctgtgactgatttagaattctggggtggaaatatcctggaaccatgttttttaataaattctgtctcttggaaagagttaacaacagcctgggaaagagttgttattccaaaagtcagcctgttacttggtgaagctgaagtttaagagttctggggaaaaataaaatctagtaattccag

SEQ ID NO: 452092 - DNA, 7281 bp, Homo sapiens
agcggacgctgtcaggttctctgagctgtgattatgtgttcagaaggcagtctcagtgaacttctcaaagtgagaaggttgtagcttttaatacagtctcagaagcctatgggacaaagttttctggacacggttcatcccttcttgttgctctgccctgaaaataacctggctagtcaccctttcaagatcctaattatctcatggctaatgaacgcatgaacctcatgaacatggccaagctgagtatcaagggcttgattgaatcagctctgaacctggggaggactcttgactctgactatgcacctctccagcaattctttgtggtgatggagcactgtctgaaacatggcttgaaagctaaaaaaacttttctcggacaaaataaatccttctgggggcctctagaactggtagaaaagcttgttccagaagccgcagagataacagcaagtgttaaagatcttccaggacttaagacaccagtaggtagaggaagagcctggcttcgtttggcattaatgcaaaagaaactttcagaatatatgaaagctttgatcaataagaaagaacttctcagtgaattctacgaacccaatgccctcatgatggaagaagaaggagccataattgctggtctgttggtgggtctgaatgtcattgatgccaatttctgtatgaaaggagaagacttggactctcaggttggagttatagatttttcaatgtatctcaaggacgggaacagcagtaaaggtactgaaggagacggtcagattactgcaattctggaccagaagaactatgtagaagaactgaacagacatttgaatgctactgtaaacaaccttcaggcaaaagtagatgcattagaaaaatccaacactaaactgacagaggagcttgcagttgcaaacaacaggatcattaccttacaagaagaaatggaacgagttaaagaggaaagttcctacatactggaatccaatcggaagggtcccaagcaagacagaactgcagaagggcaagcactaagtgaagcaagaaagcatttaaaagaagagacacaattacgattggatgttgagaaagaactggagatgcagatcagcatgaggcaggagatggaattggctatgaagatgctggagaaggatgtctgtgagaagcaggatgccctggtatctcttcggcagcagctggatgacctcagagctctcaagcatgaacttgcctttaagctgcagagttcagacttaggagtaaaacagaaaagtgaactaaacagtcgcttggaagagaagactaatcagatggctgctaccattaaacaacttgaacaaagtgaaaaggatttggtgaaacaggcaaagaccttaaatagtgcagcaaataaactgatcccaaaacatcattaggcatttttaagttggtcacgtcgcaagtccgatatcacaacttaattgtaaaaggaagaaatctgaaagttactacatttaagctctgattctatataaaatgtcaccaaaaagttgactttgaatttgttggacttttaaaaaaccagttggaaatataggttgggtttttttcttattgttttctccccagggttagaaaaattggtataagttcctaattaaaagctgaataaactttgagaaattatttctgagttgaccaataaataaaaataccactttctttaaaaaagcctagggaattgaagctctgtacatatactaatgatgcctttacaacccagtccttgataataccagattctcggtgcattgttcatgtctgtatctgcaagcctgttctgccattgcagtgtgatgaacctagaggtaactaccatgtgaacttgaactcttctaaaatagttctgtgtctcttagaccatgaccccttttcacttttgttatataggtttaatccccaagccaaggatagtacttagtatttcactacacttctattctcagtaaccaagattgcttgcaactttttttgccttggtgacttttgaaaaaaaaagaaaagaaaaagcagcatccttatatttctttaaaatacatagaaataaagttagtaattaggtaacctatgataacataataatgtggacgcctggggaaaccctcctcatgtttgtcatcttctacctctgccattttcctgcaattccgcttcctacttaggcagttcagagagaacaattctaataaaaacactcctctcctattaacaaaaaatgatgcagtacccatttttcgtatcctgcttttcttatattggagtaaaaaggacagggtatagacatgaatgatgatattctgcctggcctgtcatttcttacctggaaacatttacttaagagtttctgttactttttgttcagatggggatttgctaaaggttctgggaagctaataattgaattattagaaaaacatttcagaatagggaagtaaatgataaacttatattctttattattatttagtacaaaaatagattcccagtagatatccacaagcaatattagcagggcttctgtttctaagtgaccacagactaaccctttctaggctttaacattgtaaataatcctataaacagtttgattttttaagatgatttttgatttgaagagacaggctttacataagccttcattccttcaaaaggtcctgacaaaatacttgggtttttttctctttttttcattctggtatgctttgcagcatttcagctgctttggtggggacacagataaccccttcgcttccagctcttaaaattctttatctttttcttggcaaaaccagaattaagagtgtaagatagattccatgtgtgcttatataggtccctgcacagattggacttgaaccaaaattaagtccaaagaacatatgtttagaccaacttcatggaagtggaagatcctgtgctcttgaacttattttaattcttataatttgcacctatataaacaaagctcctactgtattcttctcttcatcaaccttttgtggtgatgggttgccttttctacgagcatttggaaggagtgatcaaataccgaaattgaactttctaaaacctacacatagcatgcgtttaaattctattatataaagccccaagtgctttaccttctaaaacatgcttctctataggtgcaaagttataagatatgtagaagaaaacatccatcagaatcttctggagaatatggtcagagtcttaaacaggcccagtgctgagttctttgtccacttagtcacacatcttttgtgggaatgggaaaggaaggagacagccaaactctgacaaaggcttttccttatagaataacccaaagcctaggtgagggttgatatataatgtcccatgatttaatatatgtggtttgggggaaaggacaagaaaaaactataattccacatataagaaggtagttgcccatttacaagttccagttatgtgtgtaaaacagaaaaattaagtaccaaacctattaggaaatttttttaaaaagtggatttaacttaaattactgtgtacttgaggttggctttggatatggattttctaaaaagtgatgttttattgtttatcatctaatggctgtaaactgtagtactagaataaaaaaaatggaaaatcagcttttcctctgcctggttcaccttcatcttacttttctttagaatttgtttcttctccatcttttcccccccataatttcttcacctgtgtcctgcaaagtttttttcctctctctgtctctctgtgcattcttccttgggttattttattttgtgttgtgaacttggtcttcttccccaccatggcttttgttttttatcacaagttcatgtggctcacatccagattgcgccaggctgagcgaagccgccaatctgctgagttggacaaccggctcttcaaacaggactttggagacaagatcaacagtctgcagctggaagtcgaggagctcaccaggcagcggtgaagagggggtagcttgagctgacagggtggtcatgggtaattcttagggtagacagcaagaaaaggggtctcatgacttccagccaggttggctctgtctttgcaatgtcctttctctggaattggaattcagaaagcttcacgtacttcaacattccccaaatccgatcaacatgctttgtgatcaaagaattaggaaattagagcccaagatcccagataaatagtaattattagccaaaataacactaataataatatgtaatatttcctgaattcttactgtgtgccagatactttaggcacttcacatgcaaactctcctaatatcttcatatcaaccctattagtgatattattgcctccactttcagattaaagtagagcttaaggctgggcgcagtggttcatgcctgtaatcccagcactttgggaggccaaggcaggtgtatcacctgaggtcaggagttccagaccagcctggccaagatggtgaaaccccatctctactaaaaatacaaaaatttgccagacatagtggtgggtgccagtaatcccagctactcgggaggctgaggcaggagaattgcttgaacctaggaaatggaggttacggtgacctgagatcatgccactgcactccagcctggcaacagaacaagactccatctcaaaaaaaggtagagattagacaggttaaatgtgtccagattcacacagttaagcttagaagtagcaacattatcatttaaaaacctgtctctctgacagcaagcccttaaccattcgtaattactgcactttaagacaaggggttggcattctttagagaatatgtctgtatagaattccaatttttcatccttttcctctccaacttacctcaggaaccagcttgagttagaactaaaacaggaaaaagaaagaagattacaaaacgacaggagcatcccaggaaggggttcccagaagtcagaatccaagatggatgggaagcacaaaatgcaagaggaaaatgttaaactaaaaaagcccctggaagaaagccacaggctgcaaccccaccctatggatgaacaggatcagctgctgctctctgaaaagccacagttgtgtcagctatgccaggaagacggcagcctaacaaagaatgtgtgtaagaactgcagcggaaccttctgtgatgcctgttcaacaaatgaactgcctcttccttcaagtatcaagcttgagcgagtttgcaatccctgtcacaagcatctgatgaagcaatattctaccagcccatcataagactggaggccaagacctggaccaaaacgtttatgcaggctcctctgtacctgtgttttagctgtcaggatctcatagagcccagttcttagagtcaactaaagagttgataggaatttactaggtccagggagaaaaggcagtggttggggttactggaaattttgctcattttctctaatgactgtatgaataaaagtgaacttacttgagcctttctcttctaaatctaaacaacctgatattgaaggtttgctttatagcatatctttggaaaggcaactcatttttatgattagtgatactggggtggatttaataggagagagaatccaggcagataagaataaaaaggaaaatgatcatctccttctatagcatttgcagattcaagggggagaggtagatgctgagatcaaaatgacagttgttacttatttttccaggtgctgttagtataaacattgtttcctcttcacccctgctaactacctctttaaagtatttctaccaaactgtgaacccaatctcagggaaaagaaattaaaaagtaatataaattctgcatatattaaaaacaatattgtaatatgttataatttcaggaccagaattttctggtctttacctacaagggttttcattatcaaaaaaaagaacatttgtttttctactttatgacttcaaagtaaataactgcccttttcagaatctccttccacaaaacaagccaactcttccccattccctccatcttcctttccaagtcataatggaaattgtaaggagttttaaaaatagggtttggcttttgcaaatagaagatattgattaaagcaaagtcaaatatagagtaaaataagtttaatttgttttcttaagacagggtcttgctctgttgcacaagctggagggcagtagtgcaatcacagctcactgaatccctgttctcccgggcctcaagcaatcttcccaccttagcctcccaagtagctgggactggctttttttttttttttttggccggggagggggtctcattggttgctcagcctggtctcaaactcctgggcttaagcagtcctcccaccttgacttccacagtgccgagattacaggcatgagccaccacacctggccaagtttaatttgttcatggctgagaacagttagctcggaatacttacattgttttttgaataaggaattccttattctgagtgagtcacgaatgagagctgatagatgctttcttgaaaagggcaatacagtcatcccttggtatccatgggggattggttccaggaacccaacttgatatcagaatccatgggtgctcaagtcccattatagagaatgggttatatggtatttgcatataacctacatacatcctcctgtgtactttaaatcatctgaagatgattacttatacctaataaaatacctacacatcacttcatttgcatggattcaacatagtgcttggtgttcagtaaattcaagttttgcttttttggaactttgtggaatttttctttttctgaatatttttgattggcagttggttgaagccatggatgcagaacccatggatatggagggctgactgtacttacttacatatctatctatctttgagtaacaaactctttgggggaaaagagggaagtgtattgagcaagagaaggcaaaaaacattacataatattttgattctgttacgtgtgtctatagattgtttcattctaatcaagacctaagaaggtatgattctgtgactgatttagaattctggggtggaaatatcctggaaccatgttttttaataaattctgtctcttggaaagagttaacaacagcctgggaaagagttgttattccaaaagtcagcctgttacttggtgaagctgaagtttaagagttctggggaaaaataaaatctagtaattccag

SEQ ID NO: 452093 - DNA, 6881 bp, Homo sapiens
agccattttggtcaacaccctgcttactgcgcacggccaatcctatgagaactcagcatcccagctcatctgagcagatcctggaagtgatttctgcagctcaggattttttttttaagctacattgaaaatataggtttattttttgttcaggtttttcttttatattttttttctgcacaaaggaggaggatttttcacttactcatatcgaggccagatttttaaagccagctaaggcagcatcagctgtgcgggatttaaagcctatagctcagctgaaaaaaaaggtggggggcagggaagggaagataaaaggagaggaagctgggagaagacaagcatcatcttattttgctatgtggtaggaactgtctataagatagtgtagaattgtttatcttgagcagtttgttcttaacctataaggtatttttccttttttttttttttaaacctcccccacccttttcctgaaagctttgtttcagagctttgtattgggtttttttggtgaggaggttgtatttatttttttggtgtgtgtgtgtgagtgtgtgtgtgtctgtgtgtgtgttgtggtcccagctgagtcatcatgtctgctctgacgcctccgaccgatatgccaacccccaccactgacaagatcacacaggctgccatggagaccatctacctttgcaaattccgagtgtccatggatggagaatggctctgcctgcgagagctggatgacatctcacttacacctgacccagagcctacccatgaagatcctaattatctcatggctaatgaacgcatgaacctcatgaacatggccaagctgagtatcaagggcttgattgaatcagctctgaacctggggaggactcttgactctgactatgcacctctccagcaattctttgtggtgatggagcactgtctgaaacatggcttgaaagctaaaaaaacttttctcggacaaaataaatccttctgggggcctctagaactggtagaaaagcttgttccagaagccgcagagataacagcaagtgttaaagatcttccaggacttaagacaccagtaggtagaggaagagcctggcttcgtttggcattaatgcaaaagaaactttcagaatatatgaaagctttgatcaataagaaagaacttctcagtgaattctacgaacccaatgccctcatgatggaagaagaaggagccataattgctggtctgttggtgggtctgaatgtcattgatgccaatttctgtatgaaaggagaagacttggactctcaggttggagttatagatttttcaatgtatctcaaggacgggaacagcagtaaaggtactgaaggagacggtcagattactgcaattctggaccagaagaactatgtagaagaactgaacagacatttgaatgctactgtaaacaaccttcaggcaaaagtagatgcattagaaaaatccaacactaaactgacagaggagcttgcagttgcaaacaacaggatcattaccttacaagaagaaatggaacgagttaaagaggaaagttcctacatactggaatccaatcggaagggtcccaagcaagacagaactgcagaagggcaagcactaagtgaagcaagaaagcatttaaaagaagagacacaattacgattggatgttgagaaagaactggagatgcagatcagcatgaggcaggagatggaattggctatgaagatgctggagaaggatgtctgtgagaagcaggatgccctggtatctcttcggcagcagctggatgacctcagagctctcaagcatgaacttgcctttaagctgcagagttcagacttaggagtaaaacagaaaagtgaactaaacagtcgcttggaagagaagactaatcagatggctgctaccattaaacaacttgaacaaagtgaaaaggatttggtgaaacaggcaaagaccttaaatagtgcagcaaataaactgatcccaaaacatcattaggcatttttaagttggtcacgtcgcaagtccgatatcacaacttaattgtaaaaggaagaaatctgaaagttactacatttaagctctgattctatataaaatgtcaccaaaaagttgactttgaatttgttggacttttaaaaaaccagttggaaatataggttgggtttttttcttattgttttctccccagggttagaaaaattggtataagttcctaattaaaagctgaataaactttgagaaattatttctgagttgaccaataaataaaaataccactttctttaaaaaagcctagggaattgaagctctgtacatatactaatgatgcctttacaacccagtccttgataataccagattctcggtgcattgttcatgtctgtatctgcaagcctgttctgccattgcagtgtgatgaacctagaggtaactaccatgtgaacttgaactcttctaaaatagttctgtgtctcttagaccatgaccccttttcacttttgttatataggtttaatccccaagccaaggatagtacttagtatttcactacacttctattctcagtaaccaagattgcttgcaactttttttgccttggtgacttttgaaaaaaaaagaaaagaaaaagcagcatccttatatttctttaaaatacatagaaataaagttagtaattaggtaacctatgataacataataatgtggacgcctggggaaaccctcctcatgtttgtcatcttctacctctgccattttcctgcaattccgcttcctacttaggcagttcagagagaacaattctaataaaaacactcctctcctattaacaaaaaatgatgcagtacccatttttcgtatcctgcttttcttatattggagtaaaaaggacagggtatagacatgaatgatgatattctgcctggcctgtcatttcttacctggaaacatttacttaagagtttctgttactttttgttcagatggggatttgctaaaggttctgggaagctaataattgaattattagaaaaacatttcagaatagggaagtaaatgataaacttatattctttattattatttagtacaaaaatagattcccagtagatatccacaagcaatattagcagggcttctgtttctaagtgaccacagactaaccctttctaggctttaacattgtaaataatcctataaacagtttgattttttaagatgatttttgatttgaagagacaggctttacataagccttcattccttcaaaaggtcctgacaaaatacttgggtttttttctctttttttcattctggtatgctttgcagcatttcagctgctttggtggggacacagataaccccttcgcttccagctcttaaaattctttatctttttcttggcaaaaccagaattaagagtgtaagatagattccatgtgtgcttatataggtccctgcacagattggacttgaaccaaaattaagtccaaagaacatatgtttagaccaacttcatggaagtggaagatcctgtgctcttgaacttattttaattcttataatttgcacctatataaacaaagctcctactgtattcttctcttcatcaaccttttgtggtgatgggttgccttttctacgagcatttggaaggagtgatcaaataccgaaattgaactttctaaaacctacacatagcatgcgtttaaattctattatataaagccccaagtgctttaccttctaaaacatgcttctctataggtgcaaagttataagatatgtagaagaaaacatccatcagaatcttctggagaatatggtcagagtcttaaacaggcccagtgctgagttctttgtccacttagtcacacatcttttgtgggaatgggaaaggaaggagacagccaaactctgacaaaggcttttccttatagaataacccaaagcctaggtgagggttgatatataatgtcccatgatttaatatatgtggtttgggggaaaggacaagaaaaaactataattccacatataagaaggtagttgcccatttacaagttccagttatgtgtgtaaaacagaaaaattaagtaccaaacctattaggaaatttttttaaaaagtggatttaacttaaattactgtgtacttgaggttggctttggatatggattttctaaaaagtgatgttttattgtttatcatctaatggctgtaaactgtagtactagaataaaaaaaatggaaaatcagcttttcctctgcctggttcaccttcatcttacttttctttagaatttgtttcttctccatcttttcccccccataatttcttcacctgtgtcctgcaaagtttttttcctctctctgtctctctgtgcattcttccttgggttattttattttgtgttgtgaacttggtcttcttccccaccatggcttttgttttttatcacaagttcatgtggctcacatccagattgcgccaggctgagcgaagccgccaatctgctgagttggacaaccggctcttcaaacaggactttggagacaagatcaacagtctgcagctggaagtcgaggagctcaccaggcagcggaaccagcttgagttagaactaaaacaggaaaaagaaagaagattacaaaacgacaggagcatcccaggaaggggttcccagaagtcagaatccaagatggatgggaagcacaaaatgcaagaggaaaatgttaaactaaaaaagcccctggaagaaagccacagaatgtgtgtaagaactgcagcggaaccttctgtgatgcctgttcaacaaatgaactgcctcttccttcaagtatcaagcttgagcgagtttgcaatccctgtcacaagcatctgatgaagcaatattctaccagcccatcataagactggaggccaagacctggaccaaaacgtttatgcaggctcctctgtacctgtgttttagctgtcaggatctcatagagcccagttcttagagtcaactaaagagttgataggaatttactaggtccagggagaaaaggcagtggttggggttactggaaattttgctcattttctctaatgactgtatgaataaaagtgaacttacttgagcctttctcttctaaatctaaacaacctgatattgaaggtttgctttatagcatatctttggaaaggcaactcatttttatgattagtgatactggggtggatttaataggagagagaatccaggcagataagaataaaaaggaaaatgatcatctccttctatagcatttgcagattcaagggggagaggtagatgctgagatcaaaatgacagttgttacttatttttccaggtgctgttagtataaacattgtttcctcttcacccctgctaactacctctttaaagtatttctaccaaactgtgaacccaatctcagggaaaagaaattaaaaagtaatataaattctgcatatattaaaaacaatattgtaatatgttataatttcaggaccagaattttctggtctttacctacaagggttttcattatcaaaaaaaagaacatttgtttttctactttatgacttcaaagtaaataactgcccttttcagaatctccttccacaaaacaagccaactcttccccattccctccatcttcctttccaagtcataatggaaattgtaaggagttttaaaaatagggtttggcttttgcaaatagaagatattgattaaagcaaagtcaaatatagagtaaaataagtttaatttgttttcttaagacagggtcttgctctgttgcacaagctggagggcagtagtgcaatcacagctcactgaatccctgttctcccgggcctcaagcaatcttcccaccttagcctcccaagtagctgggactggctttttttttttttttttggccggggagggggtctcattggttgctcagcctggtctcaaactcctgggcttaagcagtcctcccaccttgacttccacagtgccgagattacaggcatgagccaccacacctggccaagtttaatttgttcatggctgagaacagttagctcggaatacttacattgttttttgaataaggaattccttattctgagtgagtcacgaatgagagctgatagatgctttcttgaaaagggcaatacagtcatcccttggtatccatgggggattggttccaggaacccaacttgatatcagaatccatgggtgctcaagtcccattatagagaatgggttatatggtatttgcatataacctacatacatcctcctgtgtactttaaatcatctgaagatgattacttatacctaataaaatacctacacatcacttcatttgcatggattcaacatagtgcttggtgttcagtaaattcaagttttgcttttttggaactttgtggaatttttctttttctgaatatttttgattggcagttggttgaagccatggatgcagaacccatggatatggagggctgactgtacttacttacatatctatctatctttgagtaacaaactctttgggggaaaagagggaagtgtattgagcaagagaaggcaaaaaacattacataatattttgattctgttacgtgtgtctatagattgtttcattctaatcaagacctaagaaggtatgattctgtgactgatttagaattctggggtggaaatatcctggaaccatgttttttaataaattctgtctcttggaaagagttaacaacagcctgggaaagagttgttattccaaaagtcagcctgttacttggtgaagctgaagtttaagagttctggggaaaaataaaatctagtaattccag

SEQ ID NO: 452094 - DNA, 5775 bp, Homo sapiens
tggacactggagtctggaataaatgctgtttgtcacatcaaaaaaaaaaaaaaaaaaaaactcgttggaaatataggttgggtttttttcttattgttttctccccagggttagaaaaattggtataagttcctaattaaaagctgaataaactttgagaaattatttctgagttgaccaataaataaaaataccactttctttaaaaaagcctagggaattgaagctctgtacatatactaatgatgcctttacaacccagtccttgataataccagattctcggtgcattgttcatgtctgtatctgcaagcctgttctgccattgcagtgtgatgaacctagaggtaactaccatgtgaacttgaactcttctaaaatagttctgtgtctcttagaccatgaccccttttcacttttgttatataggtttaatccccaagccaaggatagtacttagtatttcactacacttctattctcagtaaccaagattgcttgcaactttttttgccttggtgacttttgaaaaaaaaagaaaagaaaaagcagcatccttatatttctttaaaatacatagaaataaagttagtaattaggtaacctatgataacataataatgtggacgcctggggaaaccctcctcatgtttgtcatcttctacctctgccattttcctgcaattccgcttcctacttaggcagttcagagagaacaattctaataaaaacactcctctcctattaacaaaaaatgatgcagtacccatttttcgtatcctgcttttcttatattggagtaaaaaggacagggtatagacatgaatgatgatattctgcctggcctgtcatttcttacctggaaacatttacttaagagtttctgttactttttgttcagatggggatttgctaaaggttctgggaagctaataattgaattattagaaaaacatttcagaatagggaagtaaatgataaacttatattctttattattatttagtacaaaaatagattcccagtagatatccacaagcaatattagcagggcttctgtttctaagtgaccacagactaaccctttctaggctttaacattgtaaataatcctataaacagtttgattttttaagatgatttttgatttgaagagacaggctttacataagccttcattccttcaaaaggtcctgacaaaatacttgggtttttttctctttttttcattctggtatgctttgcagcatttcagctgctttggtggggacacagataaccccttcgcttccagctcttaaaattctttatctttttcttggcaaaaccagaattaagagtgtaagatagattccatgtgtgcttatataggtccctgcacagattggacttgaaccaaaattaagtccaaagaacatatgtttagaccaacttcatggaagtggaagatcctgtgctcttgaacttattttaattcttataatttgcacctatataaacaaagctcctactgtattcttctcttcatcaaccttttgtggtgatgggttgccttttctacgagcatttggaaggagtgatcaaataccgaaattgaactttctaaaacctacacatagcatgcgtttaaattctattatataaagccccaagtgctttaccttctaaaacatgcttctctataggtgcaaagttataagatatgtagaagaaaacatccatcagaatcttctggagaatatggtcagagtcttaaacaggcccagtgctgagttctttgtccacttagtcacacatcttttgtgggaatgggaaaggaaggagacagccaaactctgacaaaggcttttccttatagaataacccaaagcctaggtgagggttgatatataatgtcccatgatttaatatatgtggtttgggggaaaggacaagaaaaaactataattccacatataagaaggtagttgcccatttacaagttccagttatgtgtgtaaaacagaaaaattaagtaccaaacctattaggaaatttttttaaaaagtggatttaacttaaattactgtgtacttgaggttggctttggatatggattttctaaaaagtgatgttttattgtttatcatctaatggctgtaaactgtagtactagaataaaaaaaatggaaaatcagcttttcctctgcctggttcaccttcatcttacttttctttagaatttgtttcttctccatcttttcccccccataatttcttcacctgtgtcctgcaaagtttttttcctctctctgtctctctgtgcattcttccttgggttattttattttgtgttgtgaacttggtcttcttccccaccatggcttttgttttttatcacaagttcatgtggctcacatccagattgcgccaggctgagcgaagccgccaatctgctgagttggacaaccggctcttcaaacaggactttggagacaagatcaacagtctgcagctggaagtcgaggagctcaccaggcagcggtgaagagggggtagcttgagctgacagggtggtcatgggtaattcttagggtagacagcaagaaaaggggtctcatgacttccagccaggttggctctgtctttgcaatgtcctttctctggaattggaattcagaaagcttcacgtacttcaacattccccaaatccgatcaacatgctttgtgatcaaagaattaggaaattagagcccaagatcccagataaatagtaattattagccaaaataacactaataataatatgtaatatttcctgaattcttactgtgtgccagatactttaggcacttcacatgcaaactctcctaatatcttcatatcaaccctattagtgatattattgcctccactttcagattaaagtagagcttaaggctgggcgcagtggttcatgcctgtaatcccagcactttgggaggccaaggcaggtgtatcacctgaggtcaggagttccagaccagcctggccaagatggtgaaaccccatctctactaaaaatacaaaaatttgccagacatagtggtgggtgccagtaatcccagctactcgggaggctgaggcaggagaattgcttgaacctaggaaatggaggttacggtgacctgagatcatgccactgcactccagcctggcaacagaacaagactccatctcaaaaaaaggtagagattagacaggttaaatgtgtccagattcacacagttaagcttagaagtagcaacattatcatttaaaaacctgtctctctgacagcaagcccttaaccattcgtaattactgcactttaagacaaggggttggcattctttagagaatatgtctgtatagaattccaatttttcatccttttcctctccaacttacctcaggaaccagcttgagttagaactaaaacaggaaaaagaaagaagattacaaaacgacaggagcatcccaggaaggggttcccagaagtcagaatccaagatggatgggaagcacaaaatgcaagaggaaaatgttaaactaaaaaagcccctggaagaaagccacaggctgcaaccccaccctatggatgaacaggatcagctgctgctctctgaaaagccacagttgtgtcagctatgccaggaagacggcagcctaacaaagaatgtgtgtaagaactgcagcggaaccttctgtgatgcctgttcaacaaatgaactgcctcttccttcaagtatcaagcttgagcgagtttgcaatccctgtcacaagcatctgatgaagcaatattctaccagcccatcataagactggaggccaagacctggaccaaaacgtttatgcaggctcctctgtacctgtgttttagctgtcaggatctcatagagcccagttcttagagtcaactaaagagttgataggaatttactaggtccagggagaaaaggcagtggttggggttactggaaattttgctcattttctctaatgactgtatgaataaaagtgaacttacttgagcctttctcttctaaatctaaacaacctgatattgaaggtttgctttatagcatatctttggaaaggcaactcatttttatgattagtgatactggggtggatttaataggagagagaatccaggcagataagaataaaaaggaaaatgatcatctccttctatagcatttgcagattcaagggggagaggtagatgctgagatcaaaatgacagttgttacttatttttccaggtgctgttagtataaacattgtttcctcttcacccctgctaactacctctttaaagtatttctaccaaactgtgaacccaatctcagggaaaagaaattaaaaagtaatataaattctgcatatattaaaaacaatattgtaatatgttataatttcaggaccagaattttctggtctttacctacaagggttttcattatcaaaaaaaagaacatttgtttttctactttatgacttcaaagtaaataactgcccttttcagaatctccttccacaaaacaagccaactcttccccattccctccatcttcctttccaagtcataatggaaattgtaaggagttttaaaaatagggtttggcttttgcaaatagaagatattgattaaagcaaagtcaaatatagagtaaaataagtttaatttgttttcttaagacagggtcttgctctgttgcacaagctggagggcagtagtgcaatcacagctcactgaatccctgttctcccgggcctcaagcaatcttcccaccttagcctcccaagtagctgggactggctttttttttttttttttggccggggagggggtctcattggttgctcagcctggtctcaaactcctgggcttaagcagtcctcccaccttgacttccacagtgccgagattacaggcatgagccaccacacctggccaagtttaatttgttcatggctgagaacagttagctcggaatacttacattgttttttgaataaggaattccttattctgagtgagtcacgaatgagagctgatagatgctttcttgaaaagggcaatacagtcatcccttggtatccatgggggattggttccaggaacccaacttgatatcagaatccatgggtgctcaagtcccattatagagaatgggttatatggtatttgcatataacctacatacatcctcctgtgtactttaaatcatctgaagatgattacttatacctaataaaatacctacacatcacttcatttgcatggattcaacatagtgcttggtgttcagtaaattcaagttttgcttttttggaactttgtggaatttttctttttctgaatatttttgattggcagttggttgaagccatggatgcagaacccatggatatggagggctgactgtacttacttacatatctatctatctttgagtaacaaactctttgggggaaaagagggaagtgtattgagcaagagaaggcaaaaaacattacataatattttgattctgttacgtgtgtctatagattgtttcattctaatcaagacctaagaaggtatgattctgtgactgatttagaattctggggtggaaatatcctggaaccatgttttttaataaattctgtctcttggaaagagttaacaacagcctgggaaagagttgttattccaaaagtcagcctgttacttggtgaagctgaagtttaagagttctggggaaaaataaaatctagtaattccag

SEQ ID NO: 452095 - DNA, 6073 bp, Homo sapiens
tttgaatacttggatgctaggggatatagaggcactgagagataggtgtcctccaaggatctattctggatctttctctcccttctttaacccttttctcttatctcccttttctttctcctgggtagttctgtagcttccactgtcacctccagtgtgttttcccagctcttaccttcatctggagaccagtcttgagttttcatcctttgggcagctatcttccaccagtatctacaattcagtctgcccaaagcacatcttcttcctatgctactctctttctgtgcttatgtgaaaccaccattttctctctggcaacttagcagccaagagaaatggctgagtcttcaaggatgaatgtgacgtggtacccaaggtcatttgatgtttctacccttaacacctgtttgtcacccttcttgcacttgagcaaaactaaactgctggtccctgtacttcccatttttcccatttatttctttcccaatagttccaccaattagaaatgtcctaattcttcccactcccttattcgtcagatacatttttaagtttaggctcaaatgccacctccccagagtttcctctgatacctctttgcagctagaaatgatctgtctttctgggaactcccatagcttcatactcatatctatctatactgcttatggcacttctcactgtctactgtaccttttaactctttatatatgtctcctccgatgcgagtgtaagctccctgagattagttaacgaatcttttaagttcccgtattagatctgtcgcagtgccttgaatatacaagcattcattcagtagatatatgaatgaatggattaatgggtgatttcttatatttctttaaaatacatagaaataaagttagtaattaggtaacctatgataacataataatgtggacgcctggggaaaccctcctcatgtttgtcatcttctacctctgccattttcctgcaattccgcttcctacttaggcagttcagagagaacaattctaataaaaacactcctctcctattaacaaaaaatgatgcagtacccatttttcgtatcctgcttttcttatattggagtaaaaaggacagggtatagacatgaatgatgatattctgcctggcctgtcatttcttacctggaaacatttacttaagagtttctgttactttttgttcagatggggatttgctaaaggttctgggaagctaataattgaattattagaaaaacatttcagaatagggaagtaaatgataaacttatattctttattattatttagtacaaaaatagattcccagtagatatccacaagcaatattagcagggcttctgtttctaagtgaccacagactaaccctttctaggctttaacattgtaaataatcctataaacagtttgattttttaagatgatttttgatttgaagagacaggctttacataagccttcattccttcaaaaggtcctgacaaaatacttgggtttttttctctttttttcattctggtatgctttgcagcatttcagctgctttggtggggacacagataaccccttcgcttccagctcttaaaattctttatctttttcttggcaaaaccagaattaagagtgtaagatagattccatgtgtgcttatataggtccctgcacagattggacttgaaccaaaattaagtccaaagaacatatgtttagaccaacttcatggaagtggaagatcctgtgctcttgaacttattttaattcttataatttgcacctatataaacaaagctcctactgtattcttctcttcatcaaccttttgtggtgatgggttgccttttctacgagcatttggaaggagtgatcaaataccgaaattgaactttctaaaacctacacatagcatgcgtttaaattctattatataaagccccaagtgctttaccttctaaaacatgcttctctataggtgcaaagttataagatatgtagaagaaaacatccatcagaatcttctggagaatatggtcagagtcttaaacaggcccagtgctgagttctttgtccacttagtcacacatcttttgtgggaatgggaaaggaaggagacagccaaactctgacaaaggcttttccttatagaataacccaaagcctaggtgagggttgatatataatgtcccatgatttaatatatgtggtttgggggaaaggacaagaaaaaactataattccacatataagaaggtagttgcccatttacaagttccagttatgtgtgtaaaacagaaaaattaagtaccaaacctattaggaaatttttttaaaaagtggatttaacttaaattactgtgtacttgaggttggctttggatatggattttctaaaaagtgatgttttattgtttatcatctaatggctgtaaactgtagtactagaataaaaaaaatggaaaatcagcttttcctctgcctggttcaccttcatcttacttttctttagaatttgtttcttctccatcttttcccccccataatttcttcacctgtgtcctgcaaagtttttttcctctctctgtctctctgtgcattcttccttgggttattttattttgtgttgtgaacttggtcttcttccccaccatggcttttgttttttatcacaagttcatgtggctcacatccagattgcgccaggctgagcgaagccgccaatctgctgagttggacaaccggctcttcaaacaggactttggagacaagatcaacagtctgcagctggaagtcgaggagctcaccaggcagcggtgaagagggggtagcttgagctgacagggtggtcatgggtaattcttagggtagacagcaagaaaaggggtctcatgacttccagccaggttggctctgtctttgcaatgtcctttctctggaattggaattcagaaagcttcacgtacttcaacattccccaaatccgatcaacatgctttgtgatcaaagaattaggaaattagagcccaagatcccagataaatagtaattattagccaaaataacactaataataatatgtaatatttcctgaattcttactgtgtgccagatactttaggcacttcacatgcaaactctcctaatatcttcatatcaaccctattagtgatattattgcctccactttcagattaaagtagagcttaaggctgggcgcagtggttcatgcctgtaatcccagcactttgggaggccaaggcaggtgtatcacctgaggtcaggagttccagaccagcctggccaagatggtgaaaccccatctctactaaaaatacaaaaatttgccagacatagtggtgggtgccagtaatcccagctactcgggaggctgaggcaggagaattgcttgaacctaggaaatggaggttacggtgacctgagatcatgccactgcactccagcctggcaacagaacaagactccatctcaaaaaaaggtagagattagacaggttaaatgtgtccagattcacacagttaagcttagaagtagcaacattatcatttaaaaacctgtctctctgacagcaagcccttaaccattcgtaattactgcactttaagacaaggggttggcattctttagagaatatgtctgtatagaattccaatttttcatccttttcctctccaacttacctcaggaaccagcttgagttagaactaaaacaggaaaaagaaagaagattacaaaacgacaggagcatcccaggaaggggttcccagaagtcagaatccaagatggatgggaagcacaaaatgcaagaggaaaatgttaaactaaaaaagcccctggaagaaagccacaggctgcaaccccaccctatggatgaacaggatcagctgctgctctctgaaaagccacagttgtgtcagctatgccaggaagacggcagcctaacaaagaatgtgtgtaagaactgcagcggaaccttctgtgatgcctgttcaacaaatgaactgcctcttccttcaagtatcaagcttgagcgagtttgcaatccctgtcacaagcatctgatgaagcaatattctaccagcccatcataagactggaggccaagacctggaccaaaacgtttatgcaggctcctctgtacctgtgttttagctgtcaggatctcatagagcccagttcttagagtcaactaaagagttgataggaatttactaggtccagggagaaaaggcagtggttggggttactggaaattttgctcattttctctaatgactgtatgaataaaagtgaacttacttgagcctttctcttctaaatctaaacaacctgatattgaaggtttgctttatagcatatctttggaaaggcaactcatttttatgattagtgatactggggtggatttaataggagagagaatccaggcagataagaataaaaaggaaaatgatcatctccttctatagcatttgcagattcaagggggagaggtagatgctgagatcaaaatgacagttgttacttatttttccaggtgctgttagtataaacattgtttcctcttcacccctgctaactacctctttaaagtatttctaccaaactgtgaacccaatctcagggaaaagaaattaaaaagtaatataaattctgcatatattaaaaacaatattgtaatatgttataatttcaggaccagaattttctggtctttacctacaagggttttcattatcaaaaaaaagaacatttgtttttctactttatgacttcaaagtaaataactgcccttttcagaatctccttccacaaaacaagccaactcttccccattccctccatcttcctttccaagtcataatggaaattgtaaggagttttaaaaatagggtttggcttttgcaaatagaagatattgattaaagcaaagtcaaatatagagtaaaataagtttaatttgttttcttaagacagggtcttgctctgttgcacaagctggagggcagtagtgcaatcacagctcactgaatccctgttctcccgggcctcaagcaatcttcccaccttagcctcccaagtagctgggactggctttttttttttttttttggccggggagggggtctcattggttgctcagcctggtctcaaactcctgggcttaagcagtcctcccaccttgacttccacagtgccgagattacaggcatgagccaccacacctggccaagtttaatttgttcatggctgagaacagttagctcggaatacttacattgttttttgaataaggaattccttattctgagtgagtcacgaatgagagctgatagatgctttcttgaaaagggcaatacagtcatcccttggtatccatgggggattggttccaggaacccaacttgatatcagaatccatgggtgctcaagtcccattatagagaatgggttatatggtatttgcatataacctacatacatcctcctgtgtactttaaatcatctgaagatgattacttatacctaataaaatacctacacatcacttcatttgcatggattcaacatagtgcttggtgttcagtaaattcaagttttgcttttttggaactttgtggaatttttctttttctgaatatttttgattggcagttggttgaagccatggatgcagaacccatggatatggagggctgactgtacttacttacatatctatctatctttgagtaacaaactctttgggggaaaagagggaagtgtattgagcaagagaaggcaaaaaacattacataatattttgattctgttacgtgtgtctatagattgtttcattctaatcaagacctaagaaggtatgattctgtgactgatttagaattctggggtggaaatatcctggaaccatgttttttaataaattctgtctcttggaaagagttaacaacagcctgggaaagagttgttattccaaaagtcagcctgttacttggtgaagctgaagtttaagagttctggggaaaaataaaatctagtaattccag

SEQ ID NO: 452096 - DNA, 5611 bp, Homo sapiens
agccattttggtcaacaccctgcttactgcgcacggccaatcctatgagaactcagcatcccagctcatctgagcagatcctggaagtgatttctgcagctcaggattttttttttaagctacattgaaaatataggtttattttttgttcaggtttttcttttatattttttttctgcacaaaggaggaggatttttcacttactcatatcgaggccagatttttaaagccagctaaggcagcatcagctgtgcgggatttaaagcctatagctcagctgaaaaaaaaggtggggggcagggaagggaagataaaaggagaggaagctgggagaagacaagcatcatcttattttgctatgtggtaggaactgtctataagatagtgtagaattgtttatcttgagcagtttgttcttaacctataaggtatttttccttttttttttttttaaacctcccccacccttttcctgaaagctttgtttcagagctttgtattgggtttttttggtgaggaggttgtatttatttttttggtgtgtgtgtgtgagtgtgtgtgtgtctgtgtgtgtgttgtggtcccagctgagtcatcatgtctgctctgacgcctccgaccgatatgccaacccccaccactgacaagatcacacaggctgccatggagaccatctacctttgcaaattccgagtgtccatggatggagaatggctctgcctgcgagagctggatgacatctcacttacacctgacccagagcctacccatgaagatcctaattatctcatggctaatgaacgcatgaacctcatgaacatggccaagctgagtatcaagggcttgattgaatcagctctgaacctggggaggactcttgactctgactatgcacctctccagcaattctttgtggtgatggagcactgtctgaaacatggcttgaaagctaaaaaaacttttctcggacaaaataaatccttctgggggcctctagaactggtagaaaagcttgttccagaagccgcagagataacagcaagtgttaaagatcttccaggacttaagacaccagtaggtagaggaagagcctggcttcgtttggcattaatgcaaaagaaactttcagaatatatgaaagctttgatcaataagaaagaacttctcagtgaattctacgaacccaatgccctcatgatggaagaagaaggagccataattgctggtctgttggtgggtctgaatgtcattgatgccaatttctgtatgaaaggagaagacttggactctcaggttggagttatagatttttcaatgtatctcaaggacgggaacagcagtaaaggtactgaaggagacggtcagattactgcaattctggaccagaagaactatgtagaagaactgaacagacatttgaatgctactgtaaacaaccttcaggcaaaagtagatgcattagaaaaatccaacactaaactgacagaggagcttgcagttgcaaacaacaggatcattaccttacaagaagaaatggaacgagttaaagaggaaagttcctacatactggaatccaatcggaagggtcccaagcaagacagaactgcagaagggcaagcactaagtgaagcaagaaagcatttaaaagaagagacacaattacgattggatgttgagaaagaactggagatgcagatcagcatgaggcaggagatggaattggctatgaagatgctggagaaggatgtctgtgagaagcaggatgccctggtatctcttcggcagcagctggatgacctcagagctctcaagcatgaacttgcctttaagctgcagagttcagacttaggagtaaaacagaaaagtgaactaaacagtcgcttggaagagaagactaatcagatggctgctaccattaaacaacttgaacaaagtgaaaaggatttggtgaaacaggcaaagaccttaaatagtgcagcaaataaactgatcccaaaacatcattaggcatttttaagttggtcacgtcgcaagtccgatatcacaacttaattgtaaaaggaagaaatctgaaagttactacatttaagctctgattctatataaaatgtcaccaaaaagttgactttgaatttgttggacttttaaaaaaccagttggaaatataggttgggtttttttcttattgttttctccccagggttagaaaaattggtataagttcctaattaaaagctgaataaactttgagaaattatttctgagttgaccaataaataaaaataccactttctttaaaaaagcctagggaattgaagctctgtacatatactaatgatgcctttacaacccagtccttgataataccagattctcggtgcattgttcatgtctgtatctgcaagcctgttctgccattgcagtgtgatgaacctagaggtaactaccatgtgaacttgaactcttctaaaatagttctgtgtctcttagaccatgaccccttttcacttttgttatataggtttaatccccaagccaaggatagtacttagtatttcactacacttctattctcagtaaccaagattgcttgcaactttttttgccttggtgacttttgaaaaaaaaagaaaagaaaaagcagcatccttatatttctttaaaatacatagaaataaagttagtaattaggtaacctatgataacataataatgtggacgcctggggaaaccctcctcatgtttgtcatcttctacctctgccattttcctgcaattccgcttcctacttaggcagttcagagagaacaattctaataaaaacactcctctcctattaacaaaaaatgatgcagtacccatttttcgtatcctgcttttcttatattggagtaaaaaggacagggtatagacatgaatgatgatattctgcctggcctgtcatttcttacctggaaacatttacttaagagtttctgttactttttgttcagatggggatttgctaaaggttctgggaagctaataattgaattattagaaaaacatttcagaatagggaagtaaatgataaacttatattctttattattatttagtacaaaaatagattcccagtagatatccacaagcaatattagcagggcttctgtttctaagtgaccacagactaaccctttctaggctttaacattgtaaataatcctataaacagtttgattttttaagatgatttttgatttgaagagacaggctttacataagccttcattccttcaaaaggtcctgacaaaatacttgggtttttttctctttttttcattctggtatgctttgcagcatttcagctgctttggtggggacacagataaccccttcgcttccagctcttaaaattctttatctttttcttggcaaaaccagaattaagagtgtaagatagattccatgtgtgcttatataggtccctgcacagattggacttgaaccaaaattaagtccaaagaacatatgtttagaccaacttcatggaagtggaagatcctgtgctcttgaacttattttaattcttataatttgcacctatataaacaaagctcctactgtattcttctcttcatcaaccttttgtggtgatgggttgccttttctacgagcatttggaaggagtgatcaaataccgaaattgaactttctaaaacctacacatagcatgcgtttaaattctattatataaagccccaagtgctttaccttctaaaacatgcttctctataggtgcaaagttataagatatgtagaagaaaacatccatcagaatcttctggagaatatggtcagagtcttaaacaggcccagtgctgagttctttgtccacttagtcacacatcttttgtgggaatgggaaaggaaggagacagccaaactctgacaaaggcttttccttatagaataacccaaagcctaggtgagggttgatatataatgtcccatgatttaatatatgtggtttgggggaaaggacaagaaaaaactataattccacatataagaaggtagttgcccatttacaagttccagttatgtgtgtaaaacagaaaaattaagtaccaaacctattaggaaatttttttaaaaagtggatttaacttaaattactgtgtacttgaggttggctttggatatggattttctaaaaagtgatgttttattgtttatcatctaatggctgtaaactgtagtactagaataaaaaaaatggaaaatcagcttttcctctgcctggttcaccttcatcttacttttctttagaatttgtttcttctccatcttttcccccccataatttcttcacctgtgtcctgcaaagtttttttcctctctctgtctctctgtgcattcttccttgggttattttattttgtgttgtgaacttggtcttcttccccaccatggcttttgttttttatcacaagttcatgtggctcacatccagattgcgccaggctgagcgaagccgccaatctgctgagttggacaaccggctcttcaaacaggactttggagacaagatcaacagtctgcagctggaagtcgaggagctcaccaggcagcggtgaagagggggtagcttgagctgacagggtggtcatgggtaattcttagggtagacagcaagaaaaggggtctcatgacttccagccaggttggctctgtctttgcaatgtcctttctctggaattggaattcagaaagcttcacgtacttcaacattccccaaatccgatcaacatgctttgtgatcaaagaattaggaaattagagcccaagatcccagataaatagtaattattagccaaaataacactaataataatatgtaatatttcctgaattcttactgtgtgccagatactttaggcacttcacatgcaaactctcctaatatcttcatatcaaccctattagtgatattattgcctccactttcagattaaagtagagcttaaggctgggcgcagtggttcatgcctgtaatcccagcactttgggaggccaaggcaggtgtatcacctgaggtcaggagttccagaccagcctggccaagatggtgaaaccccatctctactaaaaatacaaaaatttgccagacatagtggtgggtgccagtaatcccagctactcgggaggctgaggcaggagaattgcttgaacctaggaaatggaggttacggtgacctgagatcatgccactgcactccagcctggcaacagaacaagactccatctcaaaaaaaggtagagattagacaggttaaatgtgtccagattcacacagttaagcttagaagtagcaacattatcatttaaaaacctgtctctctgacagcaagcccttaaccattcgtaattactgcactttaagacaaggggttggcattctttagagaatatgtctgtatagaattccaatttttcatccttttcctctccaacttacctcagaacaggtgaggtctactatacagggagaaaacacaaaccggccagggggcgggacaatcgcccaaggaggttaatataaggggggttaagcggcaggcccggtct

SEQ ID NO: 452097 - DNA, 6117 bp, Homo sapiens
agccattttggtcaacaccctgcttactgcgcacggccaatcctatgagaactcagcatcccagctcatctgagcagatcctggaagtgatttctgcagctcaggattttttttttaagctacattgaaaatataggtttattttttgttcaggtttttcttttatattttttttctgcacaaaggaggaggatttttcacttactcatatcgaggccagatttttaaagccagctaaggcagcatcagctgtgcgggatttaaagcctatagctcagctgaaaaaaaaggtggggggcagggaagggaagataaaaggagaggaagctgggagaagacaagcatcatcttattttgctatgtggtaggaactgtctataagatagtgtagaattgtttatcttgagcagtttgttcttaacctataaggtatttttccttttttttttttttaaacctcccccacccttttcctgaaagctttgtttcagagctttgtattgggtttttttggtgaggaggttgtatttatttttttggtgtgtgtgtgtgagtgtgtgtgtgtctgtgtgtgtgttgtggtcccagctgagtcatcatgtctgctctgacgcctccgaccgatatgccaacccccaccactgacaagatcacacaggctgccatggagaccatctacctttgcaaattccgagtgtccatggatggagaatggctctgcctgcgagagctggatgacatctcacttacacctgacccagagcctacccatgaagatcctaattatctcatggctaatgaacgcatgaacctcatgaacatggccaagctgagtatcaagggcttgattgaatcagctctgaacctggggaggactcttgactctgactatgcacctctccagcaattctttgtggtgatggagcactgtctgaaacatggcttgaaagctaaaaaaacttttctcggacaaaataaatccttctgggggcctctagaactggtagaaaagcttgttccagaagccgcagagataacagcaagtgttaaagatcttccaggacttaagacaccagtaggtagaggaagagcctggcttcgtttggcattaatgcaaaagaaactttcagaatatatgaaagctttgatcaataagaaagaacttctcagtgaattctacgaacccaatgccctcatgatggaagaagaaggagccataattgctggtctgttggtgggtctgaatgtcattgatgccaatttctgtatgaaaggagaagacttggactctcaggttggagttatagatttttcaatgtatctcaaggacgggaacagcagtaaaggtactgaaggagacggtcagattactgcaattctggaccagaagaactatgtagaagaactgaacagacatttgaatgctactgtaaacaaccttcaggcaaaagtagatgcattagaaaaatccaacactaaactgacagaggagcttgcagttgcaaacaacaggatcattaccttacaagaagaaatggaacgagttaaagaggaaagttcctacatactggaatccaatcggaagggtcccaagcaagacagaactgcagaagggcaagcactaagtgaagcaagaaagcatttaaaagaagagacacaattacgattggatgttgagaaagaactggagatgcagatcagcatgaggcaggagatggaattggctatgaagatgctggagaaggatgtctgtgagaagcaggatgccctggtatctcttcggcagcagctggatgacctcagagctctcaagcatgaacttgcctttaagctgcagagttcagacttaggagtaaaacagaaaagtgaactaaacagtcgcttggaagagaagactaatcagatggctgctaccattaaacaacttgaacaaagtgaaaaggatttggtgaaacaggcaaagaccttaaatagtgcagcaaataaactgatcccaaaacatcattaggcatttttaagttggtcacgtcgcaagtccgatatcacaacttaattgtaaaaggaagaaatctgaaagttactacatttaagctctgattctatataaaatgtcaccaaaaagttgactttgaatttgttggacttttaaaaaaccagttggaaatataggttgggtttttttcttattgttttctccccagggttagaaaaattggtataagttcctaattaaaagctgaataaactttgagaaattatttctgagttgaccaataaataaaaataccactttctttaaaaaagcctagggaattgaagctctgtacatatactaatgatgcctttacaacccagtccttgataataccagattctcggtgcattgttcatgtctgtatctgcaagcctgttctgccattgcagtgtgatgaacctagaggtaactaccatgtgaacttgaactcttctaaaatagttctgtgtctcttagaccatgaccccttttcacttttgttatataggtttaatccccaagccaaggatagtacttagtatttcactacacttctattctcagtaaccaagattgcttgcaactttttttgccttggtgacttttgaaaaaaaaagaaaagaaaaagcagcatccttatatttctttaaaatacatagaaataaagttagtaattaggtaacctatgataacataataatgtggacgcctggggaaaccctcctcatgtttgtcatcttctacctctgccattttcctgcaattccgcttcctacttaggcagttcagagagaacaattctaataaaaacactcctctcctattaacaaaaaatgatgcagtacccatttttcgtatcctgcttttcttatattggagtaaaaaggacagggtatagacatgaatgatgatattctgcctggcctgtcatttcttacctggaaacatttacttaagagtttctgttactttttgttcagatggggatttgctaaaggttctgggaagctaataattgaattattagaaaaacatttcagaatagggaagtaaatgataaacttatattctttattattatttagtacaaaaatagattcccagtagatatccacaagcaatattagcagggcttctgtttctaagtgaccacagactaaccctttctaggctttaacattgtaaataatcctataaacagtttgattttttaagatgatttttgatttgaagagacaggctttacataagccttcattccttcaaaaggtcctgacaaaatacttgggtttttttctctttttttcattctggtatgctttgcagcatttcagctgctttggtggggacacagataaccccttcgcttccagctcttaaaattctttatctttttcttggcaaaaccagaattaagagtgtaagatagattccatgtgtgcttatataggtccctgcacagattggacttgaaccaaaattaagtccaaagaacatatgtttagaccaacttcatggaagtggaagatcctgtgctcttgaacttattttaattcttataatttgcacctatataaacaaagctcctactgtattcttctcttcatcaaccttttgtggtgatgggttgccttttctacgagcatttggaaggagtgatcaaataccgaaattgaactttctaaaacctacacatagcatgcgtttaaattctattatataaagccccaagtgctttaccttctaaaacatgcttctctataggtgcaaagttataagatatgtagaagaaaacatccatcagaatcttctggagaatatggtcagagtcttaaacaggcccagtgctgagttctttgtccacttagtcacacatcttttgtgggaatgggaaaggaaggagacagccaaactctgacaaaggcttttccttatagaataacccaaagcctaggtgagggttgatatataatgtcccatgatttaatatatgtggtttgggggaaaggacaagaaaaaactataattccacatataagaaggtagttgcccatttacaagttccagttatgtgtgtaaaacagaaaaattaagtaccaaacctattaggaaatttttttaaaaagtggatttaacttaaattactgtgtacttgaggttggctttggatatggattttctaaaaagtgatgttttattgtttatcatctaatggctgtaaactgtagtactagaataaaaaaaatggaaaatcagcttttcctctgcctggttcaccttcatcttacttttctttagaatttgtttcttctccatcttttcccccccataatttcttcacctgtgtcctgcaaagtttttttcctctctctgtctctctgtgcattcttccttgggttattttattttgtgttgtgaacttggtcttcttccccaccatggcttttgttttttatcacaagttcatgtggctcacatccagattgcgccaggctgagcgaagccgccaatctgctgagttggacaaccggctcttcaaacaggactttggagacaagatcaacagtctgcagctggaagtcgaggagctcaccaggcagcggtgaagagggggtagcttgagctgacagggtggtcatgggtaattcttagggtagacagcaagaaaaggggtctcatgacttccagccaggttggctctgtctttgcaatgtcctttctctggaattggaattcagaaagcttcacgtacttcaacattccccaaatccgatcaacatgctttgtgatcaaagaattaggaaattagagcccaagatcccagataaatagtaattattagccaaaataacactaataataatatgtaatatttcctgaattcttactgtgtgccagatactttaggcacttcacatgcaaactctcctaatatcttcatatcaaccctattagtgatattattgcctccactttcagattaaagtagagcttaaggctgggcgcagtggttcatgcctgtaatcccagcactttgggaggccaaggcaggtgtatcacctgaggtcaggagttccagaccagcctggccaagatggtgaaaccccatctctactaaaaatacaaaaatttgccagacatagtggtgggtgccagtaatcccagctactcgggaggctgaggcaggagaattgcttgaacctaggaaatggaggttacggtgacctgagatcatgccactgcactccagcctggcaacagaacaagactccatctcaaaaaaaggtagagattagacaggttaaatgtgtccagattcacacagttaagcttagaagtagcaacattatcatttaaaaacctgtctctctgacagcaagcccttaaccattcgtaattactgcactttaagacaaggggttggcattctttagagaatatgtctgtatagaattccaatttttcatccttttcctctccaacttacctcaggaaccagcttgagttagaactaaaacaggaaaaagaaagaagattacaaaacgacaggagcatcccaggaaggggttcccagaagtcagaatccaagatggatgggaagcacaaaatgcaagaggaaaatgttaaactaaaaaagcccctggaagaaagccacaggctgcaaccccaccctatggatgaacaggatcagctgctgctctctgaaaagccacagttgtgtcagctatgccaggaagacggcagcctaacaaaggtaactgtgatgagaaacggacaggcttttcatagggatgtctacagcagcccccagtccctccccaggagtaacagggactttcccgcatagagtgcagagtgcatgcagagtgctgggagtggggtgaaaagcaaaaggggcaagcatttactgggtacctgttttttcagtcataataattcatgtcagaaaattcccattaaaataaacataaatagccaggcgcggtgactcacgcctgtaatcccagcattttgggaggccgaggcgggccgatcacaaggtcaggagttcaagaccagcctgatcaacatggtaaaaccccgtctgtactaaaaatacaaaa

SEQ ID NO: 452098 - DNA, 2731 bp, Homo sapiens
cgacagagcgagactctgtctccaaaaagaaagaaaaatattgtggcactggggcatcaacttgattgaacgtccagaggattatagtctgctgtatatggccatccttggttttaccagtttttcagagctcagtctggggaaaagaaaaaaaaaattatacttcccctaagaagtaactgatatctggagccaactttgcaagtaagtagaatacattctgaattttatttgaatctcaagaattaaaatattactttgaaaatcatttgtcacaaactgtcagaataattaagaaactacttagagcaaagaatgaggaaacatagcttgaaagttagatcccttccctaataaaaaaagctacttagctttatacccaaactaaggcattgcagaagaaaatatttgcaatatcattatttagcattctgaataattaataaattgggctgttttcttttggcaggatgggaagcacaaaatgcaagaggaaaatgttaaactaaaaaagcccctggaagaaagccacaggctgcaaccccaccctatggatgaacaggatcagctgctgctctctgaaaagccacagttgtgtcagctatgccaggaagacggcagcctaacaaagaatgtgtgtaagaactgcagcggaaccttctgtgatgcctgttcaacaaatgaactgcctcttccttcaagtatcaagcttgagcgagtttgcaatccctgtcacaagcatctgatgaagcaatattctaccagcccatcataagactggaggccaagacctggaccaaaacgtttatgcaggctcctctgtacctgtgttttagctgtcaggatctcatagagcccagttcttagagtcaactaaagagttgataggaatttactaggtccagggagaaaaggcagtggttggggttactggaaattttgctcattttctctaatgactgtatgaataaaagtgaacttacttgagcctttctcttctaaatctaaacaacctgatattgaaggtttgctttatagcatatctttggaaaggcaactcatttttatgattagtgatactggggtggatttaataggagagagaatccaggcagataagaataaaaaggaaaatgatcatctccttctatagcatttgcagattcaagggggagaggtagatgctgagatcaaaatgacagttgttacttatttttccaggtgctgttagtataaacattgtttcctcttcacccctgctaactacctctttaaagtatttctaccaaactgtgaacccaatctcagggaaaagaaattaaaaagtaatataaattctgcatatattaaaaacaatattgtaatatgttataatttcaggaccagaattttctggtctttacctacaagggttttcattatcaaaaaaaagaacatttgtttttctactttatgacttcaaagtaaataactgcccttttcagaatctccttccacaaaacaagccaactcttccccattccctccatcttcctttccaagtcataatggaaattgtaaggagttttaaaaatagggtttggcttttgcaaatagaagatattgattaaagcaaagtcaaatatagagtaaaataagtttaatttgttttcttaagacagggtcttgctctgttgcacaagctggagggcagtagtgcaatcacagctcactgaatccctgttctcccgggcctcaagcaatcttcccaccttagcctcccaagtagctgggactggctttttttttttttttttggccggggagggggtctcattggttgctcagcctggtctcaaactcctgggcttaagcagtcctcccaccttgacttccacagtgccgagattacaggcatgagccaccacacctggccaagtttaatttgttcatggctgagaacagttagctcggaatacttacattgttttttgaataaggaattccttattctgagtgagtcacgaatgagagctgatagatgctttcttgaaaagggcaatacagtcatcccttggtatccatgggggattggttccaggaacccaacttgatatcagaatccatgggtgctcaagtcccattatagagaatgggttatatggtatttgcatataacctacatacatcctcctgtgtactttaaatcatctgaagatgattacttatacctaataaaatacctacacatcacttcatttgcatggattcaacatagtgcttggtgttcagtaaattcaagttttgcttttttggaactttgtggaatttttctttttctgaatatttttgattggcagttggttgaagccatggatgcagaacccatggatatggagggctgactgtacttacttacatatctatctatctttgagtaacaaactctttgggggaaaagagggaagtgtattgagcaagagaaggcaaaaaacattacataatattttgattctgttacgtgtgtctatagattgtttcattctaatcaagacctaagaaggtatgattctgtgactgatttagaattctggggtggaaatatcctggaaccatgttttttaataaattctgtctcttggaaagagttaacaacagcctgggaaagagttgttattccaaaagtcagcctgttacttggtgaagctgaagtttaagagttctggggaaaaataaaatctagtaattccag

SEQ ID NO: 452099 - DNA, 2674 bp, Homo sapiens
cgacagagcgagactctgtctccaaaaagaaagaaaaatattgtggcactggggcatcaacttgattgaacgtccagaggattatagtctgctgtatatggccatccttggttttaccagtttttcagagctcagtctggggaaaagataagtagaatacattctgaattttatttgaatctcaagaattaaaatattactttgaaaatcatttgtcacaaactgtcagaataattaagaaactacttagagcaaagaatgaggaaacatagcttgaaagttagatcccttccctaataaaaaaagctacttagctttatacccaaactaaggcattgcagaagaaaatatttgcaatatcattatttagcattctgaataattaataaattgggctgttttcttttggcaggatgggaagcacaaaatgcaagaggaaaatgttaaactaaaaaagcccctggaagaaagccacaggctgcaaccccaccctatggatgaacaggatcagctgctgctctctgaaaagccacagttgtgtcagctatgccaggaagacggcagcctaacaaagaatgtgtgtaagaactgcagcggaaccttctgtgatgcctgttcaacaaatgaactgcctcttccttcaagtatcaagcttgagcgagtttgcaatccctgtcacaagcatctgatgaagcaatattctaccagcccatcataagactggaggccaagacctggaccaaaacgtttatgcaggctcctctgtacctgtgttttagctgtcaggatctcatagagcccagttcttagagtcaactaaagagttgataggaatttactaggtccagggagaaaaggcagtggttggggttactggaaattttgctcattttctctaatgactgtatgaataaaagtgaacttacttgagcctttctcttctaaatctaaacaacctgatattgaaggtttgctttatagcatatctttggaaaggcaactcatttttatgattagtgatactggggtggatttaataggagagagaatccaggcagataagaataaaaaggaaaatgatcatctccttctatagcatttgcagattcaagggggagaggtagatgctgagatcaaaatgacagttgttacttatttttccaggtgctgttagtataaacattgtttcctcttcacccctgctaactacctctttaaagtatttctaccaaactgtgaacccaatctcagggaaaagaaattaaaaagtaatataaattctgcatatattaaaaacaatattgtaatatgttataatttcaggaccagaattttctggtctttacctacaagggttttcattatcaaaaaaaagaacatttgtttttctactttatgacttcaaagtaaataactgcccttttcagaatctccttccacaaaacaagccaactcttccccattccctccatcttcctttccaagtcataatggaaattgtaaggagttttaaaaatagggtttggcttttgcaaatagaagatattgattaaagcaaagtcaaatatagagtaaaataagtttaatttgttttcttaagacagggtcttgctctgttgcacaagctggagggcagtagtgcaatcacagctcactgaatccctgttctcccgggcctcaagcaatcttcccaccttagcctcccaagtagctgggactggctttttttttttttttttggccggggagggggtctcattggttgctcagcctggtctcaaactcctgggcttaagcagtcctcccaccttgacttccacagtgccgagattacaggcatgagccaccacacctggccaagtttaatttgttcatggctgagaacagttagctcggaatacttacattgttttttgaataaggaattccttattctgagtgagtcacgaatgagagctgatagatgctttcttgaaaagggcaatacagtcatcccttggtatccatgggggattggttccaggaacccaacttgatatcagaatccatgggtgctcaagtcccattatagagaatgggttatatggtatttgcatataacctacatacatcctcctgtgtactttaaatcatctgaagatgattacttatacctaataaaatacctacacatcacttcatttgcatggattcaacatagtgcttggtgttcagtaaattcaagttttgcttttttggaactttgtggaatttttctttttctgaatatttttgattggcagttggttgaagccatggatgcagaacccatggatatggagggctgactgtacttacttacatatctatctatctttgagtaacaaactctttgggggaaaagagggaagtgtattgagcaagagaaggcaaaaaacattacataatattttgattctgttacgtgtgtctatagattgtttcattctaatcaagacctaagaaggtatgattctgtgactgatttagaattctggggtggaaatatcctggaaccatgttttttaataaattctgtctcttggaaagagttaacaacagcctgggaaagagttgttattccaaaagtcagcctgttacttggtgaagctgaagtttaagagttctggggaaaaataaaatctagtaattccag

SEQ ID NO: 452100 - DNA, 3743 bp, Homo sapiens
agccattttggtcaacaccctgcttactgcgcacggccaatcctatgagaactcagcatcccagctcatctgagcagatcctggaagtgatttctgcagctcaggattttttttttaagctacattgaaaatataggtttattttttgttcaggtttttcttttatattttttttctgcacaaaggaggaggatttttcacttactcatatcgaggccagatttttaaagccagctaaggcagcatcagctgtgcgggatttaaagcctatagctcagctgaaaaaaaaggtggggggcagggaagggaagataaaaggagaggaagctgggagaagacaagcatcatcttattttgctatgtggtaggaactgtctataagatagtgtagaattgtttatcttgagcagtttgttcttaacctataaggtatttttccttttttttttttttaaacctcccccacccttttcctgaaagctttgtttcagagctttgtattgggtttttttggtgaggaggttgtatttatttttttggtgtgtgtgtgtgagtgtgtgtgtgtctgtgtgtgtgttgtggtcccagctgagtcatcatgtctgctctgacgcctccgaccgatatgccaacccccaccactgacaagatcacacaggctgccatggagaccatctacctttgcaaattccgagtgtccatggatggagaatggctctgcctgcgagagctggatgacatctcacttacacctgacccagagcctacccatgaagatcctaattatctcatggctaatgaacgcatgaacctcatgaacatggccaagctgagtatcaagggcttgattgaatcagctctgaacctggggaggactcttgactctgactatgcacctctccagcaattctttgtggtgatggagcactgtctgaaacatggcttgaaagctaaaaaaacttttctcggacaaaataaatccttctgggggcctctagaactggtagaaaagcttgttccagaagccgcagagataacagcaagtgttaaagatcttccaggacttaagacaccagtaggtagaggaagagcctggcttcgtttggcattaatgcaaaagaaactttcagaatatatgaaagctttgatcaataagaaagaacttctcagtgaattctacgaacccaatgccctcatgatggaagaagaaggagccataattgctggtctgttggtgggtctgaatgtcattgatgccaatttctgtatgaaaggagaagacttggactctcaggttggagttatagatttttcaatgtatctcaaggacgggaacagcagtaaaggtactgaaggagacggtcagattactgcaattctggaccagaagaactatgtagaagaactgaacagacatttgaatgctactgtaaacaaccttcaggcaaaagtagatgcattagaaaaatccaacactaaactgacagaggagcttgcagttgcaaacaacaggatcattaccttacaagaagaaatggaacgagttaaagaggaaagttcctacatactggaatccaatcggaagggtcccaagcaagacagaactgcagaagggcaagcactaagtgaagcaagaaagcatttaaaagaagagacacaattacgattggatgttgagaaagaactggagatgcagatcagcatgaggcaggagatggaattggctatgaagatgctggagaaggatgtctgtgagaagcaggatgccctggtatctcttcggcagcagctggatgacctcagagctctcaagcatgaacttgcctttaagctgcagagttcagacttaggagtaaaacagaaaagtgaactaaacagtcgcttggaagagaagactaatcagatggctgctaccattaaacaacttgaacaaagtgaaaaggatttggtgaaacaggcaaagaccttaaatagtgcagcaaataaactgatcccaaaacatcattaggcatttttaagttggtcacgtcgcaagtccgatatcacaacttaattgtaaaaggaagaaatctgaaagttactacatttaagctctgattctatataaaatgtcaccaaaaagttgactttgaatttgttggacttttaaaaaaccagttggaaatataggttgggtttttttcttattgttttctccccagggttagaaaaattggtataagttcctaattaaaagctgaataaactttgagaaattatttctgagttgaccaataaataaaaataccactttctttaaaaaagcctagggaattgaagctctgtacatatactaatgatgcctttacaacccagtccttgataataccagattctcggtgcattgttcatgtctgtatctgcaagcctgttctgccattgcagtgtgatgaacctagaggtaactaccatgtgaacttgaactcttctaaaatagttctgtgtctcttagaccatgaccccttttcacttttgttatataggtttaatccccaagccaaggatagtacttagtatttcactacacttctattctcagtaaccaagattgcttgcaactttttttgccttggtgacttttgaaaaaaaaagaaaagaaaaagcagcatccttatatttctttaaaatacatagaaataaagttagtaattaggtaacctatgataacataataatgtggacgcctggggaaaccctcctcatgtttgtcatcttctacctctgccattttcctgcaattccgcttcctacttaggcagttcagagagaacaattctaataaaaacactcctctcctattaacaaaaaatgatgcagtacccatttttcgtatcctgcttttcttatattggagtaaaaaggacagggtatagacatgaatgatgatattctgcctggcctgtcatttcttacctggaaacatttacttaagagtttctgttactttttgttcagatggggatttgctaaaggttctgggaagctaataattgaattattagaaaaacatttcagaatagggaagtaaatgataaacttatattctttattattatttagtacaaaaatagattcccagtagatatccacaagcaatattagcagggcttctgtttctaagtgaccacagactaaccctttctaggctttaacattgtaaataatcctataaacagtttgattttttaagatgatttttgatttgaagagacaggctttacataagccttcattccttcaaaaggtcctgacaaaatacttggagaatatggtcagagtcttaaacaggcccagtgctgagttctttgtccacttagtcacacatcttttgtgggaatgggaaaggaaggagacagccaaactctgacaaaggcttttccttatagaataacccaaagcctaggtgagggttgatatataatgtcccatgatttaatatatgtggtttgggggaaaggacaagaaaaaactataattccacatataagaaggtagttgcccatttacaagttccagttatgtgtgtaaaacagaaaaattaagtaccaaacctattaggaaatttttttaaaaagtggatttaacttaaattactgtgtacttgaggttggctttggatatggattttctaaaaagtgatgttttattgtttatcatctaatggctgtaaactgtagtactagaataaaaaaaatggaaaatca

SEQ ID NO: 452101 - DNA, 2731 bp, Homo sapiens
atatatggccagtgaaccattggagttttacacattgggaaacataaatgctaactattttgatagcaaaaaggaatgtaaaatataacttcaaatctatttttaaatgggaacccttatataataagtcaagggtcagattctagtgattcattttaagaagcaaagtttcctctccttggaggtcaaaattaataattatgttgttctaagtaatataaaagacctacagtatttcttgtttgaaaaaaatgtttgtattctgagctttttattgaaatgatataaatgaaaatacatgaagttcctatttgtcacaattttttacttctccattgtaggctgcaaccccaccctatggatgaacaggtaacagagcctcctgtttcaaaacatcttgtatgaattatgaagttggttgtaccgtgcctagccagcaaataaggtagcatgggcggaagatgagtgaatacagtgtgccatccttctaacaataccctgaacaaatatgtattgcctgaagctcacacaggaagtagcacagctttgagcagtttactaagatcagctgctgctctctgaaaagccacagttgtgtcagctatgccaggaagacggcagcctaacaaagaatgtgtgtaagaactgcagcggaaccttctgtgatgcctgttcaacaaatgaactgcctcttccttcaagtatcaagcttgagcgagtttgcaatccctgtcacaagcatctgatgaagcaatattctaccagcccatcataagactggaggccaagacctggaccaaaacgtttatgcaggctcctctgtacctgtgttttagctgtcaggatctcatagagcccagttcttagagtcaactaaagagttgataggaatttactaggtccagggagaaaaggcagtggttggggttactggaaattttgctcattttctctaatgactgtatgaataaaagtgaacttacttgagcctttctcttctaaatctaaacaacctgatattgaaggtttgctttatagcatatctttggaaaggcaactcatttttatgattagtgatactggggtggatttaataggagagagaatccaggcagataagaataaaaaggaaaatgatcatctccttctatagcatttgcagattcaagggggagaggtagatgctgagatcaaaatgacagttgttacttatttttccaggtgctgttagtataaacattgtttcctcttcacccctgctaactacctctttaaagtatttctaccaaactgtgaacccaatctcagggaaaagaaattaaaaagtaatataaattctgcatatattaaaaacaatattgtaatatgttataatttcaggaccagaattttctggtctttacctacaagggttttcattatcaaaaaaaagaacatttgtttttctactttatgacttcaaagtaaataactgcccttttcagaatctccttccacaaaacaagccaactcttccccattccctccatcttcctttccaagtcataatggaaattgtaaggagttttaaaaatagggtttggcttttgcaaatagaagatattgattaaagcaaagtcaaatatagagtaaaataagtttaatttgttttcttaagacagggtcttgctctgttgcacaagctggagggcagtagtgcaatcacagctcactgaatccctgttctcccgggcctcaagcaatcttcccaccttagcctcccaagtagctgggactggctttttttttttttttttggccggggagggggtctcattggttgctcagcctggtctcaaactcctgggcttaagcagtcctcccaccttgacttccacagtgccgagattacaggcatgagccaccacacctggccaagtttaatttgttcatggctgagaacagttagctcggaatacttacattgttttttgaataaggaattccttattctgagtgagtcacgaatgagagctgatagatgctttcttgaaaagggcaatacagtcatcccttggtatccatgggggattggttccaggaacccaacttgatatcagaatccatgggtgctcaagtcccattatagagaatgggttatatggtatttgcatataacctacatacatcctcctgtgtactttaaatcatctgaagatgattacttatacctaataaaatacctacacatcacttcatttgcatggattcaacatagtgcttggtgttcagtaaattcaagttttgcttttttggaactttgtggaatttttctttttctgaatatttttgattggcagttggttgaagccatggatgcagaacccatggatatggagggctgactgtacttacttacatatctatctatctttgagtaacaaactctttgggggaaaagagggaagtgtattgagcaagagaaggcaaaaaacattacataatattttgattctgttacgtgtgtctatagattgtttcattctaatcaagacctaagaaggtatgattctgtgactgatttagaattctggggtggaaatatcctggaaccatgttttttaataaattctgtctcttggaaagagttaacaacagcctgggaaagagttgttattccaaaagtcagcctgttacttggtgaagctgaagtttaagagttctggggaaaaataaaatctagtaattccag

SEQ ID NO: 452102 - DNA, 1779 bp, Homo sapiens
cgggggcacggaccgagagggcgaggcggggccgccgccggcctcccccggccgggcagtcggagcccgactcgccggtggccgcccccttcttcctgctgtaccccggcgatggaggcgccggcttcggagtgcgcccgccgccgcagcagcagcgctcctggaggaccccgccgtcccccggctcaccgctgcccttcctgctgctgagctacccgagcggcggcggcggcagcagcggcagcggcaagcaccatcctaattatctcatggctaatgaacgcatgaacctcatgaacatggccaagctgagtatcaagggcttgattgaatcagctctgaacctggggaggactcttgactctgactatgcacctctccagcaattctttgtggtgatggagcactgtctgaaacatggcttgaaagctaaaaaaacttttctcggacaaaataaatccttctgggggcctctagaactggtagaaaagcttgttccagaagccgcagagataacagcaagtgttaaagatcttccaggacttaagacaccagtaggtagaggaagagcctggcttcgtttggcattaatgcaaaagaaactttcagaatatatgaaagctttgatcaataagaaagaacttctcagtgaattctacgaacccaatgccctcatgatggaagaagaaggagccataattgctggtctgttggtgggtctgaatgtcattgatgccaatttctgtatgaaaggagaagacttggactctcaggttggagttatagatttttcaatgtatctcaaggacgggaacagcagtaaaggtactgaaggagacggtcagattactgcaattctggaccagaagaactatgtagaagaactgaacagacatttgaatgctactgtaaacaaccttcaggcaaaagtagatgcattagaaaaatccaacactaaactgacagaggagcttgcagttgcaaacaacaggatcattaccttacaagaagaaatggaacgagttaaagaggaaagttcctacatactggaatccaatcggaagggtcccaagcaagacagaactgcagaagggcaagcactaagtgaagcaagaaagcatttaaaagaagagacacaattacgattggatgttgagaaagaactggagatgcagatcagcatgaggcaggagatggaattggctatgaagatgctggagaaggatgtctgtgagaagcaggatgccctggtatctcttcggcagcagctggatgacctcagagctctcaagcatgaacttgcctttaagctgcagagttcagacttaggagtaaaacagaaaagtgaactaaacagtcgcttggaagagaagactaatcagatggctgctaccattaaacaacttgaacaaaggtaaaagtcctgtttctttaatgaaacactttggattgtcagtgctgaagtgaaaagaatgtgctgtacattcggcaaatagaaaatacatgaaattcttccaaattagcatcagacattctggtagaaaaaagccagttgaatgttatgtgtgttttctaaggtatgactgaaatgtttttaggaaatgtcaatcacttgactagcctttaaaaaaaaaaaagaaaggtcagccttttatgactgttttgaacatcagaactcttaatccatgtcagagtcatgtgttagaggaaggatacttaaaagcatggaaggactcttaaatgtatgtatgtaattctgtgattttattgttcatcact

SEQ ID NO: 452103 - DNA, 6978 bp, Homo sapiens
agccattttggtcaacaccctgcttactgcgcacggccaatcctatgagaactcagcatcccagctcatctgagcagatcctggaagtgatttctgcagctcaggattttttttttaagctacattgaaaatataggtttattttttgttcaggtttttcttttatattttttttctgcacaaaggaggaggatttttcacttactcatatcgaggccagatttttaaagccagctaaggcagcatcagctgtgcgggatttaaagcctatagctcagctgaaaaaaaaggtggggggcagggaagggaagataaaaggagaggaagctgggagaagacaagcatcatcttattttgctatgtggtaggaactgtctataagatagtgtagaattgtttatcttgagcagtttgttcttaacctataaggtatttttccttttttttttttttaaacctcccccacccttttcctgaaagctttgtttcagagctttgtattgggtttttttggtgaggaggttgtatttatttttttggtgtgtgtgtgtgagtgtgtgtgtgtctgtgtgtgtgttgtggtcccagctgagtcatcatgtctgctctgacgcctccgaccgatatgccaacccccaccactgacaagatcacacaggctgccatggagaccatctacctttgcaaattccgagtgtccatggatggagaatggctctgcctgcgagagctggatgacatctcacttacacctgacccagagcctacccatgaagatcctaattatctcatggctaatgaacgcatgaacctcatgaacatggccaagctgagtatcaagggcttgattgaatcagctctgaacctggggaggactcttgactctgactatgcacctctccagcaattctttgtggtgatggagcactgtctgaaacatggcttgaaagctaaaaaaacttttctcggacaaaataaatccttctgggggcctctagaactggtagaaaagcttgttccagaagccgcagagataacagcaagtgttaaagatcttccaggacttaagacaccagtaggtagaggaagagcctggcttcgtttggcattaatgcaaaagaaactttcagaatatatgaaagctttgatcaataagaaagaacttctcagtgaattctacgaacccaatgccctcatgatggaagaagaaggagccataattgctggtctgttggtgggtctgaatgtcattgatgccaatttctgtatgaaaggagaagacttggactctcaggttggagttatagatttttcaatgtatctcaaggacgggaacagcagtaaaggtactgaaggagacggtcagattactgcaattctggaccagaagaactatgtagaagaactgaacagacatttgaatgctactgtaaacaaccttcaggcaaaagtagatgcattagaaaaatccaacactaaactgacagaggagcttgcagttgcaaacaacaggatcattaccttacaagaagaaatggaacgagttaaagaggaaagttcctacatactggaatccaatcggaagggtcccaagcaagacagaactgcagaagggcaagcactaagtgaagcaagaaagcatttaaaagaagagacacaattacgattggatgttgagaaagaactggagatgcagatcagcatgaggcaggagatggaattggctatgaagatgctggagaaggatgtctgtgagaagcaggatgccctggtatctcttcggcagcagctggatgacctcagagctctcaagcatgaacttgcctttaagctgcagagttcagacttaggagtaaaacagaaaagtgaactaaacagtcgcttggaagagaagactaatcagatggctgctaccattaaacaacttgaacaaagtgaaaaggatttggtgaaacaggcaaagaccttaaatagtgcagcaaataaactgatcccaaaacatcattaggcatttttaagttggtcacgtcgcaagtccgatatcacaacttaattgtaaaaggaagaaatctgaaagttactacatttaagctctgattctatataaaatgtcaccaaaaagttgactttgaatttgttggacttttaaaaaaccagttggaaatataggttgggtttttttcttattgttttctccccagggttagaaaaattggtataagttcctaattaaaagctgaataaactttgagaaattatttctgagttgaccaataaataaaaataccactttctttaaaaaagcctagggaattgaagctctgtacatatactaatgatgcctttacaacccagtccttgataataccagattctcggtgcattgttcatgtctgtatctgcaagcctgttctgccattgcagtgtgatgaacctagaggtaactaccatgtgaacttgaactcttctaaaatagttctgtgtctcttagaccatgaccccttttcacttttgttatataggtttaatccccaagccaaggatagtacttagtatttcactacacttctattctcagtaaccaagattgcttgcaactttttttgccttggtgacttttgaaaaaaaaagaaaagaaaaagcagcatccttatatttctttaaaatacatagaaataaagttagtaattaggtaacctatgataacataataatgtggacgcctggggaaaccctcctcatgtttgtcatcttctacctctgccattttcctgcaattccgcttcctacttaggcagttcagagagaacaattctaataaaaacactcctctcctattaacaaaaaatgatgcagtacccatttttcgtatcctgcttttcttatattggagtaaaaaggacagggtatagacatgaatgatgatattctgcctggcctgtcatttcttacctggaaacatttacttaagagtttctgttactttttgttcagatggggatttgctaaaggttctgggaagctaataattgaattattagaaaaacatttcagaatagggaagtaaatgataaacttatattctttattattatttagtacaaaaatagattcccagtagatatccacaagcaatattagcagggcttctgtttctaagtgaccacagactaaccctttctaggctttaacattgtaaataatcctataaacagtttgattttttaagatgatttttgatttgaagagacaggctttacataagccttcattccttcaaaaggtcctgacaaaatacttgggtttttttctctttttttcattctggtatgctttgcagcatttcagctgctttggtggggacacagataaccccttcgcttccagctcttaaaattctttatctttttcttggcaaaaccagaattaagagtgtaagatagattccatgtgtgcttatataggtccctgcacagattggacttgaaccaaaattaagtccaaagaacatatgtttagaccaacttcatggaagtggaagatcctgtgctcttgaacttattttaattcttataatttgcacctatataaacaaagctcctactgtattcttctcttcatcaaccttttgtggtgatgggttgccttttctacgagcatttggaaggagtgatcaaataccgaaattgaactttctaaaacctacacatagcatgcgtttaaattctattatataaagccccaagtgctttaccttctaaaacatgcttctctataggtgcaaagttataagatatgtagaagaaaacatccatcagaatcttctggagaatatggtcagagtcttaaacaggcccagtgctgagttctttgtccacttagtcacacatcttttgtgggaatgggaaaggaaggagacagccaaactctgacaaaggcttttccttatagaataacccaaagcctaggtgagggttgatatataatgtcccatgatttaatatatgtggtttgggggaaaggacaagaaaaaactataattccacatataagaaggtagttgcccatttacaagttccagttatgtgtgtaaaacagaaaaattaagtaccaaacctattaggaaatttttttaaaaagtggatttaacttaaattactgtgtacttgaggttggctttggatatggattttctaaaaagtgatgttttattgtttatcatctaatggctgtaaactgtagtactagaataaaaaaaatggaaaatcagcttttcctctgcctggttcaccttcatcttacttttctttagaatttgtttcttctccatcttttcccccccataatttcttcacctgtgtcctgcaaagtttttttcctctctctgtctctctgtgcattcttccttgggttattttattttgtgttgtgaacttggtcttcttccccaccatggcttttgttttttatcacaagttcatgtggctcacatccagattgcgccaggctgagcgaagccgccaatctgctgagttggacaaccggctcttcaaacaggactttggagacaagatcaacagtctgcagctggaagtcgaggagctcaccaggcagcggaaccagcttgagttagaactaaaacaggaaaaagaaagaagattacaaaacgacaggagcatcccaggaaggggttcccagaagtcagaatccaagatggatgggaagcacaaaatgcaagaggaaaatgttaaactaaaaaagcccctggaagaaagccacaggctgcaaccccaccctatggatgaacaggatcagctgctgctctctgaaaagccacagttgtgtcagctatgccaggaagacggcagcctaacaaagaatgtgtgtaagaactgcagcggaaccttctgtgatgcctgttcaacaaatgaactgcctcttccttcaagtatcaagcttgagcgagtttgcaatccctgtcacaagcatctgatgaagcaatattctaccagcccatcataagactggaggccaagacctggaccaaaacgtttatgcaggctcctctgtacctgtgttttagctgtcaggatctcatagagcccagttcttagagtcaactaaagagttgataggaatttactaggtccagggagaaaaggcagtggttggggttactggaaattttgctcattttctctaatgactgtatgaataaaagtgaacttacttgagcctttctcttctaaatctaaacaacctgatattgaaggtttgctttatagcatatctttggaaaggcaactcatttttatgattagtgatactggggtggatttaataggagagagaatccaggcagataagaataaaaaggaaaatgatcatctccttctatagcatttgcagattcaagggggagaggtagatgctgagatcaaaatgacagttgttacttatttttccaggtgctgttagtataaacattgtttcctcttcacccctgctaactacctctttaaagtatttctaccaaactgtgaacccaatctcagggaaaagaaattaaaaagtaatataaattctgcatatattaaaaacaatattgtaatatgttataatttcaggaccagaattttctggtctttacctacaagggttttcattatcaaaaaaaagaacatttgtttttctactttatgacttcaaagtaaataactgcccttttcagaatctccttccacaaaacaagccaactcttccccattccctccatcttcctttccaagtcataatggaaattgtaaggagttttaaaaatagggtttggcttttgcaaatagaagatattgattaaagcaaagtcaaatatagagtaaaataagtttaatttgttttcttaagacagggtcttgctctgttgcacaagctggagggcagtagtgcaatcacagctcactgaatccctgttctcccgggcctcaagcaatcttcccaccttagcctcccaagtagctgggactggctttttttttttttttttggccggggagggggtctcattggttgctcagcctggtctcaaactcctgggcttaagcagtcctcccaccttgacttccacagtgccgagattacaggcatgagccaccacacctggccaagtttaatttgttcatggctgagaacagttagctcggaatacttacattgttttttgaataaggaattccttattctgagtgagtcacgaatgagagctgatagatgctttcttgaaaagggcaatacagtcatcccttggtatccatgggggattggttccaggaacccaacttgatatcagaatccatgggtgctcaagtcccattatagagaatgggttatatggtatttgcatataacctacatacatcctcctgtgtactttaaatcatctgaagatgattacttatacctaataaaatacctacacatcacttcatttgcatggattcaacatagtgcttggtgttcagtaaattcaagttttgcttttttggaactttgtggaatttttctttttctgaatatttttgattggcagttggttgaagccatggatgcagaacccatggatatggagggctgactgtacttacttacatatctatctatctttgagtaacaaactctttgggggaaaagagggaagtgtattgagcaagagaaggcaaaaaacattacataatattttgattctgttacgtgtgtctatagattgtttcattctaatcaagacctaagaaggtatgattctgtgactgatttagaattctggggtggaaatatcctggaaccatgttttttaataaattctgtctcttggaaagagttaacaacagcctgggaaagagttgttattccaaaagtcagcctgttacttggtgaagctgaagtttaagagttctggggaaaaataaaatctagtaattccag

SEQ ID NO: 452104 - DNA, 4417 bp, Homo sapiens
agccattttggtcaacaccctgcttactgcgcacggccaatcctatgagaactcagcatcccagctcatctgagcagatcctggaagtgatttctgcagctcaggattttttttttaagctacattgaaaatataggtttattttttgttcaggtttttcttttatattttttttctgcacaaaggaggaggatttttcacttactcatatcgaggccagatttttaaagccagctaaggcagcatcagctgtgcgggatttaaagcctatagctcagctgaaaaaaaaggtggggggcagggaagggaagataaaaggagaggaagctgggagaagacaagcatcatcttattttgctatgtggtaggaactgtctataagatagtgtagaattgtttatcttgagcagtttgttcttaacctataaggtatttttccttttttttttttttaaacctcccccacccttttcctgaaagctttgtttcagagctttgtattgggtttttttggtgaggaggttgtatttatttttttggtgtgtgtgtgtgagtgtgtgtgtgtctgtgtgtgtgttgtggtcccagctgagtcatcatgtctgctctgacgcctccgaccgatatgccaacccccaccactgacaagatcacacaggctgccatggagaccatctacctttgcaaattccgagtgtccatggatggagaatggctctgcctgcgagagctggatgacatctcacttacacctgacccagagcctacccatgaagatcctaattatctcatggctaatgaacgcatgaacctcatgaacatggccaagctgagtatcaagggcttgattgaatcagctctgaacctggggaggactcttgactctgactatgcacctctccagcaattctttgtggtgatggagcactgtctgaaacatggcttgaaagctaaaaaaacttttctcggacaaaataaatccttctgggggcctctagaactggtagaaaagcttgttccagaagccgcagagataacagcaagtgttaaagatcttccaggacttaagacaccagtaggtagaggaagagcctggcttcgtttggcattaatgcaaaagaaactttcagaatatatgaaagctttgatcaataagaaagaacttctcagtgaattctacgaacccaatgccctcatgatggaagaagaaggagccataattgctggtctgttggtgggtctgaatgtcattgatgccaatttctgtatgaaaggagaagacttggactctcaggttggagttatagatttttcaatgtatctcaaggacgggaacagcagtaaaggtactgaaggagacggtcagattactgcaattctggaccagaagaactatgtagaagaactgaacagacatttgaatgctactgtaaacaaccttcaggcaaaagtagatgcattagaaaaatccaacactaaactgacagaggagcttgcagttgcaaacaacaggatcattaccttacaagaagaaatggaacgagttaaagaggaaagttcctacatactggaatccaatcggaagggtcccaagcaagacagaactgcagaagggcaagcactaagtgaagcaagaaagcatttaaaagaagagacacaattacgattggatgttgagaaagaactggagatgcagatcagcatgaggcaggagatggaattggctatgaagatgctggagaaggatgtctgtgagaagcaggatgccctggtatctcttcggcagcagctggatgacctcagagctctcaagcatgaacttgcctttaagctgcagagttcagacttaggagtaaaacagaaaagtgaactaaacagtcgcttggaagagaagactaatcagatggctgctaccattaaacaacttgaacaaagattgcgccaggctgagcgaagccgccaatctgctgagttggacaaccggctcttcaaacaggactttggagacaagatcaacagtctgcagctggaagtcgaggagctcaccaggcagcggaaccagcttgagttagaactaaaacaggaaaaagaaagaagattacaaaacgacaggagcatcccaggaaggggttcccagaagtcagaatccaagatggatgggaagcacaaaatgcaagaggaaaatgttaaactaaaaaagcccctggaagaaagccacaggctgcaaccccaccctatggatgaacaggatcagctgctgctctctgaaaagccacagttgtgtcagctatgccaggaagacggcagcctaacaaagaatgtgtgtaagaactgcagcggaaccttctgtgatgcctgttcaacaaatgaactgcctcttccttcaagtatcaagcttgagcgagtttgcaatccctgtcacaagcatctgatgaagcaatattctaccagcccatcataagactggaggccaagacctggaccaaaacgtttatgcaggctcctctgtacctgtgttttagctgtcaggatctcatagagcccagttcttagagtcaactaaagagttgataggaatttactaggtccagggagaaaaggcagtggttggggttactggaaattttgctcattttctctaatgactgtatgaataaaagtgaacttacttgagcctttctcttctaaatctaaacaacctgatattgaaggtttgctttatagcatatctttggaaaggcaactcatttttatgattagtgatactggggtggatttaataggagagagaatccaggcagataagaataaaaaggaaaatgatcatctccttctatagcatttgcagattcaagggggagaggtagatgctgagatcaaaatgacagttgttacttatttttccaggtgctgttagtataaacattgtttcctcttcacccctgctaactacctctttaaagtatttctaccaaactgtgaacccaatctcagggaaaagaaattaaaaagtaatataaattctgcatatattaaaaacaatattgtaatatgttataatttcaggaccagaattttctggtctttacctacaagggttttcattatcaaaaaaaagaacatttgtttttctactttatgacttcaaagtaaataactgcccttttcagaatctccttccacaaaacaagccaactcttccccattccctccatcttcctttccaagtcataatggaaattgtaaggagttttaaaaatagggtttggcttttgcaaatagaagatattgattaaagcaaagtcaaatatagagtaaaataagtttaatttgttttcttaagacagggtcttgctctgttgcacaagctggagggcagtagtgcaatcacagctcactgaatccctgttctcccgggcctcaagcaatcttcccaccttagcctcccaagtagctgggactggctttttttttttttttttggccggggagggggtctcattggttgctcagcctggtctcaaactcctgggcttaagcagtcctcccaccttgacttccacagtgccgagattacaggcatgagccaccacacctggccaagtttaatttgttcatggctgagaacagttagctcggaatacttacattgttttttgaataaggaattccttattctgagtgagtcacgaatgagagctgatagatgctttcttgaaaagggcaatacagtcatcccttggtatccatgggggattggttccaggaacccaacttgatatcagaatccatgggtgctcaagtcccattatagagaatgggttatatggtatttgcatataacctacatacatcctcctgtgtactttaaatcatctgaagatgattacttatacctaataaaatacctacacatcacttcatttgcatggattcaacatagtgcttggtgttcagtaaattcaagttttgcttttttggaactttgtggaatttttctttttctgaatatttttgattggcagttggttgaagccatggatgcagaacccatggatatggagggctgactgtacttacttacatatctatctatctttgagtaacaaactctttgggggaaaagagggaagtgtattgagcaagagaaggcaaaaaacattacataatattttgattctgttacgtgtgtctatagattgtttcattctaatcaagacctaagaaggtatgattctgtgactgatttagaattctggggtggaaatatcctggaaccatgttttttaataaattctgtctcttggaaagagttaacaacagcctgggaaagagttgttattccaaaagtcagcctgttacttggtgaagctgaagtttaagagttctggggaaaaataaaatctagtaattccag

SEQ ID NO: 452105 - DNA, 4780 bp, Homo sapiens
agccattttggtcaacaccctgcttactgcgcacggccaatcctatgagaactcagcatcccagctcatctgagcagatcctggaagtgatttctgcagctcaggattttttttttaagctacattgaaaatataggtttattttttgttcaggtttttcttttatattttttttctgcacaaaggaggaggatttttcacttactcatatcgaggccagatttttaaagccagctaaggcagcatcagctgtgcgggatttaaagcctatagctcagctgaaaaaaaaggtggggggcagggaagggaagataaaaggagaggaagctgggagaagacaagcatcatcttattttgctatgtggtaggaactgtctataagatagtgtagaattgtttatcttgagcagtttgttcttaacctataaggtatttttccttttttttttttttaaacctcccccacccttttcctgaaagctttgtttcagagctttgtattgggtttttttggtgaggaggttgtatttatttttttggtgtgtgtgtgtgagtgtgtgtgtgtctgtgtgtgtgttgtggtcccagctgagtcatcatgtctgctctgacgcctccgaccgatatgccaacccccaccactgacaagatcacacaggctgccatggagaccatctacctttgcaaattccgagtgtccatggatggagaatggctctgcctgcgagagctggatgacatctcacttacacctgacccagagcctacccatgaagatcctaattatctcatggctaatgaacgcatgaacctcatgaacatggccaagctgagtatcaagggcttgattgaatcagctctgaacctggggaggactcttgactctgactatgcacctctccagcaattctttgtggtgatggagcactgtctgaaacatggcttgaaagctaaaaaaacttttctcggacaaaataaatccttctgggggcctctagaactggtagaaaagcttgttccagaagccgcagagataacagcaagtgttaaagatcttccaggacttaagacaccagtaggtagaggaagagcctggcttcgtttggcattaatgcaaaagaaactttcagaatatatgaaagctttgatcaataagaaagaacttctcagtgaattctacgaacccaatgccctcatgatggaagaagaaggagccataattgctggtctgttggtgggtctgaatgtcattgatgccaatttctgtatgaaaggagaagacttggactctcaggttggagttatagatttttcaatgtatctcaaggacgggaacagcagtaaaggtactgaaggagacggtcagattactgcaattctggaccagaagaactatgtagaagaactgaacagacatttgaatgctactgtaaacaaccttcaggcaaaagtagatgcattagaaaaatccaacactaaactgacagaggagcttgcagttgcaaacaacaggatcattaccttacaagaagaaatggaacgagttaaagaggaaagttcctacatactggaatccaatcggaagggtcccaagcaagacagaactgcagaagggcaagcactaagtgaagcaagaaagcatttaaaagaagagacacaattacgattggatgttgagaaagaactggagatgcagatcagcatgaggcaggagatggaattggctatgaagatgctggagaaggatgtctgtgagaagcaggatgccctggtatctcttcggcagcagctggatgacctcagagctctcaagcatgaacttgcctttaagctgcagagttcagacttaggagtaaaacagaaaagtgaactaaacagtcgcttggaagagaagactaatcagatggctgctaccattaaacaacttgaacaaagtgaaaaggatttggtgaaacaggcaaagaccttaaatagtgcagcaaataaactgatcccaaaacatcattaggcatttttaagttggtcacgtcgcaagtccgatatcacaacttaattgtaaaaggaagaaatctgaaagttactacatttaagctctgattctatataaaatgtcaccaaaaagttgactttgaatttgttggacttttaaaaaaccagttggaaatataggttgggtttttttcttattgttttctccccagggttagaaaaattggtataagttcctaattaaaagctgaataaactttgagaaattatttctgagttgaccaataaataaaaataccactttctttaaaaaagcctagggaattgaagctctgtacatatactaatgatgcctttacaacccagtccttgataataccagattctcggtgcattgttcatgtctgtatctgcaagcctgttctgccattgcagtgtgatgaacctagaggtaactaccatgtgaacttgaactcttctaaaatagttctgtgtctcttagaccatgaccccttttcacttttgttatataggtttaatccccaagccaaggatagtacttagtatttcactacacttctattctcagtaaccaagattgcttgcaactttttttgccttggtgacttttgaaaaaaaaagaaaagaaaaagcagcatccttatatttctttaaaatacatagaaataaagttagtaattaggtaacctatgataacataataatgtggacgcctggggaaaccctcctcatgtttgtcatcttctacctctgccattttcctgcaattccgcttcctacttaggcagttcagagagaacaattctaataaaaacactcctctcctattaacaaaaaatgatgcagtacccatttttcgtatcctgcttttcttatattggagtaaaaaggacagggtatagacatgaatgatgatattctgcctggcctgtcatttcttacctggaaacatttacttaagagtttctgttactttttgttcagatggggatttgctaaaggttctgggaagctaataattgaattattagaaaaacatttcagaatagggaagtaaatgataaacttatattctttattattatttagtacaaaaatagattcccagtagatatccacaagcaatattagcagggcttctgtttctaagtgaccacagactaaccctttctaggctttaacattgtaaataatcctataaacagtttgattttttaagatgatttttgatttgaagagacaggctttacataagccttcattccttcaaaaggtcctgacaaaatacttgggtttttttctctttttttcattctggtatgctttgcagcatttcagctgctttggtggggacacagataaccccttcgcttccagctcttaaaattctttatctttttcttggcaaaaccagaattaagagtgtaagatagattccatgtgtgcttatataggtccctgcacagattggacttgaaccaaaattaagtccaaagaacatatgtttagaccaacttcatggaagtggaagatcctgtgctcttgaacttattttaattcttataatttgcacctatataaacaaagctcctactgtattcttctcttcatcaaccttttgtggtgatgggttgccttttctacgagcatttggaaggagtgatcaaataccgaaattgaactttctaaaacctacacatagcatgcgtttaaattctattatataaagccccaagtgctttaccttctaaaacatgcttctctataggtgcaaagttataagatatgtagaagaaaacatccatcagaatcttctggagaatatggtcagagtcttaaacaggcccagtgctgagttctttgtccacttagtcacacatcttttgtgggaatgggaaaggaaggagacagccaaactctgacaaaggcttttccttatagaataacccaaagcctaggtgagggttgatatataatgtcccatgatttaatatatgtggtttgggggaaaggacaagaaaaaactataattccacatataagaaggtagttgcccatttacaagttccagttatgtgtgtaaaacagaaaaattaagtaccaaacctattaggaaatttttttaaaaagtggatttaacttaaattactgtgtacttgaggttggctttggatatggattttctaaaaagtgatgttttattgtttatcatctaatggctgtaaactgtagtactagaataaaaaaaatggaaaatcagcttttcctctgcctggttcaccttcatcttacttttctttagaatttgtttcttctccatcttttcccccccataatttcttcacctgtgtcctgcaaagtttttttcctctctctgtctctctgtgcattcttccttgggttattttattttgtgttgtgaacttggtcttcttccccaccatggcttttgttttttatcacaagttcatgtggctcacatccagattgcgccaggctgagcgaagccgccaatctgctgagttggacaaccggctcttcaaacaggactttggagacaagatcaacagtctgcagctggaagtcgaggagctcaccaggcagcggtgaagagggggtagcttgagctgacagggtggtcatgggtaattcttagggtagacagcaagaaaaggggtctcatgacttccagccaggttggctctgtctttgcaagtcgctatcacgaaatacaccttcatatattgcgtgcggggggatgattcgttgt

SEQ ID NO: 452106 - DNA, 1690 bp, Homo sapiens
agcggagtaaatagtggtgatgtcatgcaggcaagatggcggaaggggaggacgtgggatggtggcggagctggctgcagcagagctaccaagcagtcaaagagaagtcctctgaagccttggagtttatgaagcgggacctgacggagtttacccaggtggtgcagcatgacacggcctgtaccatcgcagccacggccagcgtggtcaaggagaagctggctacggaaggctcctcaggagcaacagagaagatgaagaaagggttatctgacttcctaggggtgatctcagacacctttgccccttcgccagacaaaaccatcgactgcgatgtcatcaccctgatgggcacaccgtctggcacagctgagccctatgatggcaccaaggctcgcctctatagcctgcagtcggacccagcaacctactgtaatgaaccagatgggcccccggaattgtttgacgcatctcctctgccaaccagagctctgggcacagattctggtggctccctgctggccctcttgggcctctgctcacacctgggaaggggctctctaaatcccggccagaaactctgacttgtgccaacaataggatgacccaagggagaggaaacctatcctcctcaccagaagagcctgtgtttttctgctgaacacccactgttcctgaggactcctgctgggaagtcccaagggatagttctagcccttctgcctgtgtagacagaagctaaaccaccagtctctctcggaggaagctgagacaacatactctgtccatacataagcaggcagggagggccatgccacctacccttggctaaacagggacagtgaacacattttggttcctatcccagtgggtaagaggcacttatctctgggaaatttgcctctcttgggactctccccctcccaggcattttccattcctggaaaggctcctttggggttcagaatccagagaccaaaccctgacccacctccttcctttcctccagcccacgctggtctgtccccatgccttcccagggcttcttcatgtcagatgcacccaagtccttagcccagctgtgccacctgcaggagttcgctcttgcgtttcttcccctccccaagaagggagggggctacttcaggcccttctgtgtgttgcctggcaggataccttgtccaaccagctacccacctcaactcccctgtagtttaggacacaaaacagctaccagcggtacagagcggtgatcaaagccgagtacttacaactctggtaagcctagcttctccgcctcagcccttctgcttctggaagggctatcctgggggtgaacttgaaactctcatcaggagagagtgaggtcacttccacttcaaaccttcagtgagggggtgggatggagagaatgctgaatcttttttttgacgggatggggtttttctctttgtaattatttctttagtttaattaaccttttggttgtttgtgcaatattatatattttaaattataatgcatctccccagagtattttgtagctgggaaaagaaaaaaggaaaaaaagaaaaaaagattctaacagctgttagttttataattaaaaaagaaagaaaaaagaactttgtcctgaaccttttacagacttgccgttaacagcattaaagtgattcacccgaagctgaaa

SEQ ID NO: 452107 - DNA, 757 bp, Homo sapiens
catggccaggaggcccagattcagacccagggctgtctgactccaagcccatgcccttaactagcacactgtgccaatttctatctttttggacaatttaaccttaccctggcttgggaatcccagtgacattgatgttaagggtcttcttcctgtgtaaccttaggaaagtcattcagcttccccaagccttcgttattatgaaatatataaacaaaactcatacctacagtttaaagaagaaataatgaacacccatgaatttacagcgacccagcttgagtaatggagcttcagtttcttatctgtgtaatggaattttagactggagactctgagtttatgtcaaagagcaacctctgtaactgcaggaattaaaggacaaggatagccttggtgtcagtcagcctttttgccacatccaaaataccacttcagggacggctgattatcactaagaaccccccctccagtccccccaccacctgtacacttcacacacacatcctcctgtctttgctaacactcagcaccagccacagccacaaagcttgcccagcaggtaaggcctggcctgctggtgtagtaagggactggtttgccacagtggatgggaaatggaccccaccccacccctaacctattccctgatggaaaccatagagtttccagtctccaacccagtgtctcccttctgactttgatcaatgaggtcatccattggactccagcctgggcgagagtgagactccatctc

SEQ ID NO: 452108 - DNA, 622 bp, Homo sapiens
ggccagtctggtactggaggagttcagagaaagaaggaatctctggacatctgcggtgcttcactgaggagacaagcctcgtataggagagttggctcaagcacggacatcagtgaggactgggagaaagactttgacttggacatgactgaagaggaggtgcagatggcactttccaaagtggatgcctccggggaggtgagtgggcctggtgggtcagagggaagcgagcctaatggtcctgggtgtgagagctctccccagccagcccagctgtcccctcaggagggtccctgctcctgtctgaggtgacaggtggtgggaaaggagctggagcttcctgctcagacccacaacattggtcatcagcaggctgcacttttcctcagttccagggtggatagagggtcaagttcttgaccttagctctgtatcaaaattgcctgagaaactgcttaagaaaacagatgtcatgctgagcgcggtggctcacacctgtaatcccaacactttgggaggccaaggtgggaggattgcttgaggcgaggagttcaagaccagcctggccaatatagtgagaccccatttctgtttttgaaaaaaaaaaaaaaaggaaaaaaga

SEQ ID NO: 452109 - DNA, 2822 bp, Homo sapiens
agatgtgtctgtcttccacagggaggacgtgggatggtggcggagctggctgcagcagagctaccaagcagtcaaagagaagtcctctgaagccttggagtttatgaagcgggacctgacggagtttacccaggtggtgcagcatgacacggcctgtaccatcgcagccacggccagcgtggtcaaggagaagctggctacggaaggctcctcaggagcaacagagaagatgaagaaagggttatctgacttcctaggggtgatctcagacacctttgccccttcgccagacaaaaccatcgactgcgatgtcatcaccctgatgggcacaccgtctggcacagctgagccctatgatggcaccaaggctcgcctctatagcctgcagtcggacccagcaacctactgtaatgaaccagatgggcccccggaattgtttgacgcctggctttcccagttctgcttggaggagaagaagggggagatctcagagctccttgtaggcagcccctccatccgggccctctacaccaagatggttccagcagctgtttcccattcagaattctggcatcggtatttctataaagtccatcagttagagcaggagcaggcccggagggacgccctgaagcagcgggcggaacagagcatctctgaagagcccggctgggaggaggaggaagaggagctcatgggcatttcacccatatctccaaaagaggcaaaggttcctgtggccaaaatttctacattccctgaaggagaacctggcccccagagcccctgtgaagagaatctggtgacttcagttgagcccccagcagaggtgactccatcagagagcagtgagagcatctccctcgtgacacagatcgccaacccggccactgcacctgaggcacgagtgctacccaaggacctgtcccaaaagctgctagaggcatccttggaggaacagggcctggctgtggatgtgggtgagactggaccctcaccccctattcactccaagcccctaacgcctgctggccacaccggcggcccagagcccaggcctccagccagagtagagactctgagggaggaggcgcccacagacttacgggtgtttgagctgaactcggatagtgggaagtctacaccctccaacaatggaaagaaaggctcaagcacggacatcagtgaggactgggagaaagactttgacttggacatgactgaagaggaggtgcagatggcactttccaaagtggatgcctccggggagctggaagatgtagagtgggaggactgggagtgagggagccagagggagcagctcccccacccatggcatctctcgcctccctcgctcgtctcagcccagccctggaagactgagaatgttcccccaaatctcctctgccaaccagagctctgggcacagattctggtggctccctgctggccctcttgggcctctgctcacacctgggaaggggctctctaaatcccggccagaaactctgacttgtgccaacaataggatgacccaagggagaggaaacctatcctcctcaccagaagagcctgtgtttttctgctgaacacccactgttcctgaggactcctgctgggaagtcccaagggatagttctagcccttctgcctgtgtagacagaagctaaaccaccagtctctctcggaggaagctgagacaacatactctgtccatacataagcaggcagggagggccatgccacctacccttggctaaacagggacagtgaacacattttggttcctatcccagtgggtaagaggcacttatctctgggaaatttgcctctcttgggactctccccctcccaggcattttccattcctggaaaggctcctttggggttcagaatccagagaccaaaccctgacccacctccttcctttcctccagcccacgctggtctgtccccatgccttcccagggcttcttcatgtcagatgcacccaagtccttagcccagctgtgccacctgcaggagttcgctcttgcgtttcttcccctccccaagaagggagggggctacttcaggcccttctgtgtgttgcctggcaggataccttgtccaaccagctacccacctcaactcccctgtagtttaggacacaaaacagctaccagcggtacagagcggtgatcaaagccgagtacttacaactctggtaagcctagcttctccgcctcagcccttctgcttctggaagggctatcctgggggtgaacttgaaactctcatcaggcttctgcaaaagctcttcttcctgaagacagacccagcctttgtgctctcaccctccactctggtaaagctgcacctctgggggaatgaggggctgcaggaatctctggagagcctggtgcttcacgatgctgctctggtgattcttgtacctaatctggtgtgctcaccaatgagtgaaagggatcgtgggtcagggacaccgagagagtgaggtcacttccacttcaaaccttcagtgagggggtgggatggagagaatgctgaatcttttttttgacgggatggggtttttctctttgtaattatttctttagtttaattaaccttttggttgtttgtgcaatattatatattttaaattataatgcatctccccagagtattttgtagctgggaaaagaaaaaaggaaaaaaagaaaaaaagattctaacagctgttagttttataattaaaaaagaaagaaaaaagaactttgtcctgaaccttttacagacttgccgttaacagcattaaagtgattcacccgaagctgaaa

SEQ ID NO: 452110 - DNA, 2898 bp, Homo sapiens
agcggagtaaatagtggtgatgtcatgcaggcaagatggcggaaggggaggacgtgggatggtggcggagctggctgcagcagagctaccaagcagtcaaagagaagtcctctgaagccttggagtttatgaagcgggacctgacggagtttacccaggtggtgcagcatgacacggcctgtaccatcgcagccacggccagcgtggtcaaggagaagctggctattgcagcctgttcccggggcgcttgcttcctctgcccgttctctatacagacggaaggctcctcaggagcaacagagaagatgaagaaagggttatctgacttcctaggggtgatctcagacacctttgccccttcgccagacaaaaccatcgactgcgatgtcatcaccctgatgggcacaccgtctggcacagctgagccctatgatggcaccaaggctcgcctctatagcctgcagtcggacccagcaacctactgtaatgaaccagatgggcccccggaattgtttgacgcctggctttcccagttctgcttggaggagaagaagggggagatctcagagctccttgtaggcagcccctccatccgggccctctacaccaagatggttccagcagctgtttcccattcagaattctggcatcggtatttctataaagtccatcagttagagcaggagcaggcccggagggacgccctgaagcagcgggcggaacagagcatctctgaagagcccggctgggaggaggaggaagaggagctcatgggcatttcacccatatctccaaaagaggcaaaggttcctgtggccaaaatttctacattccctgaaggagaacctggcccccagagcccctgtgaagagaatctggtgacttcagttgagcccccagcagaggtgactccatcagagagcagtgagagcatctccctcgtgacacagatcgccaacccggccactgcacctgaggcacgagtgctacccaaggacctgtcccaaaagctgctagaggcatccttggaggaacagggcctggctgtggatgtgggtgagactggaccctcaccccctattcactccaagcccctaacgcctgctggccacaccggcggcccagagcccaggcctccagccagagtagagactctgagggaggaggcgcccacagacttacgggtgtttgagctgaactcggatagtgggaagtctacaccctccaacaatggaaagaaaggctcaagcacggacatcagtgaggactgggagaaagactttgacttggacatgactgaagaggaggtgcagatggcactttccaaagtggatgcctccggggagctggaagatgtagagtgggaggactgggagtgagggagccagagggagcagctcccccacccatggcatctctcgcctccctcgctcgtctcagcccagccctggaagactgagaatgttcccccaaatctcctctgccaaccagagctctgggcacagattctggtggctccctgctggccctcttgggcctctgctcacacctgggaaggggctctctaaatcccggccagaaactctgacttgtgccaacaataggatgacccaagggagaggaaacctatcctcctcaccagaagagcctgtgtttttctgctgaacacccactgttcctgaggactcctgctgggaagtcccaagggatagttctagcccttctgcctgtgtagacagaagctaaaccaccagtctctctcggaggaagctgagacaacatactctgtccatacataagcaggcagggagggccatgccacctacccttggctaaacagggacagtgaacacattttggttcctatcccagtgggtaagaggcacttatctctgggaaatttgcctctcttgggactctccccctcccaggcattttccattcctggaaaggctcctttggggttcagaatccagagaccaaaccctgacccacctccttcctttcctccagcccacgctggtctgtccccatgccttcccagggcttcttcatgtcagatgcacccaagtccttagcccagctgtgccacctgcaggagttcgctcttgcgtttcttcccctccccaagaagggagggggctacttcaggcccttctgtgtgttgcctggcaggataccttgtccaaccagctacccacctcaactcccctgtagtttaggacacaaaacagctaccagcggtacagagcggtgatcaaagccgagtacttacaactctggtaagcctagcttctccgcctcagcccttctgcttctggaagggctatcctgggggtgaacttgaaactctcatcaggcttctgcaaaagctcttcttcctgaagacagacccagcctttgtgctctcaccctccactctggtaaagctgcacctctgggggaatgaggggctgcaggaatctctggagagcctggtgcttcacgatgctgctctggtgattcttgtacctaatctggtgtgctcaccaatgagtgaaagggatcgtgggtcagggacaccgagagagtgaggtcacttccacttcaaaccttcagtgagggggtgggatggagagaatgctgaatcttttttttgacgggatggggtttttctctttgtaattatttctttagtttaattaaccttttggttgtttgtgcaatattatatattttaaattataatgcatctccccagagtattttgtagctgggaaaagaaaaaaggaaaaaaagaaaaaaagattctaacagctgttagttttataattaaaaaagaaagaaaaaagaactttgtcctgaaccttttacagacttgccgttaacagcattaaagtgattcacccgaagctgaaa

SEQ ID NO: 452111 - DNA, 2622 bp, Homo sapiens
agcggagtaaatagtggtgatgtcatgcaggcaagatggcggaaggggaggacgtgggatggtggcggagctggctgcagcagagctaccaagcagtcaaagagaagtcctctgaagccttggagtttatgaagcgggacctgacggagtttacccaggtggtgcagcatgacacggcctgtaccatcgcagccacggccagcgtggtcaaggagaagctggctacggaaggctcctcaggagcaacagagaagatgaagaaagggttatctgacttcctaggggtgatctcagacacctttgccccttcgccagacaaaaccatcgactgcgatgtcatcaccctgatgggcacaccgtctggcacagctgagccctatgatggcaccaaggctcgcctctatagcctgcagtcggacccagcaacctactgtaatgaaccagatgggcccccggaattgtttgacgcctggctttcccagttctgcttggaggagaagaagggggagatctcagagctccttgtaggcagcccctccatccgggccctctacaccaagatggttccagcagctgtttcccattcagaattctggcatcggtatttctataaagtccatcagttagagcaggagcaggcccggagggacgccctgaagcagcgggcggaacagagcatctctgaagagcccggctgggaggaggaggaagaggagctcatgggcatttcacccatatctccaaaagaggcaaaggttcctgtggccaaaatttctacattccctgaaggagaacctggcccccagagcccctgtgaagagaatctggtgacttcagttgagcccccagcagaggtgactccatcagagagcagtgagagcatctccctcgtgacacagatcgccaacccggccactgcacctgaggcacgagtgctacccaaggacctgtcccaaaagctgctagaggcatccttggaggaacagggcctggctgtggatgtgggtgagactggaccctcaccccctattcactccaagcccctaacgcctgctggccacaccggcggcccagagcccaggcctccagccagagtagagactctgagggaggaggcgcccacagacttacgggtgtttgagctgaactcggatagtgggaagtctacaccctccaacaatggaaagaaaggctcaagcacggacatcagtgaggactgggagaaagactttgacttggacatgactgaagaggaggtgcagatggcactttccaaagtggatgcctccggggagctggaagatgtagagtgggaggactgggagtgagggagccagagggagcagctcccccacccatggcatctctcgcctccctcgctcgtctcagcccagccctggaagactgagaatgttcccccaaatctcctctgccaaccagagctctgggcacagattctggtggctccctgctggccctcttgggcctctgctcacacctgggaaggggctctctaaatcccggccagaaactctgacttgtgccaacaataggatgacccaagggagaggaaacctatcctcctcaccagaagagcctgtgtttttctgctgaacacccactgttcctgaggactcctgctgggaagtcccaagggatagttctagcccttctgcctgtgtagacagaagctaaaccaccagtctctctcggaggaagctgagacaacatactctgtccatacataagcaggcagggagggccatgccacctacccttggctaaacagggacagtgaacacattttggttcctatcccagtgggtaagaggcacttatctctgggaaatttgcctctcttgggactctccccctcccaggcattttccattcctggaaaggctcctttggggttcagaatccagagaccaaaccctgtagtttaggacacaaaacagctaccagcggtacagagcggtgatcaaagccgagtacttacaactctggtaagcctagcttctccgcctcagcccttctgcttctggaagggctatcctgggggtgaacttgaaactctcatcaggcttctgcaaaagctcttcttcctgaagacagacccagcctttgtgctctcaccctccactctggtaaagctgcacctctgggggaatgaggggctgcaggaatctctggagagcctggtgcttcacgatgctgctctggtgattcttgtacctaatctggtgtgctcaccaatgagtgaaagggatcgtgggtcagggacaccgagagagtgaggtcacttccacttcaaaccttcagtgagggggtgggatggagagaatgctgaatcttttttttgacgggatggggtttttctctttgtaattatttctttagtttaattaaccttttggttgtttgtgcaatattatatattttaaattataatgcatctccccagagtattttgtagctgggaaaagaaaaaaggaaaaaaagaaaaaaagattctaacagctgttagttttataattaaaaaagaaagaaaaaagaactttgtcctgaaccttttacagacttgccgttaacagcattaaagtgattcacccgaagctgaaa

SEQ ID NO: 452112 - DNA, 2749 bp, Homo sapiens
cgactttgacttggacatgactgaagaggagatgcaggcaagatggcggaaggggaggacgtgggatggtggcggagctggctgcagcagagctaccaagcagtcaaagagaagtcctctgaagccttggagtttatgaagcgggacctgacggagtttacccaggtggtgcagcatgacacggcctgtaccatcgcagccacggccagcgtggtcaaggagaagctggcttgcgatgtcatcaccctgatgggcacaccgtctggcacagctgagccctatgatggcaccaaggctcgcctctatagcctgcagtcggacccagcaacctactgtaatgaaccagatgggcccccggaattgtttgacgcctggctttcccagttctgcttggaggagaagaagggggagatctcagagctccttgtaggcagcccctccatccgggccctctacaccaagatggttccagcagctgtttcccattcagaattctggcatcggtatttctataaagtccatcagttagagcaggagcaggcccggagggacgccctgaagcagcgggcggaacagagcatctctgaagagcccggctgggaggaggaggaagaggagctcatgggcatttcacccatatctccaaaagaggcaaaggttcctgtggccaaaatttctacattccctgaaggagaacctggcccccagagcccctgtgaagagaatctggtgacttcagttgagcccccagcagaggtgactccatcagagagcagtgagagcatctccctcgtgacacagatcgccaacccggccactgcacctgaggcacgagtgctacccaaggacctgtcccaaaagctgctagaggcatccttggaggaacagggcctggctgtggatgtgggtgagactggaccctcaccccctattcactccaagcccctaacgcctgctggccacaccggcggcccagagcccaggcctccagccagagtagagactctgagggaggaggcgcccacagacttacgggtgtttgagctgaactcggatagtgggaagtctacaccctccaacaatggaaagaaaggctcaagcacggacatcagtgaggactgggagaaagactttgacttggacatgactgaagaggaggtgcagatggcactttccaaagtggatgcctccggggagctggaagatgtagagtgggaggactgggagtgagggagccagagggagcagctcccccacccatggcatctctcgcctccctcgctcgtctcagcccagccctggaagactgagaatgttcccccaaatctcctctgccaaccagagctctgggcacagattctggtggctccctgctggccctcttgggcctctgctcacacctgggaaggggctctctaaatcccggccagaaactctgacttgtgccaacaataggatgacccaagggagaggaaacctatcctcctcaccagaagagcctgtgtttttctgctgaacacccactgttcctgaggactcctgctgggaagtcccaagggatagttctagcccttctgcctgtgtagacagaagctaaaccaccagtctctctcggaggaagctgagacaacatactctgtccatacataagcaggcagggagggccatgccacctacccttggctaaacagggacagtgaacacattttggttcctatcccagtgggtaagaggcacttatctctgggaaatttgcctctcttgggactctccccctcccaggcattttccattcctggaaaggctcctttggggttcagaatccagagaccaaaccctgacccacctccttcctttcctccagcccacgctggtctgtccccatgccttcccagggcttcttcatgtcagatgcacccaagtccttagcccagctgtgccacctgcaggagttcgctcttgcgtttcttcccctccccaagaagggagggggctacttcaggcccttctgtgtgttgcctggcaggataccttgtccaaccagctacccacctcaactcccctgtagtttaggacacaaaacagctaccagcggtacagagcggtgatcaaagccgagtacttacaactctggtaagcctagcttctccgcctcagcccttctgcttctggaagggctatcctgggggtgaacttgaaactctcatcaggcttctgcaaaagctcttcttcctgaagacagacccagcctttgtgctctcaccctccactctggtaaagctgcacctctgggggaatgaggggctgcaggaatctctggagagcctggtgcttcacgatgctgctctggtgattcttgtacctaatctggtgtgctcaccaatgagtgaaagggatcgtgggtcagggacaccgagagagtgaggtcacttccacttcaaaccttcagtgagggggtgggatggagagaatgctgaatcttttttttgacgggatggggtttttctctttgtaattatttctttagtttaattaaccttttggttgtttgtgcaatattatatattttaaattataatgcatctccccagagtattttgtagctgggaaaagaaaaaaggaaaaaaagaaaaaaagattctaacagctgttagttttataattaaaaaagaaagaaaaaagaactttgtcctgaaccttttacagacttgccgttaacagcattaaagtgattcacccgaagctgaaa

SEQ ID NO: 452113 - DNA, 2626 bp, Homo sapiens
catggccaggaggcccagattcagacccagggctgtctgactccaagcccatgcccttaactagcacactgtgccaatttctatctttttggacaatttaaccttaccctggcttgggaatcccagtgacattgatgttaagggtcttcttcctgtgtaaccttaggaaagtcattcagcttccccaagccttcgttattatgaaatatataaacaaaactcatacctacagtttaaagaagaaataatgaacacccatgaatttacagcgacccagcttgagtaatggagcttcagtttcttatctgtgtaatggaattttagactggagactctgagtttatgtcaaagagcaacctctgtaactgcaggaattaaaggacaaggatagccttggtgtcagtcagcctttttgccacatccaaaataccacttcagggacggctgattatcactaagaaccccccctccagtccccccaccacctgtacacttcacacacacatcctcctgtctttgctaacactcagcaccagccacagccacaaagcttgcccagcaggtaaggcctggcctgctggtgtagtaagggactggtttgccacagtggatgggaaatggaccccaccccacccctaacctattccctgatggaaaccatagagtttccagtctccaacccagtgtctcccttctgactttgatcaatgaggtcatccattgggctcctacctggtttttattgttttttttttgaggcggagtctcacttccagcctgggtgacagcaagactccatctaagaaaacaaaaaaaaaaagtacgattggtgcgccagagtgaacacaaaatgtaaagacttgtgtatttgtgagacccttttgaagcatgctatctccccagctacaccctcttcaggtgccccttccctgcctcctcctgcttttcacactgtggctcgtggttccaggctcaagcacggacatcagtgaggactgggagaaagactttgacttggacatgactgaagaggaggtgcagatggcactttccaaagtggatgcctccggggagctggaagatgtagagtgggaggactgggagtgagggagccagagggagcagctcccccacccatggcatctctcgcctccctcgctcgtctcagcccagccctggaagactgagaatgttcccccaaatctcctctgccaaccagagctctgggcacagattctggtggctccctgctggccctcttgggcctctgctcacacctgggaaggggctctctaaatcccggccagaaactctgacttgtgccaacaataggatgacccaagggagaggaaacctatcctcctcaccagaagagcctgtgtttttctgctgaacacccactgttcctgaggactcctgctgggaagtcccaagggatagttctagcccttctgcctgtgtagacagaagctaaaccaccagtctctctcggaggaagctgagacaacatactctgtccatacataagcaggcagggagggccatgccacctacccttggctaaacagggacagtgaacacattttggttcctatcccagtgggtaagaggcacttatctctgggaaatttgcctctcttgggactctccccctcccaggcattttccattcctggaaaggctcctttggggttcagaatccagagaccaaaccctgacccacctccttcctttcctccagcccacgctggtctgtccccatgccttcccagggcttcttcatgtcagatgcacccaagtccttagcccagctgtgccacctgcaggagttcgctcttgcgtttcttcccctccccaagaagggagggggctacttcaggcccttctgtgtgttgcctggcaggataccttgtccaaccagctacccacctcaactcccctgtagtttaggacacaaaacagctaccagcggtacagagcggtgatcaaagccgagtacttacaactctggtaagcctagcttctccgcctcagcccttctgcttctggaagggctatcctgggggtgaacttgaaactctcatcaggcttctgcaaaagctcttcttcctgaagacagacccagcctttgtgctctcaccctccactctggtaaagctgcacctctgggggaatgaggggctgcaggaatctctggagagcctggtgcttcacgatgctgctctggtgattcttgtacctaatctggtgtgctcaccaatgagtgaaagggatcgtgggtcagggacaccgagagagtgaggtcacttccacttcaaaccttcagtgagggggtgggatggagagaatgctgaatcttttttttgacgggatggggtttttctctttgtaattatttctttagtttaattaaccttttggttgtttgtgcaatattatatattttaaattataatgcatctccccagagtattttgtagctgggaaaagaaaaaaggaaaaaaagaaaaaaagattctaacagctgttagttttataattaaaaaagaaagaaaaaagaactttgtcctgaaccttttacagacttgccgttaacagcattaaagtgattcacccgaagctgaaa

SEQ ID NO: 452114 - DNA, 1894 bp, Homo sapiens
agcggagtaaatagtggtgatgtcatgcaggcaagatggcggaaggggaggacgtgggatggtggcggagctggctgcagcagagctaccaagcagtcaaagagaagtcctctgaagccttggagtttatgaagcgggacctgacggagtttacccaggtggtgcagcatgacacggcctgtaccatcgcagccacggccagcgtggtcaaggagaagctggctacggaaggctcctcaggagcaacagagaagatgaagaaagggttatctgacttcctaggggtgatctcagacacctttgccccttcgccagacaaaaccatcgactgcgatgtcatcaccctgatgggcacaccgtctggcacagctgagccctatgatggcaccaaggctcgcctctatagcctgcagtcggacccagcaacctactgtaatgaaccagatgggcccccggaattgtttgacgcatctcctctgccaaccagagctctgggcacagattctggtggctccctgctggccctcttgggcctctgctcacacctgggaaggggctctctaaatcccggccagaaactctgacttgtgccaacaataggatgacccaagggagaggaaacctatcctcctcaccagaagagcctgtgtttttctgctgaacacccactgttcctgaggactcctgctgggaagtcccaagggatagttctagcccttctgcctgtgtagacagaagctaaaccaccagtctctctcggaggaagctgagacaacatactctgtccatacataagcaggcagggagggccatgccacctacccttggctaaacagggacagtgaacacattttggttcctatcccagtgggtaagaggcacttatctctgggaaatttgcctctcttgggactctccccctcccaggcattttccattcctggaaaggctcctttggggttcagaatccagagaccaaaccctgacccacctccttcctttcctccagcccacgctggtctgtccccatgccttcccagggcttcttcatgtcagatgcacccaagtccttagcccagctgtgccacctgcaggagttcgctcttgcgtttcttcccctccccaagaagggagggggctacttcaggcccttctgtgtgttgcctggcaggataccttgtccaaccagctacccacctcaactcccctgtagtttaggacacaaaacagctaccagcggtacagagcggtgatcaaagccgagtacttacaactctggtaagcctagcttctccgcctcagcccttctgcttctggaagggctatcctgggggtgaacttgaaactctcatcaggcttctgcaaaagctcttcttcctgaagacagacccagcctttgtgctctcaccctccactctggtaaagctgcacctctgggggaatgaggggctgcaggaatctctggagagcctggtgcttcacgatgctgctctggtgattcttgtacctaatctggtgtgctcaccaatgagtgaaagggatcgtgggtcagggacaccgagagagtgaggtcacttccacttcaaaccttcagtgagggggtgggatggagagaatgctgaatcttttttttgacgggatggggtttttctctttgtaattatttctttagtttaattaaccttttggttgtttgtgcaatattatatattttaaattataatgcatctccccagagtattttgtagctgggaaaagaaaaaaggaaaaaaagaaaaaaagattctaacagctgttagttttataattaaaaaagaaagaaaaaagaactttgtcctgaaccttttacagacttgccgttaacagcattaaagtgattcacccgaagctgaaa

SEQ ID NO: 452115 - DNA, 2053 bp, Homo sapiens
gtacagatattgtcactcaggtactaagccaagtactcaatggttattttttctgatcctctccctccacctgccttccatcctcaagtaggccccagtatctgttattcccctctttgtgtcatgagttctcatcatttagctcccacttataagtgagaatgtgaggtatttggttttttgttcctgcgttagtttactaaggatgataacctccagctccatctatgttcctgcaaaagacatgatctcgtgcttttttgtagctgcatagtattccatggtgttgtttttttttttctttgagatggagagtcgacggcagctctgcccctcagacacattccttaagactaggggttcactctcagtgggacctcagagtatggcctggggtaggggatgggaggtggctctgctcagcaagtggaggttaggtctgggcctgactcaggagtaactatgtgtttgtgatttccattaccccctcccatttgcagcctggaagatgtagagtgggaggactgggagtgagggagccagagggagcagctcccccacccatggcatctctcgcctccctcgctcgtctcagcccagccctggaagactgagaatgttcccccaaatctcctctgccaaccagagctctgggcacagattctggtggctccctgctggccctcttgggcctctgctcacacctgggaaggggctctctaaatcccggccagaaactctgacttgtgccaacaataggatgacccaagggagaggaaacctatcctcctcaccagaagagcctgtgtttttctgctgaacacccactgttcctgaggactcctgctgggaagtcccaagggatagttctagcccttctgcctgtgtagacagaagctaaaccaccagtctctctcggaggaagctgagacaacatactctgtccatacataagcaggcagggagggccatgccacctacccttggctaaacagggacagtgaacacattttggttcctatcccagtgggtaagaggcacttatctctgggaaatttgcctctcttgggactctccccctcccaggcattttccattcctggaaaggctcctttggggttcagaatccagagaccaaaccctgacccacctccttcctttcctccagcccacgctggtctgtccccatgccttcccagggcttcttcatgtcagatgcacccaagtccttagcccagctgtgccacctgcaggagttcgctcttgcgtttcttcccctccccaagaagggagggggctacttcaggcccttctgtgtgttgcctggcaggataccttgtccaaccagctacccacctcaactcccctgtagtttaggacacaaaacagctaccagcggtacagagcggtgatcaaagccgagtacttacaactctggtaagcctagcttctccgcctcagcccttctgcttctggaagggctatcctgggggtgaacttgaaactctcatcaggcttctgcaaaagctcttcttcctgaagacagacccagcctttgtgctctcaccctccactctggtaaagctgcacctctgggggaatgaggggctgcaggaatctctggagagcctggtgcttcacgatgctgctctggtgattcttgtacctaatctggtgtgctcaccaatgagtgaaagggatcgtgggtcagggacaccgagagagtgaggtcacttccacttcaaaccttcagtgagggggtgggatggagagaatgctgaatcttttttttgacgggatggggtttttctctttgtaattatttctttagtttaattaaccttttggttgtttgtgcaatattatatattttaaattataatgcatctccccagagtattttgtagctgggaaaagaaaaaaggaaaaaaagaaaaaaagattctaacagctgttagttttataattaaaaaagaaagaaaaaagaactttgtcctgaaccttttacagacttgccgttaacagcattaaagtgattcacccgaagctgaaa

SEQ ID NO: 452116 - DNA, 1806 bp, Homo sapiens
agcggagtaaatagtggtgatgtcatgcaggcaagatggcggaaggggaggacgtgggatggtggcggagctggctgcagcagagctaccaagcagtcaaagagaagtcctctgaagccttggagtttatgaagcgggacctgacggagtttacccaggtggtgcagcatgacacggcctgtaccatcgcagccacggccagcgtggtcaaggagaagctggctacggaaggctcctcaggagcaacagagaagctggaagatgtagagtgggaggactgggagtgagggagccagagggagcagctcccccacccatggcatctctcgcctccctcgctcgtctcagcccagccctggaagactgagaatgttcccccaaatctcctctgccaaccagagctctgggcacagattctggtggctccctgctggccctcttgggcctctgctcacacctgggaaggggctctctaaatcccggccagaaactctgacttgtgccaacaataggatgacccaagggagaggaaacctatcctcctcaccagaagagcctgtgtttttctgctgaacacccactgttcctgaggactcctgctgggaagtcccaagggatagttctagcccttctgcctgtgtagacagaagctaaaccaccagtctctctcggaggaagctgagacaacatactctgtccatacataagcaggcagggagggccatgccacctacccttggctaaacagggacagtgaacacattttggttcctatcccagtgggtaagaggcacttatctctgggaaatttgcctctcttgggactctccccctcccaggcattttccattcctggaaaggctcctttggggttcagaatccagagaccaaaccctgacccacctccttcctttcctccagcccacgctggtctgtccccatgccttcccagggcttcttcatgtcagatgcacccaagtccttagcccagctgtgccacctgcaggagttcgctcttgcgtttcttcccctccccaagaagggagggggctacttcaggcccttctgtgtgttgcctggcaggataccttgtccaaccagctacccacctcaactcccctgtagtttaggacacaaaacagctaccagcggtacagagcggtgatcaaagccgagtacttacaactctggtaagcctagcttctccgcctcagcccttctgcttctggaagggctatcctgggggtgaacttgaaactctcatcaggcttctgcaaaagctcttcttcctgaagacagacccagcctttgtgctctcaccctccactctggtaaagctgcacctctgggggaatgaggggctgcaggaatctctggagagcctggtgcttcacgatgctgctctggtgattcttgtacctaatctggtgtgctcaccaatgagtgaaagggatcgtgggtcagggacaccgagagagtgaggtcacttccacttcaaaccttcagtgagggggtgggatggagagaatgctgaatcttttttttgacgggatggggtttttctctttgtaattatttctttagtttaattaaccttttggttgtttgtgcaatattatatattttaaattataatgcatctccccagagtattttgtagctgggaaaagaaaaaaggaaaaaaagaaaaaaagattctaacagctgttagttttataattaaaaaagaaagaaaaaagaactttgtcctgaaccttttacagacttgccgttaacagcattaaagtgattcacccgaagctgaaa

SEQ ID NO: 452117 - DNA, 3222 bp, Homo sapiens
  misc_feature (3012)..(3012): n is a, c, g, or t
agcggagtaaatagtggtgatgtcatgcaggcaagatggcggaaggggaggacgtgggatggtggcggagctggctgcagcagagctaccaagcagtcaaagagaagtcctctgaagccttggagtttatgaagcgggacctgacggagtttacccaggtggtgcagcatgacacggcctgtaccatcgcagccacggccagcgtggtcaaggagaagctggctacggaaggctcctcaggagcaacagagaagatgaagaaagggttatctgacttcctaggggtgatctcagacacctttgccccttcgccagacaaaaccatcgactgcgatgtcatcaccctgatgggcacaccgtctggcacagctgagccctatgatggcaccaaggctcgcctctatagcctgcagtcggacccagcaacctactgtaatgaaccagatgggcccccggaattgtttgacgcctggctttcccagttctgcttggaggagaagaagggggagatctcagagctccttgtaggcagcccctccatccgggccctctacaccaagatggttccagcagctgtttcccattcagaattctggcatcggtatttctataaagtccatcagttagagcaggagcaggcccggagggacgccctgaagcagcgggcggaacagagcatctctgaagagcccggctgggaggaggaggaagaggagctcatgggcatttcacccatatctccaaaagaggcaaaggttcctgtggccaaaatttctacattccctgaaggagaacctggcccccagagcccctgtgaagagaatctggtgacttcagttgagcccccagcagaggtgactccatcagagagcagtgagagcatctccctcgtgacacagatcgccaacccggccactgcacctgaggcacgagtgctacccaaggacctgtcccaaaagctgctagaggcatccttggaggaacagggcctggctgtggatgtgggtgagactggaccctcaccccctattcactccaagcccctaacgcctgctggccacaccggcggcccagagcccaggcctccagccagagtagagactctgagggaggaggcgcccacagacttacgggtgtttgagctgaactcggatagtgggaagtctacaccctccaacaatggaaagaaaggctcaagcacggacatcagtgaggactgggagaaagactttgacttggacatgactgaagaggaggtgcagatggcactttccaaagtggatgcctccggggagctggaagatgtagagtgggaggactgggagtgagggagccagagggagcagctcccccacccatggcatctctcgcctccctcgctcgtctcagcccagccctggaagactgagaatgttcccccaaatctcctctgccaaccagagctctgggcacagattctggtggctccctgctggccctcttgggcctctgctcacacctgggaaggggctctctaaatcccggccagaaactctgacttgtgccaacaataggatgacccaagggagaggaaacctatcctcctcaccagaagagcctgtgtttttctgctgaacacccactgttcctgaggactcctgctgggaagtcccaagggatagttctagcccttctgcctgtgtagacagaagctaaaccaccagtctctctcggaggaagctgagacaacatactctgtccatacataagcaggcagggagggccatgccacctacccttggctaaacagggacagtgaacacattttggttcctatcccagtgggtaagaggcacttatctctgggaaatttgcctctcttgggactctccccctcccaggcattttccattcctggaaaggctcctttggggttcagaatccagagaccaaaccctgacccacctccttcctttcctccagcccacgctggtctgtccccatgccttcccagggcttcttcatgtcagatgcacccaagtccttagcccagctgtgccacctgcaggagttcgctcttgcgtttcttcccctccccaagaagggagggggctacttcaggcccttctgtgtgttgcctggcaggataccttgtccaaccagctacccacctcaactcccctgtagtttaggacacaaaacagctaccagcggtacagagcggtgatcaaagccgagtacttacaactctggtaagcctagcttctccgcctcagcccttctgcttctggaagggctatcctgggggtgaacttgaaactctcatcaggcttctgcaaaagctcttcttcctgaagacagacccagcctttgtgctctcaccctccactctggtaaagctgcacctctgggggaatgaggggctgcaggaatctctggagagcctggtgcttcacgatgctgctctggtgattcttgtacctaatctggtgtgctcaccaatgagtgaaagggatcgtgggtcagggacaccgagagagtgaggtcacttccacttcaaaccttcagtgagggggtgggatggagagaatgctgaatcttttttttgacgggatggggtttttctctttgtaattatttctttagtttaaaaaaaaaaaaaaaaaaaaaaaaaaaaaaaaaaaaaaggggcgcgcgccgcctcttagaggttctcccccctccgagagggggcccccagcccttttggcgcccgttccccccttttttttgtgctacacaaggtgggcccccctatttgtgaggcgccgtttattattagcgctctgggccatggtggccccctcgtttacaacacacctgctgggcgaccgtggggcaccagcggctcgtcagcctgggggcaaccattgtggttcaaacggggcacccccccatatacctaaacccgtccgggggatccgacacacccacacttgtgggcgacccacaactatccccccccactgcggcaaatttttttaaaacgcctcncccatacgggccgcaccatttctataacccaactcttccacccagagcggggttaataaaccgggtggtgggtctacaccccaacacgcaccgcgcaaaattgttcacgtaggctagcgttgagtaaacaagaatatttacggcctacacaccgaggcatattcttgcgtacttgtctcgcacccacttttttttaccacccgcgaggcc

SEQ ID NO: 452118 - DNA, 2290 bp, Homo sapiens
agcggagtaaatagtggtgatgtcatgcaggcaagatggcggaaggggaggacgtgggatggtggcggagctggctgcagcagagctaccaagcagtcaaagagaagtcctctgaagccttggagtttatgaagcgggacctgacggagtttacccaggtggtgcagcatgacacggcctgtaccatcgcagccacggccagcgtggtcaaggagaagctggctacggaaggctcctcaggagcaacagagaagatgaagaaagggttatctgacttcctaggggtgatctcagacacctttgccccttcgccagacaaaaccatcgactgcgatgtcatcaccctgatgggcacaccgtctggcacagctgagccctatgatggcaccaaggctcgcctctatagcctgcagtcggacccagcaacctactgtaatgaaccagatgggcccccggaattgtttgacgcctggctttcccagttctgcttggaggagaagaagggggagatctcagagctccttgtaggcagcccctccatccgggccctctacaccaagatggttccagcagctgtttcccattcagaattctggcatcggtatttctataaagtccatcagttagagcaggagcaggcccggagggacgccctgaagcagcgggcggaacagagcatctctgaagagcccggctgggaggaggaggaagaggagctcatgggcatttcacccatatctccaaaagaggcaaaggttcctgtggccaaaatttctacattccctgaaggagaacctggcccccagagcccctgtgaagagaatctggtgacttcagttgagcccccagcagaggtgactccatcagagagcagtgagagcatctccctcgtgacacagatcgccaacccggccactgcacctgaggcacgagtgctacccaaggacctgtcccaaaagctgctagaggcatccttggaggaacagggcctggctgtggatgtgggtgagactggaccctcaccccctattcactccaagcccctaacgcctgctggccacaccggcggcccagagcccaggcctccagccagagtagagactctgagggaggaggcgcccacagacttacgggtgtttgagctgaactcggatagtgggaagtctacaccctccaacaatggaaagaaaggctcaagcacggacatcagtgaggactgggagaaagactttgacttggacatgactgaagaggaggtgcagatggcactttccaaagtggatgcctccggggagctggaagatgtagagtgggaggactgggagtgagggagccagagggagcagctcccccacccatggcatctctcgcctccctcgctcgtctcagcccagccctggaagactgagaatgttcccccaaatctcctctgccaaccagagctctgggcacagattctggtggctccctgctggccctcttgggcctctgctcacacctgggaaggggctctctaaatcccggccagaaactctgacttgtgccaacaataggatgacccaagggagaggaaacctatcctcctcaccagaagagcctgtgtttttctgctgaacacccactgttcctgaggactcctgctgggaagtcccaagggatagttctagcccttctgcctgtgtagacagaagctaaaccaccagtctctctcggaggaagctgagacaacatactctgtccatacataagcaggcagggagggccatgccacctacccttggctaaacagggacagtgaacacattttggttcctatcccagtgggtaagaggcacttatctctgggaaatttgcctctcttgggactctccccctcccaggcattttccattcctggaaaggctcctttggggttcagaatccagagaccaaaccctgacccacctccttcctttcagagagtgaggtcacttccacttcaaaccttcagtgagggggtgggatggagagaatgctgaatcttttttttgacgggatggggtttttctctttgtaattatttctttagtttaattaaccttttggttgtttgtgcaatattatatattttaaattataatgcatctccccagagtattttgtagctgggaaaagaaaaaaggaaaaaaagaaaaaaagattctaacagctgttagttttataattaaaaaagaaagaaaaaagaactttgtcctgaaccttttacagacttgccgttaacagcattaaagtgattcacccgaagctgaaa

SEQ ID NO: 452119 - DNA, 1719 bp, Homo sapiens
agcggagtaaatagtggtgatgtcatgcaggcaagatggcggaaggggaggacgtgggatggtggcggagctggctgcagcagagctaccaagcagtcaaagagaagtcctctgaagccttggagtttatgaagcgggacctgacggagtttacccaggtggtgcagcatgacacggcctgtaccatcgcagccacggccagcgtggtcaaggagaagctggctacggaaggctcctcaggagcaacagagaagatgaagaaagggttatctgacttcctaggggtgatctcagacacctttgccccttcgccagacaaaaccatcgactgcgatgtcatcaccctgatgggcacaccgtctggcacagctgagccctatgatggcaccaaggctcgcctctatagcctgcagtcggacccagcaacctactgtaatgaaccagatgggcccccggaattgtttgacgcctggctttcccagttctgcttggaggagaagaagggggagatctcagagctccttgtaggcagcccctccatccgggccctctacaccaagatggttccagcagctgtttcccattcagaattctggcatcggtatttctataaagtccatcagttagagcaggagcaggcccggagggacgccctgaagcagcgggcggaacagagcatctctgaagagcccggctgggaggaggaggaagaggagctcatgggcatttcacccatatctccaaaagaggcaaaggttcctgtggccaaaatttctacattccctgaaggagaacctggcccccagagcccctgtgaagagaatctggtgacttcagttgagcccccagcagaggtgactccatcagagagcagtgagagcatctccctcgtgacacagatcgccaacccggccactgcacctgaggcacgagtgctacccaaggacctgtcccaaaagctgctagaggcatccttggaggaacagggcctggctgtggatgtgggtgagactggaccctcaccccctattcactccaagcccctaacgcctgctggccacaccggcggcccagagcccaggcctccagccagagtagagactctgagggaggaggcgcccacagacttacgggtgtttgagctgaactcggatagtgggaagtctacaccctccaacaatggaaagaaaggctcaagcacggacatcagtgaggactgggagaaagactttgacttggacatgactgaagaggaggtgcagatggcactttccaaagtggatgcctccggggaggtgagtgggcctggtgggtcagagggaagcgagcctaatggtcctgggtgtgagagctctccccagccagcccagctgtcccctcaggagggtccctgctcctgtctgaggtgacaggtggtgggaaaggagctggagcttcctgctcagacccacaacattggtcatcagcaggctgcacttttcctcagttccagggtggatagagggtcaagttcttgaccttagctctgtatcaaaattgcctgagaaactgcttaagaaaacagatgtcatgctgagcgcggtggctcacacctgtaatcccaacactttgggaggccaaggtgggaggattgcttgaggcgaggagttcaagaccagcctggccaatatagtgagaccccatttctgtttttgaaaaaaaaaaaaaaaggaaaaaaga

SEQ ID NO: 452120 - DNA, 1690 bp, Homo sapiens
agcggagtaaatagtggtgatgtcatgcaggcaagatggcggaaggggaggacgtgggatggtggcggagctggctgcagcagagctaccaagcagtcaaagagaagtcctctgaagccttggagtttatgaagcgggacctgacggagtttacccaggtggtgcagcatgacacggcctgtaccatcgcagccacggccagcgtggtcaaggagaagctggctacggaaggctcctcaggagcaacagagaagatgaagaaagggttatctgacttcctaggggtgatctcagacacctttgccccttcgccagacaaaaccatcgactgcgatgtcatcaccctgatgggcacaccgtctggcacagctgagccctatgatggcaccaaggctcgcctctatagcctgcagtcggacccagcaacctactgtaatgaaccagatgggcccccggaattgtttgacgcctggctttcccagttctgcttggaggagaagaagggggagatctcagagctccttgtaggcagcccctccatccgggccctctacaccaagatggttccagcagctgtttcccattcagaattctggcatcggtatttctataaagtccatcagttagagcaggagcaggcccggagggacgccctgaagcagcgggcggaacagagcatctctgaagagcccggctgggaggaggaggaagaggagctcatgggcatttcacccatatctccaaaagaggcaaaggttcctgtggccaaaatttctacattccctgaaggagaacctggcccccagagcccctgtgaagagaatctggtgacttcagttgagcccccagagcatctccctcgtgacacagatcgccaacccggccactgcacctgaggcacgagtgctacccaaggacctgtcccaaaagctgctagaggcatccttggaggaacagggcctggctgtggatgtgggtgagactggaccctcaccccctattcactccaagcccctaacgcctgctggccacaccggcggcccagagcccaggcctccagccagagtagagactctgagggaggaggcgcccacagacttacgggtgtttgagctgaactcggatagtgggaagtctacaccctccaacaatggaaagaaaggctcaagcacggacatcagtgaggactgggagaaagactttgacttggacatgactgaagaggaggtgcagatggcactttccaaagtggatgcctccggggaggtgagtgggcctggtgggtcagagggaagcgagcctaatggtcctgggtgtgagagctctccccagccagcccagctgtcccctcaggagggtccctgctcctgtctgaggtgacaggtggtgggaaaggagctggagcttcctgctcagacccacaacattggtcatcagcaggctgcacttttcctcagttccagggtggatagagggtcaagttcttgaccttagctctgtatcaaaattgcctgagaaactgcttaagaaaacagatgtcatgctgagcgcggtggctcacacctgtaatcccaacactttgggaggccaaggtgggaggattgcttgaggcgaggagttcaagaccagcctggccaatatagtgagaccccatttctgtttttgaaaaaaaaaaaaaaaggaaaaaaga

SEQ ID NO: 452121 - DNA, 658 bp, Homo sapiens
agcggagtaaatagtggtgatgtcatgcaggcaagatggcggaaggggaggacgtgggatggtggcggagctggctgcagcagagctaccaagcagtcaaagagaagtcctctgaagccttggagtttatgaagcgggacctgacggagtttacccaggtggtgcagcatgacacggcctgtaccatcgcagccacggccagcgtggtcaaggagaagctggctacggaaggctcctcaggagcaacagagaagatgaagaaagggttatctgacttcctaggggtgatctcagacacctttgccccttcgccagacaaaaccatcgactgcgatgtcatcaccctgatgggcacaccgtctggcacagctgagccctatgatggcaccaaggctcgcctctatagcctgcagtcggacccagcaacctactgtaatgaaccagatgggcccccggaattgtttgacgcctggctttcccagttctgcttggaggagaagaagggggagatctcagagctccttgtaggcagcccctccatccgggccctctacaccaagatggttccagcagctgtttcccattcagaattctggcatcggtatttctataaagtccatcagttagagccctctacaacaagatggttccaacagga

SEQ ID NO: 452122 - DNA, 1498 bp, Homo sapiens
catggccaggaggcccagattcagacccagggctgtctgactccaagcccatgcccttaactagcacactgtgccaatttctatctttttggacaatttaaccttaccctggcttgggaatcccagtgacattgatgttaagggtcttcttcctgtgtaaccttaggaaagtcattcagcttccccaagccttcgttattatgaaatatataaacaaaactcatacctacagtttaaagaagaaataatgaacacccatgaatttacagcgacccagcttgagtaatggagcttcagtttcttatctgtgtaatggaattttagactggagactctgagtttatgtcaaagagcaacctctgtaactgcaggaattaaaggacaaggatagccttggtgtcagtcagcctttttgccacatccaaaataccacttcagggacggctgattatcactaagaaccccccctccagtccccccaccacctgtacacttcacacacacatcctcctgtctttgctaacactcagcaccagccacagccacaaagcttgcccagcaggtaaggcctggcctgctggtgtagtaagggactggtttgccacagtggatgggaaatggaccccaccccacccctaacctattccctgatggaaaccatagagtttccagtctccaacccagtgtctcccttctgactttgatcaatgaggtcatccattgggctcctacctggtttttattgttttttttttgaggcggagtctcacttccagcctgggtgacagcaagactccatctaagaaaacaaaaaaaaaaagtacgattggtgcgccagagtgaacacaaaatgtaaagacttgtgtatttgtgagacccttttgaagcatgctatctccccagctacaccctcttcaggtgccccttccctgcctcctcctgcttttcacactgtggctcgtggttccaggctcaagcacggacatcagtgaggactgggagaaagactttgacttggacatgactgaagaggaggtgcagatggcactttccaaagtggatgcctccggggaggtgagtgggcctggtgggtcagagggaagcgagcctaatggtcctgggtgtgagagctctccccagccagcccagctgtcccctcaggagggtccctgctcctgtctgaggtgacaggtggtgggaaaggagctggagcttcctgctcagacccacaacattggtcatcagcaggctgcacttttcctcagttccagggtggatagagggtcaagttcttgaccttagctctgtatcaaaattgcctgagaaactgcttaagaaaacagatgtcatgctgagcgcggtggctcacacctgtaatcccaacactttgggaggccaaggtgggaggattgcttgaggcgaggagttcaagaccagcctggccaatatagtgagaccccatttctgtttttgaaaaaaaaaaaaaaaggaaaaaaga

SEQ ID NO: 452123 - DNA, 816 bp, Homo sapiens
ggccagtctggtactggaggagttcagagaaagaaggaatctctggacatctgcggtgcttcactgaggagacaagcctcgtataggagagttggtgagtttggggcaggtgcaggggagtggtagtctaagctgaggaggcctacaaagactagctagcaaagggcatggggcatgtttaaggcgcggtgacctaaacccactcttctgtattctctcccaggagaaggaggtacaagaagggtgagtgggttgactcagaaatagaacttcagaatttaaaaccttaagctggattcagaaggttggccttggggccataaagcagcagagcatggatgctaaggctgtgggttctggagttcagacagttctgggttcaaatcccaactttgttcataagtcatgtgacttcagaaagattactaatcttctctaagcctttgtttgctcctccataaacgggataattgtttcatgatagatcctcagtcagagcagaattaagtagagccctgctttggggaaatgaaaatagaggtaacattctctgagcactttctctgtgtctagatctgtgctaagcacagatgcatatgcacagtaatatgcatattactcaatccttacaaaagccctgtgagatctgtgtactttttctcatatttctagtggtaggaacctgagatcagtgacccacccagtaaatatttcagtgtgaaatagtcctgtagaagagggaggagtaggtggtgggcctgacaggtgtaatagggttgctgggtggatggtcccagggcccactgaggttgtgat

SEQ ID NO: 452124 - DNA, 505 bp, Homo sapiens
ttcaaaccttcagtgagggggtgggatggagagaatgctgaatcttttttttgacgggatggggtttttctctttgtaattatttctttagtttaattaaccttttggttgtttgtgcaatattatatattttaaattataatgcatctccccagagtattttgtagctgggaaaagaaaaaaggaaaaaaagaaaaaaagattctaacagctgttagttttataattaaaaaagaaagaaaaaagaactttgtcctgaaccttttacagacttgccgttaacagcattaaagtgattcacccgaagctgaaaggtgtctgggggtctgtttttgtccccttggcagctgcactgggccagggcaggactggcttcccacttggagccagagacagggtagggggatagcctaggtccagaggacgtaccttgtcctcatcccagattcagctttgcctttgggatgagaaagggtcagggctcgcaacaggcctctcactggga

SEQ ID NO: 452125 - DNA, 2847 bp, Homo sapiens
agcggagtaaatagtggtgatgtcatgcaggcaagatggcggaaggggaggacgtgggatggtggcggagctggctgcagcagagctaccaagcagtcaaagagaagtcctctgaagccttggagtttatgaagcgggacctgacggagtttacccaggtggtgcagcatgacacggcctgtaccatcgcagccacggccagcgtggtcaaggagaagctggctacggaaggctcctcaggagcaacagagaagatgaagaaagggttatctgacttcctaggggtgatctcagacacctttgccccttcgccagacaaaaccatcgactgcgatgtcatcaccctgatgggcacaccgtctggcacagctgagccctatgatggcaccaaggctcgcctctatagcctgcagtcggacccagcaacctactgtaatgaaccagatgggcccccggaattgtttgacgcctggctttcccagttctgcttggaggagaagaagggggagatctcagagctccttgtaggcagcccctccatccgggccctctacaccaagatggttccagcagctgtttcccattcagaattctggcatcggtatttctataaagtccatcagttagagcaggagcaggcccggagggacgccctgaagcagcgggcggaacagagcatctctgaagagcccggctgggaggaggaggaagaggagctcatgggcatttcacccatatctccaaaagaggcaaaggttcctgtggccaaaatttctacattccctgaaggagaacctggcccccagagcccctgtgaagagaatctggtgacttcagttgagcccccagcagaggtgactccatcagagagcagtgagagcatctccctcgtgacacagatcgccaacccggccactgcacctgaggcacgagtgctacccaaggacctgtcccaaaagctgctagaggcatccttggaggaacagggcctggctgtggatgtgggtgagactggaccctcaccccctattcactccaagcccctaacgcctgctggccacaccggcggcccagagcccaggcctccagccagagtagagactctgagggaggaggcgcccacagacttacgggtgtttgagctgaactcggatagtgggaagtctacaccctccaacaatggaaagaaaggctcaagcacggacatcagtgaggactgggagaaagactttgacttggacatgactgaagaggaggtgcagatggcactttccaaagtggatgcctccggggagctggaagatgtagagtgggaggactgggagtgagggagccagagggagcagctcccccacccatggcatctctcgcctccctcgctcgtctcagcccagccctggaagactgagaatgttcccccaaatctcctctgccaaccagagctctgggcacagattctggtggctccctgctggccctcttgggcctctgctcacacctgggaaggggctctctaaatcccggccagaaactctgacttgtgccaacaataggatgacccaagggagaggaaacctatcctcctcaccagaagagcctgtgtttttctgctgaacacccactgttcctgaggactcctgctgggaagtcccaagggatagttctagcccttctgcctgtgtagacagaagctaaaccaccagtctctctcggaggaagctgagacaacatactctgtccatacataagcaggcagggagggccatgccacctacccttggctaaacagggacagtgaacacattttggttcctatcccagtgggtaagaggcacttatctctgggaaatttgcctctcttgggactctccccctcccaggcattttccattcctggaaaggctcctttggggttcagaatccagagaccaaaccctgacccacctccttcctttcctccagcccacgctggtctgtccccatgccttcccagggcttcttcatgtcagatgcacccaagtccttagcccagctgtgccacctgcaggagttcgctcttgcgtttcttcccctccccaagaagggagggggctacttcaggcccttctgtgtgttgcctggcaggataccttgtccaaccagctacccacctcaactcccctgtagtttaggacacaaaacagctaccagcggtacagagcggtgatcaaagccgagtacttacaactctggtaagcctagcttctccgcctcagcccttctgcttctggaagggctatcctgggggtgaacttgaaactctcatcaggcttctgcaaaagctcttcttcctgaagacagacccagcctttgtgctctcaccctccactctggtaaagctgcacctctgggggaatgaggggctgcaggaatctctggagagcctggtgcttcacgatgctgctctggtgattcttgtacctaatctggtgtgctcaccaatgagtgaaagggatcgtgggtcagggacaccgagagagtgaggtcacttccacttcaaaccttcagtgagggggtgggatggagagaatgctgaatcttttttttgacgggatggggtttttctctttgtaattatttctttagtttaattaaccttttggttgtttgtgcaatattatatattttaaattataatgcatctccccagagtattttgtagctgggaaaagaaaaaaggaaaaaaagaaaaaaagattctaacagctgttagttttataattaaaaaagaaagaaaaaagaactttgtcctgaaccttttacagacttgccgttaacagcattaaagtgattcacccgaagctgaaa

SEQ ID NO: 452126 - DNA, 3238 bp, Homo sapiens
agcggagtaaatagtggtgatgtcatgcaggcaagatggcggaaggggaggacgtgggatggtggcggagctggctgcagcagagctaccaagcagtcaaagagaagtcctctgaagccttggagtttatgaagcgggacctgacggagtttacccaggtggtgcagcatgacacggcctgtaccatcgcagccacggccagcgtggtcaaggagaagctggctacggaaggctcctcaggagcaacagagaagatgaagaaagggttatctgacttcctaggggtgatctcagacacctttgccccttcgccagacaaaaccatcgactgcgatgtcatcaccctgatgggcacaccgtctggcacagctgagccctatgatggcaccaaggctcgcctctatagcctgcagtcggacccagcaacctactgtaatgaaccagatgggcccccggaattgtttgacgcctggctttcccagttctgcttggaggagaagaagggggagatctcagagctccttgtaggcagcccctccatccgggccctctacaccaagatggttccagcagctgtttcccattcagaattctggcatcggtatttctataaagtccatcagttagagcaggagcaggcccggagggacgccctgaagcagcgggcggaacagagcatctctgaagagcccggctgggaggaggaggaagaggagctcatgggcatttcacccatatctccaaaagaggcaaaggttcctgtggccaaaatttctacattccctgaaggagaacctggcccccagagcccctgtgaagagaatctggtgacttcagttgagcccccagcagaggtgactccatcagagagcagtgagagcatctccctcgtgacacagatcgccaacccggccactgcacctgaggcacgagtgctacccaaggacctgtcccaaaagctgctagaggcatccttggaggaacagggcctggctgtggatgtgggtgagactggaccctcaccccctattcactccaagcccctaacgcctgctggccacaccggcggcccagagcccaggcctccagccagagtagagactctgagggaggaggcgcccacagacttacgggtgtttgagctgaactcggatagtgggaagtctacaccctccaacaatggaaagaaaggctcaagcacggacatcagtgaggactgggagaaagactttgacttggacatgactgaagaggaggtgcagatggcactttccaaagtggatgcctccggggagctggaagatgtagagtgggaggactgggagtgagggagccagagggagcagctcccccacccatggcatctctcgcctccctcgctcgtctcagcccagccctggaagactgagaatgttcccccaaatctcctctgccaaccagagctctgggcacagattctggtggctccctgctggccctcttgggcctctgctcacacctgggaaggggctctctaaatcccggccagaaactctgacttgtgccaacaataggatgacccaagggagaggaaacctatcctcctcaccagaagagcctgtgtttttctgctgaacacccactgttcctgaggactcctgctgggaagtcccaagggatagttctagcccttctgcctgtgtagacagaagctaaaccaccagtctctctcggaggaagctgagacaacatactctgtccatacataagcaggcagggagggccatgccacctacccttggctaaacagggacagtgaacacattttggttcctatcccagtgggtaagaggcacttatctctgggaaatttgcctctcttgggactctccccctcccaggcattttccattcctggaaaggctcctttggggttcagaatccagagaccaaaccctgacccacctccttcctttcctccagcccacgctggtctgtccccatgccttcccagggcttcttcatgtcagatgcacccaagtccttagcccagctgtgccacctgcaggagttcgctcttgcgtttcttcccctccccaagaagggagggggctacttcaggcccttctgtgtgttgcctggcaggataccttgtccaaccagctacccacctcaactcccctgtagtttaggacacaaaacagctaccagcggtacagagcggtgatcaaagccgagtacttacaactctggtaagcctagcttctccgcctcagcccttctgcttctggaagggctatcctgggggtgaacttgaaactctcatcaggcttctgcaaaagctcttcttcctgaagacagacccagcctttgtgctctcaccctccactctggtaaagctgcacctctgggggaatgaggggctgcaggaatctctggagagcctggtgcttcacgatgctgctctggtgattcttgtacctaatctggtgtgctcaccaatgagtgaaagggatcgtgggtcagggacaccgagagagtgaggtcacttccacttcaaaccttcagtgagggggtgggatggagagaatgctgaatcttttttttgacgggatggggtttttctctttgtaattatttctttagtttaattaaccttttggttgtttgtgcaatattatatattttaaattataatgcatctccccagagtattttgtagctgggaaaagaaaaaaggaaaaaaagaaaaaaagattctaacagctgttagttttataattaaaaaagaaagaaaaaagaactttgtcctgaaccttttacagacttgccgttaacagcattaaagtgattcacccgaagctgaaaaaagaaaactgcagaaacaacaacaacaaggacaaaaaaacaacaaaccacatacgggagcgtagcacatcactctccgcgggggcccgaaagtcaaaacaccgtcgcaccggaagcgaagaacagacgtgccggaacatgtatgcacaaggaggcacccgccgcggcgagaggaacacaacaggcggccccgcgggcacacaaacaagtcggcgctacgcgaacgacgcagcgaggcagagcaggagaaagaccacatcatgtgaggagcgaaagagaaccaagacacaaaagaggaagcagaaaataaacataaaggcgagcgcggcgacaccgaggtgacggcaacagacacagaagcacaacaacagcggcgcgcgagcacgcagcc

SEQ ID NO: 452127 - DNA, 2854 bp, Homo sapiens
cgactttgacttggacatgactgaagaggagatgcaggcaagatggcggaaggggaggacgtgggatggtggcggagctggctgcagcagagctaccaagcagtcaaagagaagtcctctgaagccttggagtttatgaagcgggacctgacggagtttacccaggtggtgcagcatgacacggcctgtaccatcgcagccacggccagcgtggtcaaggagaagctggctacggaaggctcctcaggagcaacagagaagatgaagaaagggttatctgacttcctaggggtgatctcagacacctttgccccttcgccagacaaaaccatcgactgcgatgtcatcaccctgatgggcacaccgtctggcacagctgagccctatgatggcaccaaggctcgcctctatagcctgcagtcggacccagcaacctactgtaatgaaccagatgggcccccggaattgtttgacgcctggctttcccagttctgcttggaggagaagaagggggagatctcagagctccttgtaggcagcccctccatccgggccctctacaccaagatggttccagcagctgtttcccattcagaattctggcatcggtatttctataaagtccatcagttagagcaggagcaggcccggagggacgccctgaagcagcgggcggaacagagcatctctgaagagcccggctgggaggaggaggaagaggagctcatgggcatttcacccatatctccaaaagaggcaaaggttcctgtggccaaaatttctacattccctgaaggagaacctggcccccagagcccctgtgaagagaatctggtgacttcagttgagcccccagcagaggtgactccatcagagagcagtgagagcatctccctcgtgacacagatcgccaacccggccactgcacctgaggcacgagtgctacccaaggacctgtcccaaaagctgctagaggcatccttggaggaacagggcctggctgtggatgtgggtgagactggaccctcaccccctattcactccaagcccctaacgcctgctggccacaccggcggcccagagcccaggcctccagccagagtagagactctgagggaggaggcgcccacagacttacgggtgtttgagctgaactcggatagtgggaagtctacaccctccaacaatggaaagaaaggctcaagcacggacatcagtgaggactgggagaaagactttgacttggacatgactgaagaggaggtgcagatggcactttccaaagtggatgcctccggggagctggaagatgtagagtgggaggactgggagtgagggagccagagggagcagctcccccacccatggcatctctcgcctccctcgctcgtctcagcccagccctggaagactgagaatgttcccccaaatctcctctgccaaccagagctctgggcacagattctggtggctccctgctggccctcttgggcctctgctcacacctgggaaggggctctctaaatcccggccagaaactctgacttgtgccaacaataggatgacccaagggagaggaaacctatcctcctcaccagaagagcctgtgtttttctgctgaacacccactgttcctgaggactcctgctgggaagtcccaagggatagttctagcccttctgcctgtgtagacagaagctaaaccaccagtctctctcggaggaagctgagacaacatactctgtccatacataagcaggcagggagggccatgccacctacccttggctaaacagggacagtgaacacattttggttcctatcccagtgggtaagaggcacttatctctgggaaatttgcctctcttgggactctccccctcccaggcattttccattcctggaaaggctcctttggggttcagaatccagagaccaaaccctgacccacctccttcctttcctccagcccacgctggtctgtccccatgccttcccagggcttcttcatgtcagatgcacccaagtccttagcccagctgtgccacctgcaggagttcgctcttgcgtttcttcccctccccaagaagggagggggctacttcaggcccttctgtgtgttgcctggcaggataccttgtccaaccagctacccacctcaactcccctgtagtttaggacacaaaacagctaccagcggtacagagcggtgatcaaagccgagtacttacaactctggtaagcctagcttctccgcctcagcccttctgcttctggaagggctatcctgggggtgaacttgaaactctcatcaggcttctgcaaaagctcttcttcctgaagacagacccagcctttgtgctctcaccctccactctggtaaagctgcacctctgggggaatgaggggctgcaggaatctctggagagcctggtgcttcacgatgctgctctggtgattcttgtacctaatctggtgtgctcaccaatgagtgaaagggatcgtgggtcagggacaccgagagagtgaggtcacttccacttcaaaccttcagtgagggggtgggatggagagaatgctgaatcttttttttgacgggatggggtttttctctttgtaattatttctttagtttaattaaccttttggttgtttgtgcaatattatatattttaaattataatgcatctccccagagtattttgtagctgggaaaagaaaaaaggaaaaaaagaaaaaaagattctaacagctgttagttttataattaaaaaagaaagaaaaaagaactttgtcctgaaccttttacagacttgccgttaacagcattaaagtgattcacccgaagctgaaa

SEQ ID NO: 452128 - DNA, 2813 bp, Homo sapiens
  misc_feature (38)..(39): n is a, c, g, or t
  misc_feature (67)..(67): n is a, c, g, or t
tcggattggacggctcgggagggaggagtgggatggtnnggactggtgcagcagactcaagcagcangagaagtcctctgaagccttggagtttatgaagcgggacctgacggagtttacccaggtggtgcagcatgacacggcctgtaccatcgcagccacggccagcgtggtcaaggagaagctggctacggaaggctcctcaggagcaacagagaagatgaagaaagggttatctgacttcctaggggtgatctcagacacctttgccccttcgccagacaaaaccatcgactgcgatgtcatcaccctgatgggcacaccgtctggcacagctgagccctatgatggcaccaaggctcgcctctatagcctgcagtcggacccagcaacctactgtaatgaaccagatgggcccccggaattgtttgacgcctggctttcccagttctgcttggaggagaagaagggggagatctcagagctccttgtaggcagcccctccatccgggccctctacaccaagatggttccagcagctgtttcccattcagaattctggcatcggtatttctataaagtccatcagttagagcaggagcaggcccggagggacgccctgaagcagcgggcggaacagagcatctctgaagagcccggctgggaggaggaggaagaggagctcatgggcatttcacccatatctccaaaagaggcaaaggttcctgtggccaaaatttctacattccctgaaggagaacctggcccccagagcccctgtgaagagaatctggtgacttcagttgagcccccagcagaggtgactccatcagagagcagtgagagcatctccctcgtgacacagatcgccaacccggccactgcacctgaggcacgagtgctacccaaggacctgtcccaaaagctgctagaggcatccttggaggaacagggcctggctgtggatgtgggtgagactggaccctcaccccctattcactccaagcccctaacgcctgctggccacaccggcggcccagagcccaggcctccagccagagtagagactctgagggaggaggcgcccacagacttacgggtgtttgagctgaactcggatagtgggaagtctacaccctccaacaatggaaagaaaggctcaagcacggacatcagtgaggactgggagaaagactttgacttggacatgactgaagaggaggtgcagatggcactttccaaagtggatgcctccggggagctggaagatgtagagtgggaggactgggagtgagggagccagagggagcagctcccccacccatggcatctctcgcctccctcgctcgtctcagcccagccctggaagactgagaatgttcccccaaatctcctctgccaaccagagctctgggcacagattctggtggctccctgctggccctcttgggcctctgctcacacctgggaaggggctctctaaatcccggccagaaactctgacttgtgccaacaataggatgacccaagggagaggaaacctatcctcctcaccagaagagcctgtgtttttctgctgaacacccactgttcctgaggactcctgctgggaagtcccaagggatagttctagcccttctgcctgtgtagacagaagctaaaccaccagtctctctcggaggaagctgagacaacatactctgtccatacataagcaggcagggagggccatgccacctacccttggctaaacagggacagtgaacacattttggttcctatcccagtgggtaagaggcacttatctctgggaaatttgcctctcttgggactctccccctcccaggcattttccattcctggaaaggctcctttggggttcagaatccagagaccaaaccctgacccacctccttcctttcctccagcccacgctggtctgtccccatgccttcccagggcttcttcatgtcagatgcacccaagtccttagcccagctgtgccacctgcaggagttcgctcttgcgtttcttcccctccccaagaagggagggggctacttcaggcccttctgtgtgttgcctggcaggataccttgtccaaccagctacccacctcaactcccctgtagtttaggacacaaaacagctaccagcggtacagagcggtgatcaaagccgagtacttacaactctggtaagcctagcttctccgcctcagcccttctgcttctggaagggctatcctgggggtgaacttgaaactctcatcaggcttctgcaaaagctcttcttcctgaagacagacccagcctttgtgctctcaccctccactctggtaaagctgcacctctgggggaatgaggggctgcaggaatctctggagagcctggtgcttcacgatgctgctctggtgattcttgtacctaatctggtgtgctcaccaatgagtgaaagggatcgtgggtcagggacaccgagagagtgaggtcacttccacttcaaaccttcagtgagggggtgggatggagagaatgctgaatcttttttttgacgggatggggtttttctctttgtaattatttctttagtttaattaaccttttggttgtttgtgcaatattatatattttaaattataatgcatctccccagagtattttgtagctgggaaaagaaaaaaggaaaaaaagaaaaaaagattctaacagctgttagttttataattaaaaaagaaagaaaaaagaactttgtcctgaaccttttacagacttgccgttaacagcattaaagtgattcacccgaagctgaaa

SEQ ID NO: 452129 - DNA, 2489 bp, Homo sapiens
tcatgcacgagggatgggatcgtggcgttatggcatgcagcagagctaccaagcagtcaaagagaagtcctactgtaatgaaccagatgggcccccggaattgtttgacgcctggctttcccagttctgcttggaggagaagaagggggagatctcagagctccttgtaggcagcccctccatccgggccctctacaccaagatggttccagcagctgtttcccattcagaattctggcatcggtatttctataaagtccatcagttagagcaggagcaggcccggagggacgccctgaagcagcgggcggaacagagcatctctgaagagcccggctgggaggaggaggaagaggagctcatgggcatttcacccatatctccaaaagaggcaaaggttcctgtggccaaaatttctacattccctgaaggagaacctggcccccagagcccctgtgaagagaatctggtgacttcagttgagcccccagcagaggtgactccatcagagagcagtgagagcatctccctcgtgacacagatcgccaacccggccactgcacctgaggcacgagtgctacccaaggacctgtcccaaaagctgctagaggcatccttggaggaacagggcctggctgtggatgtgggtgagactggaccctcaccccctattcactccaagcccctaacgcctgctggccacaccggcggcccagagcccaggcctccagccagagtagagactctgagggaggaggcgcccacagacttacgggtgtttgagctgaactcggatagtgggaagtctacaccctccaacaatggaaagaaaggctcaagcacggacatcagtgaggactgggagaaagactttgacttggacatgactgaagaggaggtgcagatggcactttccaaagtggatgcctccggggagctggaagatgtagagtgggaggactgggagtgagggagccagagggagcagctcccccacccatggcatctctcgcctccctcgctcgtctcagcccagccctggaagactgagaatgttcccccaaatctcctctgccaaccagagctctgggcacagattctggtggctccctgctggccctcttgggcctctgctcacacctgggaaggggctctctaaatcccggccagaaactctgacttgtgccaacaataggatgacccaagggagaggaaacctatcctcctcaccagaagagcctgtgtttttctgctgaacacccactgttcctgaggactcctgctgggaagtcccaagggatagttctagcccttctgcctgtgtagacagaagctaaaccaccagtctctctcggaggaagctgagacaacatactctgtccatacataagcaggcagggagggccatgccacctacccttggctaaacagggacagtgaacacattttggttcctatcccagtgggtaagaggcacttatctctgggaaatttgcctctcttgggactctccccctcccaggcattttccattcctggaaaggctcctttggggttcagaatccagagaccaaaccctgacccacctccttcctttcctccagcccacgctggtctgtccccatgccttcccagggcttcttcatgtcagatgcacccaagtccttagcccagctgtgccacctgcaggagttcgctcttgcgtttcttcccctccccaagaagggagggggctacttcaggcccttctgtgtgttgcctggcaggataccttgtccaaccagctacccacctcaactcccctgtagtttaggacacaaaacagctaccagcggtacagagcggtgatcaaagccgagtacttacaactctggtaagcctagcttctccgcctcagcccttctgcttctggaagggctatcctgggggtgaacttgaaactctcatcaggcttctgcaaaagctcttcttcctgaagacagacccagcctttgtgctctcaccctccactctggtaaagctgcacctctgggggaatgaggggctgcaggaatctctggagagcctggtgcttcacgatgctgctctggtgattcttgtacctaatctggtgtgctcaccaatgagtgaaagggatcgtgggtcagggacaccgagagagtgaggtcacttccacttcaaaccttcagtgagggggtgggatggagagaatgctgaatcttttttttgacgggatggggtttttctctttgtaattatttctttagtttaattaaccttttggttgtttgtgcaatattatatattttaaattataatgcatctccccagagtattttgtagctgggaaaagaaaaaaggaaaaaaagaaaaaaagattctaacagctgttagttttataattaaaaaagaaagaaaaaagaactttgtcctgaaccttttacagacttgccgttaacagcattaaagtgattcacccgaagctgaaa

SEQ ID NO: 452130 - DNA, 1767 bp, Homo sapiens
ccggccactgcacctgaggcacgagtgctacccaaggacctgtcccaaaagctgctagaggcatccttggaggaacagggcctggctgtggatgtgggtgagactggaccctcaccccctattcactccaagcccctaacgcctgctggccacaccggcgtttttagttggaggaagaggagctcatgggcatttcacccatatctccaaaagaggcaaaggttcctgtggccaaaatttctacattccctgaaggagaacctggcccccagagcccctgtgaagagaatctggtgacttcagttgagcccccagcagaggtgactccatcagagagcagtgatctcctctgccaaccagagctctgggcacagattctggtggctccctgctggccctcttgggcctctgctcacacctgggaaggggctctctaaatcccggccagaaactctgacttgtgccaacaataggatgacccaagggagaggaaacctatcctcctcaccagaagagcctgtgtttttctgctgaacacccactgttcctgaggactcctgctgggaagtcccaagggatagttctagcccttctgcctgtgtagacagaagctaaaccaccagtctctctcggaggaagctgagacaacatactctgtccatacataagcaggcagggagggccatgccacctacccttggctaaacagggacagtgaacacattttggttcctatcccagtgggtaagaggcacttatctctgggaaatttgcctctcttgggactctccccctcccaggcattttccattcctggaaaggctcctttggggttcagaatccagagaccaaaccctgacccacctccttcctttcctccagcccacgctggtctgtccccatgccttcccagggcttcttcatgtcagatgcacccaagtccttagcccagctgtgccacctgcaggagttcgctcttgcgtttcttcccctccccaagaagggagggggctacttcaggcccttctgtgtgttgcctggcaggataccttgtccaaccagctacccacctcaactcccctgtagtttaggacacaaaacagctaccagcggtacagagcggtgatcaaagccgagtacttacaactctggtaagcctagcttctccgcctcagcccttctgcttctggaagggctatcctgggggtgaacttgaaactctcatcaggcttctgcaaaagctcttcttcctgaagacagacccagcctttgtgctctcaccctccactctggtaaagctgcacctctgggggaatgaggggctgcaggaatctctggagagcctggtgcttcacgatgctgctctggtgattcttgtacctaatctggtgtgctcaccaatgagtgaaagggatcgtgggtcagggacaccgagagagtgaggtcacttccacttcaaaccttcagtgagggggtgggatggagagaatgctgaatcttttttttgacgggatggggtttttctctttgtaattatttctttagtttaattaaccttttggttgtttgtgcaatattatatattttaaattataatgcatctccccagagtattttgtagctgggaaaagaaaaaaggaaaaaaagaaaaaaagattctaacagctgttagttttataattaaaaaagaaagaaaaaagaactttgtcctgaaccttttacagacttgccgttaacagcattaaagtgattcacccgaagctgaaa

SEQ ID NO: 452131 - DNA, 2643 bp, Homo sapiens
agcggagtaaatagtggtgatgtcatgcaggcaagatggcggaaggggaggacgtgggatggtggcggagctggctgcagcagagctaccaagcagtcaaagagaagtcctctgaagccttggagtttatgaagcgggacctgacggagtttacccaggtggtgcagcatgacacggcctgtaccatcgcagccacggccagcgtggtcaaggagaagctggctacggaaggctcctcaggagcaacagagaagatgaagaaagggttatctgacttcctaggggtgatctcagacacctttgccccttcgccagacaaaaccatcgactgcgatgtcatcaccctgatgggcacaccgtctggcacagctgagccctatgatggcaccaaggctcgcctctatagcctgcagtcggacccagcaacctactgtaatgaaccagatgggcccccggaattgtttgacgcctggctttcccagttctgcttggaggagaagaagggggagatctcagagctccttgtaggcagcccctccatccgggccctctacaccaagatggttccagcagctgtttcccattcagaattctggcatcggtatttctataaagtccatcagttagagcaggagcaggcccggagggacgccctgaagcagcgggcggaacagagcatctctgaagagcccggctgggaggaggaggaagaggagctcatgggcatttcacccatatctccaaaagaggcaaaggttcctgtggccaaaatttctacattccctgaaggagaacctggcccccagagcccctgtgaagagaatctggtgacttcagttgagcccccagcagaggtgactccatcagagagcagtgagagcatctccctcgtgacacagatcgccaacccggccactgcacctgaggcacgagtgctacccaaggacctgtcccaaaagctgctagaggcatccttggaggaacagggcctggctgtggatgtgggtgagactggaccctcaccccctattcactccaagcccctaacgcctgctggccacaccggcggcccagagcccaggcctccagccagagtagagactctgagggaggaggcgcccacagacttacgggtgtttgagctgaactcggatagtgggaagtctacaccctccaacaatggaaagaaaggctcaagcacggacatcagtgaggactgggagaaagactttgacttggacatgactgaagaggaggtgcagatggcactttccaaagtggatgcctccggggagctggaagatgtagagtgggaggactgggagtgagggagccagagggagcagctcccccacccatggcatctctcgcctccctcgctcgtctcagcccagccctggaagactgagaatgttcccccaaatctcctctgccaaccagagctctgggcacagattctggtggctccctgctggccctcttgggcctctgctcacacctgggaaggggctctctaaatcccggccagaaactctgacttgtgccaacaataggatgacccaagggagaggaaacctatcctcctcaccagaagagcctgtgtttttctgctgaacacccactgttcctgaggactcctgctgggaagtcccaagggatagttctagcccttctgcctgtgtagacagaagctaaaccaccagtctctctcggaggaagctgagacaacatactctgtccatacataagcaggcagggagggccatgccacctacccttggctaaacagggacagtgaacacattttggttcctatcccagtgggtaagaggcacttatctctgggaaatttgcctctcttgggactctccccctcccaggcattttccattcctggaaaggctcctttggggttcagaatccagagaccaaaccctgacccacctccttcctttcctccagcccacgctggtctgtccccatgccttcccagggcttcttcatgtcagatgcacccaagtccttagcccagctgtgccacctgcaggagttcgctcttgcgtttcttcccctccccaagaagggagggggctacttcaggcccttctgtgtgttgcctggcaggataccttgtccaaccagctacccacctcaactcccctgtagtttaggacacaaaacagctaccagcggtacagagcggtgatcaaagccgagtacttacaactctggtaagcctagcttctccgcctcagcccttctgcttctggaagggctatcctgggggtgaacttgaaactctcatcaggagagagtgaggtcacttccacttcaaaccttcagtgagggggtgggatggagagaatgctgaatcttttttttgacgggatggggtttttctctttgtaattatttctttagtttaattaaccttttggttgtttgtgcaatattatatattttaaattataatgcatctccccagagtattttgtagctgggaaaagaaaaaaggaaaaaaagaaaaaaagattctaacagctgttagttttataattaaaaaagaaagaaaaaagaactttgtcctgaaccttttacagacttgccgttaacagcattaaagtgattcacccgaagctgaaa

SEQ ID NO: 452132 - DNA, 1445 bp, Homo sapiens
agcggagtaaatagtggtgatgtcatgcaggcaagatggcggaaggggaggacgtgggatggtggcggagctggctgcagcagagctaccaagcagtcaaagagaagtcctctgaagccttggagtttatgaagcgggacctgacggagtttacccaggtggtgcagcatgacacggcctgtaccatcgcagccacggccagcgtggtcaaggagaagctggctacggaaggctcctcaggagcaacagagaagatgaagaaagggttatctgacttcctaggggtgatctcagacacctttgccccttcgccagacaaaaccatcgactgcgatgtcatcaccctgatgggcacaccgtctggcacagctgagccctatgatggcaccaaggctcgcctctatagcctgcagtcggacccagcaacctactgtaatgaaccagatgggcccccggaattgtttgacgcctggctttcccagttctgcttggaggagaagaagggggagatctcagagctccttgtaggcagcccctccatccgggccctctacaccaagatggttccagcagctgtttcccattcagaattctggcatcggtatttctataaagtccatcagttagagcaggagcaggcccggagggacgccctgaagcagcgggcggaacagagcatctctgaagagcccggctgggaggaggaggaagaggagctcatgggcatttcacccatatctccaaaagaggcaaaggttcctgtggccaaaatttctacattccctgaaggagaacctggcccccagagcccctgtgaagagaatctggtgacttcagttgagcccccagcagaggtgactccatcagagagcagtgagagcatctccctcgtgacacagatcgccaacccggccactgcacctgaggcacgagtgctacccaaggacctgtcccaaaagctgctagaggcatccttggaggaacagggcctggctgtggatgtgggtgagactggaccctcaccccctattcactccaagcccctaacgcctgctggccacaccggcggcccagagcccaggcctccagccagagtagagactctgagggaggaggcgcccacagacttacgggtgtttgagctgaactcggatagtgggaagtctacaccctccaacaatggaaagaaaggtaggtctggaggtccaagcccagagggttgtgtgcggtcagggccacctcctgaggcagatttgtctccttgtcccttgttaggatactatgagcagattttttttcgtttctgataatgatgacagctgctatatattgactatttgctaacatatttcattctaagttgcacaacatctctgaaataagaatgcatcttcaattgttggcatcttaagagtcaacaaaacaagtttgatgccagatcccat

SEQ ID NO: 452133 - DNA, 673 bp, Homo sapiens
agatgtgtctgtcttccacagggaggacgtgggatggtggcggagctggctgcagcagagctaccaagcagtcaaagagaagtcctctgaagccttggagtttatgaagcgggacctgacggagtttacccaggtggtgcagcatgacacggcctgtaccatcgcagccacggccagcgtggtcaaggagaagctggctacggaaggctcctcaggagcaacagagaagatgaagaaagggttatctgacttcctaggggtgatctcagacacctttgccccttcgccagacaaaaccatcgaccaatgagtgaaagggatcgtgggtcagggacaccgagagagtgaggtcacttccacttcaaaccttcagtgagggggtgggatggagagaatgctgaatcttttttttgacgggatggggtttttctctttgtaattatttctttagtttaattaaccttttggttgtttgtgcaatattatatattttaaattataatgcatctccccagagtattttgtagctgggaaaagaaaaaaggaaaaaaagaaaaaaagattctaacagctgttagttttataattaaaaaagaaagaaaaaagaactttgtcctgaaccttttacagacttgccgttaacagcattaaagtgattcacccgaagctgaaa

SEQ ID NO: 452134 - DNA, 638 bp, Homo sapiens
agatgtgtctgtcttccacagggaggacgtgggatggtggcggagctggctgcagcagagctaccaagcagtcaaagagaagtcctctgaagccttggagtttatgaagcgggacctgacggagtttacccaggtggtgcagcatgacacggcctgtaccatcgcagccacggccagcgtggtcaaggagaagctggctacggaaggctcctcaggagcaacagagaagatgaagaaagggttatctgacttcctaggggtgatctcagacacctttgccccttcgccagacaaaaccatcgacagagagtgaggtcacttccacttcaaaccttcagtgagggggtgggatggagagaatgctgaatcttttttttgacgggatggggtttttctctttgtaattatttctttagtttaattaaccttttggttgtttgtgcaatattatatattttaaattataatgcatctccccagagtattttgtagctgggaaaagaaaaaaggaaaaaaagaaaaaaagattctaacagctgttagttttataattaaaaaagaaagaaaaaagaactttgtcctgaaccttttacagacttgccgttaacagcattaaagtgattcacccgaagctgaaa

SEQ ID NO: 452135 - DNA, 2887 bp, Homo sapiens
  misc_feature (2072)..(2072): n is a, c, g, or t
aagcgcctcgcgggggtctggcccggagtggagggcgcgcggtcccagccctcccgctcggccggcgggtgtcgagttcagccctaggggacctctttctcctggacattgaagatatggccctttggaggtgacccaggagagaagggatgaaggcctttggtcctccacatgagggccccctccaaggactcgtggcctcccgcattgagacttatgggggccggcatcgagcctctgctcagagcactgctggcagactctatccccgaggataccctgtgctggatcccagtcgccgacgcctccagcagtatgtcccctttgccaggggttctggccaggcccgaggcctgtcacccatgagactgcgagatccagagcccgagaagaggcacgggggccatgtgggggctggcctgcttcactcccccaaactcaaggaactcaccaaggcccatgagctggaggtgaggctgcacactttcagcatgtttgggatgccccggctgccccctgaggaccggcggcactgggagataggagagggtggcgacagtggcctgaccatcgagaagtcctggagggagctggtgcctgggcacaaggagatgagccaggagctctgccaccaacaggaggccctgtgggagctcctgaccaccgagctgatctacgtgagaaagctcaagatcatgactgatctgctagccgccggcctgctgaacctgcagcgagtgggactgctgatggaagtgtcagctgagaccctgtttggaaatgtccccagcctgattcgaacccaccggagcttttgggatgaggtgctggggcccaccctggaggagactcgggcctcgggccagcctctggaccccattggtctgcaaagtggcttcctgacgtttggccagcggttccacccctatgtccagtactgcctccgagtgaagcagaccatggcttacgcccgagaacagcaagaaactaaccctctcttccatgccttcgtgcagtggtgtgagaagcacaagcgctctgggaggcagatgctctgtgacttgcttatcaagccccaccagcgcatcaccaagtacccactgctgctccatgctgtgctcaagaggagccccgaggcacgagcccaagaggccctgaatgccatgattgaagccgtggagtcattcctgcgacacatcaatgggcaggtccgccagggcgaagagcaagagagcttggcggctgcagcacaacgcatcgggccctacgaggtgctggagccacccagtgatgaggtggagaagaacctgcgcccattctccaccctggacctgacgtcccccatgctgggggttgcatctgagcacaccagacagctgctgctggaggggcctgtgcgagtgaaggagggacgagaagggaagctggacgtgtacctgttcctcttctctgatgtgctccttgtgaccaagccccagcgcaaggcggacaaagccaaggtcatccgaccccctctcatgctggagaagctcgtgtgccaacccctgcgagaccccaacagcttcctgctgatccacctcactgaattccagtgtgtctccagcgccctccttgtgcactgtcccagtcctacagaccgtgcccagtggctggagaagacccagcaggcccaggccgccctacagaagctgaaggcagaggagtatgttcaacagaagagggagctcctgaccctctatcgggaccaggacagggagtcccccagcaccaggccctccacgccttccctggagggctctcagagcagcgcagaggggaggactcctgagttctcgaccattatcccccacctggtggtgacagaagacacagatgaagatgctccccttgtgccagatgatacctcagactctggctacggcactttgatcccaggcacccccacggggtcccgctccccactgagccgtctacgccaaagagcccttcggcgggaccctcgcctcaccttctccaccctggaactccgggacatccctctgcgtccccaccctcccgacccccaagctccncaacgccgaagcgcccccgaactgccggaaggaatcctaaaaggaggcagtcttccccaggaagacccaccaacctggtctgaggaagaagatggggcctccgagcgagggaatgtggtggtggaaacactccacagggcccggcttcggggccagcttccctcctccccaacccatgctgactctgccggggaaagcccctgggagtcctcaggggaggaggaagaagaggggcctctgttcctgaaagctggccacacatccctgcgcccaatgcgggctgaggacatgctcagagagatccgggaggagctggccagccaaaggattgagggggccgaggagccccgggacagcaggccacggaagctgactcgggcccagctgcagaggatgcgggggccccacatcattcagctggacacccctctgtccgcatcagaggtatgaggaatgcagaggacctttggcatgcatctctcccagaggagatctctccccagtagtgctggtcaccctccggcatctgtgactctacctcaaggaccacatttcccaaaggaagcctggcccaggcaccctgcctcctgctctgtttggggatcaagaactgtaaatttatgtatcataggtgcacctgagccccacagaaagttgtgcataaaaatgactgccctggctgggcatggctgcctgtaatcccagcactttgggaggctgaggtgggaggatcccttgagcccaggagttccagaccagcctgggcaatatagggaaaccctgtctttacaaaaaaaaattttaaaaattaccca

SEQ ID NO: 452136 - DNA, 2968 bp, Homo sapiens
  misc_feature (2153)..(2153): n is a, c, g, or t
ctggcctcccgaaggcgggaggaggggagccgggggctgggctgagaaaggaccctgggtagggagcagtgcgagggagacagcgccctcagagggaggactattgggaggcggcaggagggacagcgaacgtttcctcctctgctcctgaatcggaggaagccctaggggacctctttctcctggacattgaagatatggccctttggaggtgacccaggagagaagggatgaaggcctttggtcctccacatgagggccccctccaaggactcgtggcctcccgcattgagacttatgggggccggcatcgagcctctgctcagagcactgctggcagactctatccccgaggataccctgtgctggatcccagtcgccgacgcctccagcagtatgtcccctttgccaggggttctggccaggcccgaggcctgtcacccatgagactgcgagatccagagcccgagaagaggcacgggggccatgtgggggctggcctgcttcactcccccaaactcaaggaactcaccaaggcccatgagctggaggtgaggctgcacactttcagcatgtttgggatgccccggctgccccctgaggaccggcggcactgggagataggagagggtggcgacagtggcctgaccatcgagaagtcctggagggagctggtgcctgggcacaaggagatgagccaggagctctgccaccaacaggaggccctgtgggagctcctgaccaccgagctgatctacgtgagaaagctcaagatcatgactgatctgctagccgccggcctgctgaacctgcagcgagtgggactgctgatggaagtgtcagctgagaccctgtttggaaatgtccccagcctgattcgaacccaccggagcttttgggatgaggtgctggggcccaccctggaggagactcgggcctcgggccagcctctggaccccattggtctgcaaagtggcttcctgacgtttggccagcggttccacccctatgtccagtactgcctccgagtgaagcagaccatggcttacgcccgagaacagcaagaaactaaccctctcttccatgccttcgtgcagtggtgtgagaagcacaagcgctctgggaggcagatgctctgtgacttgcttatcaagccccaccagcgcatcaccaagtacccactgctgctccatgctgtgctcaagaggagccccgaggcacgagcccaagaggccctgaatgccatgattgaagccgtggagtcattcctgcgacacatcaatgggcaggtccgccagggcgaagagcaagagagcttggcggctgcagcacaacgcatcgggccctacgaggtgctggagccacccagtgatgaggtggagaagaacctgcgcccattctccaccctggacctgacgtcccccatgctgggggttgcatctgagcacaccagacagctgctgctggaggggcctgtgcgagtgaaggagggacgagaagggaagctggacgtgtacctgttcctcttctctgatgtgctccttgtgaccaagccccagcgcaaggcggacaaagccaaggtcatccgaccccctctcatgctggagaagctcgtgtgccaacccctgcgagaccccaacagcttcctgctgatccacctcactgaattccagtgtgtctccagcgccctccttgtgcactgtcccagtcctacagaccgtgcccagtggctggagaagacccagcaggcccaggccgccctacagaagctgaaggcagaggagtatgttcaacagaagagggagctcctgaccctctatcgggaccaggacagggagtcccccagcaccaggccctccacgccttccctggagggctctcagagcagcgcagaggggaggactcctgagttctcgaccattatcccccacctggtggtgacagaagacacagatgaagatgctccccttgtgccagatgatacctcagactctggctacggcactttgatcccaggcacccccacggggtcccgctccccactgagccgtctacgccaaagagcccttcggcgggaccctcgcctcaccttctccaccctggaactccgggacatccctctgcgtccccaccctcccgacccccaagctccncaacgccgaagcgcccccgaactgccggaaggaatcctaaaaggaggcagtcttccccaggaagacccaccaacctggtctgaggaagaagatggggcctccgagcgagggaatgtggtggtggaaacactccacagggcccggcttcggggccagcttccctcctccccaacccatgctgactctgccggggaaagcccctgggagtcctcaggggaggaggaagaagaggggcctctgttcctgaaagctggccacacatccctgcgcccaatgcgggctgaggacatgctcagagagatccgggaggagctggccagccaaaggattgagggggccgaggagccccgggacagcaggccacggaagctgactcgggcccagctgcagaggatgcgggggccccacatcattcagctggacacccctctgtccgcatcagaggtatgaggaatgcagaggacctttggcatgcatctctcccagaggagatctctccccagtagtgctggtcaccctccggcatctgtgactctacctcaaggaccacatttcccaaaggaagcctggcccaggcaccctgcctcctgctctgtttggggatcaagaactgtaaatttatgtatcataggtgcacctgagccccacagaaagttgtgcataaaaatgactgccctggctgggcatggctgcctgtaatcccagcactttgggaggctgaggtgggaggatcccttgagcccaggagttccagaccagcctgggcaatatagggaaaccctgtctttacaaaaaaaaattttaaaaattaccca

SEQ ID NO: 452137 - DNA, 2917 bp, Homo sapiens
  misc_feature (2102)..(2102): n is a, c, g, or t
ggctgggcatcggggctggctggcatcgccggggagccgacggcgacggggagccccgcgggcggggagggcggcgcagggcagcgggtgcggtgacacctgtgggcacagccctaggggacctctttctcctggacattgaagatatggccctttggaggtgacccaggagagaagggatgaaggcctttggtcctccacatgagggccccctccaaggactcgtggcctcccgcattgagacttatgggggccggcatcgagcctctgctcagagcactgctggcagactctatccccgaggataccctgtgctggatcccagtcgccgacgcctccagcagtatgtcccctttgccaggggttctggccaggcccgaggcctgtcacccatgagactgcgagatccagagcccgagaagaggcacgggggccatgtgggggctggcctgcttcactcccccaaactcaaggaactcaccaaggcccatgagctggaggtgaggctgcacactttcagcatgtttgggatgccccggctgccccctgaggaccggcggcactgggagataggagagggtggcgacagtggcctgaccatcgagaagtcctggagggagctggtgcctgggcacaaggagatgagccaggagctctgccaccaacaggaggccctgtgggagctcctgaccaccgagctgatctacgtgagaaagctcaagatcatgactgatctgctagccgccggcctgctgaacctgcagcgagtgggactgctgatggaagtgtcagctgagaccctgtttggaaatgtccccagcctgattcgaacccaccggagcttttgggatgaggtgctggggcccaccctggaggagactcgggcctcgggccagcctctggaccccattggtctgcaaagtggcttcctgacgtttggccagcggttccacccctatgtccagtactgcctccgagtgaagcagaccatggcttacgcccgagaacagcaagaaactaaccctctcttccatgccttcgtgcagtggtgtgagaagcacaagcgctctgggaggcagatgctctgtgacttgcttatcaagccccaccagcgcatcaccaagtacccactgctgctccatgctgtgctcaagaggagccccgaggcacgagcccaagaggccctgaatgccatgattgaagccgtggagtcattcctgcgacacatcaatgggcaggtccgccagggcgaagagcaagagagcttggcggctgcagcacaacgcatcgggccctacgaggtgctggagccacccagtgatgaggtggagaagaacctgcgcccattctccaccctggacctgacgtcccccatgctgggggttgcatctgagcacaccagacagctgctgctggaggggcctgtgcgagtgaaggagggacgagaagggaagctggacgtgtacctgttcctcttctctgatgtgctccttgtgaccaagccccagcgcaaggcggacaaagccaaggtcatccgaccccctctcatgctggagaagctcgtgtgccaacccctgcgagaccccaacagcttcctgctgatccacctcactgaattccagtgtgtctccagcgccctccttgtgcactgtcccagtcctacagaccgtgcccagtggctggagaagacccagcaggcccaggccgccctacagaagctgaaggcagaggagtatgttcaacagaagagggagctcctgaccctctatcgggaccaggacagggagtcccccagcaccaggccctccacgccttccctggagggctctcagagcagcgcagaggggaggactcctgagttctcgaccattatcccccacctggtggtgacagaagacacagatgaagatgctccccttgtgccagatgatacctcagactctggctacggcactttgatcccaggcacccccacggggtcccgctccccactgagccgtctacgccaaagagcccttcggcgggaccctcgcctcaccttctccaccctggaactccgggacatccctctgcgtccccaccctcccgacccccaagctccncaacgccgaagcgcccccgaactgccggaaggaatcctaaaaggaggcagtcttccccaggaagacccaccaacctggtctgaggaagaagatggggcctccgagcgagggaatgtggtggtggaaacactccacagggcccggcttcggggccagcttccctcctccccaacccatgctgactctgccggggaaagcccctgggagtcctcaggggaggaggaagaagaggggcctctgttcctgaaagctggccacacatccctgcgcccaatgcgggctgaggacatgctcagagagatccgggaggagctggccagccaaaggattgagggggccgaggagccccgggacagcaggccacggaagctgactcgggcccagctgcagaggatgcgggggccccacatcattcagctggacacccctctgtccgcatcagaggtatgaggaatgcagaggacctttggcatgcatctctcccagaggagatctctccccagtagtgctggtcaccctccggcatctgtgactctacctcaaggaccacatttcccaaaggaagcctggcccaggcaccctgcctcctgctctgtttggggatcaagaactgtaaatttatgtatcataggtgcacctgagccccacagaaagttgtgcataaaaatgactgccctggctgggcatggctgcctgtaatcccagcactttgggaggctgaggtgggaggatcccttgagcccaggagttccagaccagcctgggcaatatagggaaaccctgtctttacaaaaaaaaattttaaaaattaccca

SEQ ID NO: 452138 - DNA, 471 bp, Homo sapiens
cccctccataggagcaaggcttctgagccaactcttaggtcgccaccccacccccagggtgaaatgggatctgcaatgtcctgacaacggtccagctgaattatcgatggtgggagagtaagtccagagcagcaggccccagtagcactgtggatagagggagctcagagagctctgggtcagtgtcgggacctcaggctccttcgtggaatccagagaaaggggcgtagcctcgagagcattcctgggaggatcctgggagggagggactgtcaggagctgggctaagggcccctgcgaggctctcttcacctgctcctgggtcctgcagctagagcctgtattcatggccttctccccatgcctgctccccacctcccgtatctgtctctccagtttggccagcggttccacccctatgtccagtactgcctccgagtgaagcagaccatggcttacgcccgagaacag

SEQ ID NO: 452139 - DNA, 367 bp, Homo sapiens
ccctaggggacctctttctcctggacattgaagatatggccctttggaggtgacccaggagagaagggatgaaggcctttggtcctccacatgagggccccctccaaggactcgtggcctcccgcattgagacttatgggggccggcatcgagcctctgctcagagcactgctggcagactctatccccgaggataccctgtgctggtgagtccaggctgtgccccaaaagtgacctggtggggcaggagggaagacacctaggctgtggagtctctgtccccttacaggttcagaggttgagctattcctgccccttaccctactcttctttcctgggttgcgggaaagaggagggcagtgacagg

SEQ ID NO: 452140 - DNA, 411 bp, Homo sapiens
cctattccgtcaggcacgtccaccactgtgccaggcgtaggggtgctgcgtgccatcgcgcgacgggttgcctcttgctgacagttccctcttcgtgtgcaagccccgtcgcgtttcctggtccgcgcttttaactcaaggaccacatttcccaaaggaagcctggcccaggcaccctgcctcctgctctgtttggggatcaagaactgtaaatttatgtatcataggtgcacctgagccccacagaaagttgtgcataaaaatgactgccctggctgggcatggctgcctgtaatcccagcactttgggaggctgaggtgggaggatcccttgagcccaggagttccagaccagcctgggcaatatagggaaaccctgtctttacaaaaaaaaattttaaaaattaccca

SEQ ID NO: 452141 - DNA, 1852 bp, Homo sapiens
ctggcctcccgaaggcgggaggaggggagccgggggctgggctgagaaaggaccctgggtagggagcagtgcgagggagacagcgccctcagagggaggactattgggaggcggcaggagggacagcgaacgtttcctcctctgctcctgaatcggaggaagccctaggggacctctttctcctggacattgaagatatggccctttggaggtgacccaggagagaagggatgaaggcctttggtcctccacatgagggccccctccaaggactcgtggcctcccgcattgagacttatgggggccggcatcgagcctctgctcagagcactgctggcagactctatccccgaggataccctgtgctggatcccagtcgccgacgcctccagcagtatgtcccctttgccaggggttctggccaggcccgaggcctgtcacccatgagactgcgagatccagagcccgagaagaggcacgggggccatgtgggggctggcctgcttcactcccccaaactcaaggaactcaccaaggcccatgagctggaggtgaggctgcacactttcagcatgtttgggatgccccggctgccccctgaggaccggcggcactgggagataggagagggtggcgacagtggcctgaccatcgagaagtcctggagggagctggtgcctgggcacaaggagatgagccaggagctctgccaccaacaggaggccctgtgggagctcctgaccaccgagctgatctacgtgagaaagctcaagatcatgactgatctgctagccgccggcctgctgaacctgcagcgagtgggactgctgatggaagtgtcagctgagaccctgtttggaaatgtccccagcctgattcgaacccaccggagcttttgggatgaggtgctggggcccaccctggaggagactcgggcctcgggccagcctctggaccccattggtctgcaaagtggcttcctgacgtttggccagcggttccacccctatgtccagtactgcctccgagtgaagcagaccatggcttacgcccgagaacagcaagaaactaaccctctcttccatgccttcgtgcagtggtgtgagaagcacaagcgctctgggaggcagatgctctgtgacttgcttatcaagccccaccagcgcatcaccaagtacccactgctgctccatgctgtgctcaagaggagccccgaggcacgagcccaagaggccctgaatgccatgattgaagccgtggagtcattcctgcgacacatcaatgggcaggtccgccagggcgaagagcaagagagcttggcggctgcagcacaacgcatcgggccctacgaggtgctggagccacccagtgatgaggtggagaagaacctgcgcccattctccaccctggacctgacgtcccccatgctgggggttgcatctgagcacaccagacagctgctgctggaggggcctgtgcgagtgaaggagggacgagaagggaagctggacgtgtacctgttcctcttctctgatgtgctccttgtgaccaagccccagcgcaaggcggacaaagccaaggtcatccgaccccctctcatgctggagaagctcgtgtgccaacccctgcgagaccccaacagcttcctgctgatccacctcactgaattccagtgtgtctccagcgccctccttgtgcactgtcccagtcctacagaccgtgcccagtggctggagaagacccagcaggcccaggtatgggaaagccagcaacggggaggcatgggcaggggtccccggagctcagaaatgggagcacagtggtggatcacacctgtaatctcagcactttg

SEQ ID NO: 452142 - DNA, 1457 bp, Homo sapiens
cccaagtctctctcgtgcgcagagcccaggctgcgcttccctggtcaggcacggcacgtctggccggccgccaggatgcaggccccgcacaaggagcacctgtacaagttgctggtgattggcgacctgggcgtggggaagaccagtatcatcaagcgctacgtgcaccagaacttctcctcgcactaccgggccacaatcggcgtggacttcgcgctcaaggtgctccactgggacccggagactgtggtgcgcctgcagctctgggatatcgcaggtcaagaaagatttggaaacatgacgagggtctattaccgagaagctatgggtgcatttattgtcttcgatgtcaccaggccagccacatttgaagcagtggcaaagtggaaaaatgatttggactccaagttaagtctccctaatggcaaaccggtttcagtggttttgttggccaacaaatgtgaccaggggaaggatgtgctcatgaacaatggcctcaagatggaccagttctgcaaggagcacggtttcgtaggatggtttgaaacatcagcaaaggaaaatataaacattgatgaagcctccagatgcctggtgaaacacatacttgcaaatgagtgtgacctaatggagtctattgagccggacgtcgtgaagccccatctcacatcaaccaaggttgccagctgctctggctgtgccaaatcctagtaggcacctttgctggtgtctggtaggaatgacctcattgttccacaaattgtgcctctatttttaccattttgggtaaacgtcaggatagagataccacatgtggcaagccaaagatctatgcctctgttttttcaatgagagagaaatagcaaatgttctttctatgctttcctcaccatcatcacagtgtttacaaacttttgaaaatatttagtctgttacaaacttctgtcatgtagctgaccaaaatcctgcagggccacagtcggcactgttatttgcttcttttaatcagcaaaggcctcaagtcttaaaataaaaggggagaagaacaaactagctgtcaagtcaaggactggctttcaccttgccctggtgtctttttccagatttcaatatattctctgatggcctgacaggcctattaagtagatgtgatattttctcccaagatgacctccattctcggcagacctaagagttgcctctgagttagctctttggaatcgtgaacacaggtgtgctatattgtccttgtcctaactgtcacttgccatggcctgaatgttggcttaactgaatattgtatgaaaagacatgcctccatatgtgcctttctgttagctttctctgactcaagctgtggggctcctctatacatgctatacatgtaatatatattatatatatttttgcaagtgaacaataaaacattaaaagatgctgtttccctaaaaaaaaaa

SEQ ID NO: 452143 - DNA, 1153 bp, Homo sapiens
cccaagtctctctcgtgcgcagagcccaggctgcgcttccctggtcaggcacggcacgtctggccggccgccaggatgcaggccccgcacaaggagcacctgtacaagttgctggtgattggcgacctgggcgtggggaagaccagtatcatcaagcgctacgtgcaccagaacttctcctcgcactaccgggccacaatcggcgtggacttcgcgctcaaggtgctccactgggacccggagactgtggtgcgcctgcagctctgggatatcgcaggaaaatataaacattgatgaagcctccagatgcctggtgaaacacatacttgcaaatgagtgtgacctaatggagtctattgagccggacgtcgtgaagccccatctcacatcaaccaaggttgccagctgctctggctgtgccaaatcctagtaggcacctttgctggtgtctggtaggaatgacctcattgttccacaaattgtgcctctatttttaccattttgggtaaacgtcaggatagagataccacatgtggcaagccaaagatctatgcctctgttttttcaatgagagagaaatagcaaatgttctttctatgctttcctcaccatcatcacagtgtttacaaacttttgaaaatatttagtctgttacaaacttctgtcatgtagctgaccaaaatcctgcagggccacagtcggcactgttatttgcttcttttaatcagcaaaggcctcaagtcttaaaataaaaggggagaagaacaaactagctgtcaagtcaaggactggctttcaccttgccctggtgtctttttccagatttcaatatattctctgatggcctgacaggcctattaagtagatgtgatattttctcccaagatgacctccattctcggcagacctaagagttgcctctgagttagctctttggaatcgtgaacacaggtgtgctatattgtccttgtcctaactgtcacttgccatggcctgaatgttggcttaactgaatattgtatgaaaagacatgcctccatatgtgcctttctgttagctttctctgactcaagctgtggggctcctctatacatgctatacatgtaatatatattatatatatttttgcaagtgaacaataaaacattaaaag

SEQ ID NO: 452144 - DNA, 1434 bp, Homo sapiens
cccaagtctctctcgtgcgcagagcccaggctgcgcttccctggtcaggcacggcacgtctggccggccgccaggatgcaggccccgcacaaggagcacctgtacaagttgctggtgattggcgacctgggcgtggggaagaccagtatcatcaagcgctacgtgcaccagaacttctcctcgcactaccgggccacaatcggcgtggacttcgcgctcaaggtgctccactgggacccggagactgtggtgcgcctgcagctctgggatatcgcaggtcaagaaagatttggaaacatgacgagggtctattaccgagaagctatgggtgcatttattgtcttcgatgtcaccaggccagccacatttgaagcagtggcaaagtggaaaaatgatttggactccaagttaagtctccctaatggcaaaccggtttcagtggttttgttggccaacaaatgtgaccaggggaaggatgtgctcatgaacaatggcctcaagatggaccagttctgcaaggagcacggtttcgtaggatggtttgaaacatcagcaaaggaaaatataaacattgatgaagcctccagatgcctggtgaaacacatacttgcaaatgagtgtgacctaatggagtctattgagccggacgtcgtgaagccccatctcacatcaaccaaggttgccagctgctctggctgtgccaaatcctagtaggcacctttgctggtgtctggtaggaatgacctcattgttccacaaattgtgcctctatttttaccattttgggtaaacgtcaggatagagataccacatgtggcaagccaaagatctatgcctctgttttttcaatgagagagaaatagcaaatgttctttctatgctttcctcaccatcatcacagtgtttacaaacttttgaaaatatttagtctgttacaaacttctgtcatgtagctgaccaaaatcctgcagggccacagtcggcactgttatttgcttcttttaatcagcaaaggcctcaagtcttaaaataaaaggggagaagaacaaactagctgtcaagtcaaggactggctttcaccttgccctggtgtctttttccagatttcaatatattctctgatggcctgacaggcctattaagtagatgtgatattttctcccaagatgacctccattctcggcagacctaagagttgcctctgagttagctctttggaatcgtgaacacaggtgtgctatattgtccttgtcctaactgtcacttgccatggcctgaatgttggcttaactgaatattgtatgaaaagacatgcctccatatgtgcctttctgttagctttctctgactcaagctgtggggctcctctatacatgctatacatgtaatatatattatatatatttttgcaagtgaacaataaaacattaaaag

SEQ ID NO: 452145 - DNA, 1249 bp, Homo sapiens
ggaagggtacagtgattaatagcccaaattccagagttgaactgcctccatctggatccttactttactctgcatgtagtaggcaatcttaggtcaagaaagatttggaaacatgacgagggtctattaccgagaagctatgggtgcatttattgtcttcgatgtcaccaggccagccacatttgaagcagtggcaaagtggaaaaatgatttggactccaagttaagtctccctaatggcaaaccggtttcagtggttttgttggccaacaaatgtgaccaggggaaggatgtgctcatgaacaatggcctcaagatggaccagttctgcaaggagcacggtttcgtaggatggtttgaaacatcagcaaaggaaaatataaacattgatgaagcctccagatgcctggtgaaacacatacttgcaaatgagtgtgacctaatggagtctattgagccggacgtcgtgaagccccatctcacatcaaccaaggttgccagctgctctggctgtgccaaatcctagtaggcacctttgctggtgtctggtaggaatgacctcattgttccacaaattgtgcctctatttttaccattttgggtaaacgtcaggatagagataccacatgtggcaagccaaagatctatgcctctgttttttcaatgagagagaaatagcaaatgttctttctatgctttcctcaccatcatcacagtgtttacaaacttttgaaaatatttagtctgttacaaacttctgtcatgtagctgaccaaaatcctgcagggccacagtcggcactgttatttgcttcttttaatcagcaaaggcctcaagtcttaaaataaaaggggagaagaacaaactagctgtcaagtcaaggactggctttcaccttgccctggtgtctttttccagatttcaatatattctctgatggcctgacaggcctattaagtagatgtgatattttctcccaagatgacctccattctcggcagacctaagagttgcctctgagttagctctttggaatcgtgaacacaggtgtgctatattgtccttgtcctaactgtcacttgccatggcctgaatgttggcttaactgaatattgtatgaaaagacatgcctccatatgtgcctttctgttagctttctctgactcaagctgtggggctcctctatacatgctatacatgtaatatatattatatatatttttgcaagtgaacaataaaacattaaaag

SEQ ID NO: 452146 - DNA, 1032 bp, Homo sapiens
agctgacatggtagcgcacgcctgtagtcccagctactcaggaggctaaggtgggaggatcacttgagcctgggaggcagaggttgcagtaagctgagtaagccaagatcatgctattgcactctagcctggatgacagagtgagaccttgtctcaatgaaaaagcagggggcactgggaggggagaaccaaatgccctatcctccagttctcagcatatagaagggagctctctcatctgctagccactcctgcctcactgtgccatgctttctgtaatgcactctgggtccagggactgcttggcaggaggtgggaagaacaagaagtttagggccttcccagtttcttagggcctgtctggagagggaactagcgtttactgagtttttacgatgtgttacacaccatgtaaagccctttacctacattatttcttataccccaaacagagagcaaataagtatccccattttttagtcacatagagttccagagttgccacagttacatcgcaaagtcaggatttgaatccagtgcagaccgcaaacaccatggttttctctccaaagcagagcagctccagaggtggaggtgactggaatgtcctagattcagtgggaccaggagctgggggtgctagcagaggctctcatctccccagggtcttgtcagtcagagtcctaaacccttcaattaactatccctctaatcccagctgaagcctgggtaatacctcccaccaagaggtatctgtgtggaacctggccctatttagggattaggtgatggagataaatttccatggcaaacggccctcgtccccgttcgtttgcagagcacaacaatccagattaaggtacagagtttgggttttatttggagattagttggtattacaggtgatggtgataccaaaacccaatgctgctatacctgcctccatcccagatctgtcaggttgtctccacagccccacatcagagggcatccaatctgatctttgtgaaaattaaatcaacataagcccca

SEQ ID NO: 452147 - DNA, 473 bp, Homo sapiens
aggggtcctcaagattcgagatggcagcaaggaacccaggtcgagatgggacattgtgcggctcatcccacctcagacgtacctgcaagctgagggtgaagacggccagaacttggagaagagacggaatcttctgaactgcctcatcgtccgaatcctcaaggcccatggagatgaggggctgcacattgaccagcttgtctgtctggtgctggaggcttggcagaagggcccgtgtcctcccaggggtttggtcagcagccttggtaaggggtctgcatgcagcagcactgacgtcctctcctgcatcccacccctcaccttccataccctacagattcgctcccggggtgtgccctatgcctcctgcactgccacccagagcttctctaccttccggtagccctagacttggggtcaggggaaggtagagctggagcttttacagaaataaaacccaagagtttgattat

SEQ ID NO: 452148 - DNA, 5718 bp, Homo sapiens
gcggaaatgagccgtggcttttggctggcggagccgctggcagggaccgggccccaccctgccccagtggctgccgactcacgcgggtgcagctctgttccgcggaggcacgccccctcccgtctctccgtctcgaccccctcgcggggcccaggtggggcccaagtcgccgccagcgtctgtgccgcgtcccttgctctgtgaaggacaggcctcgcgccaggaccccggtggacttctgaggtgccaggatggtgggagaactccgctacagggaattcagggtgcccctggggcccggcttacatgcctatcctgatgagctgatccgccagcgcgtgggccatgatgggcatcctgagtaccagatccgttggctcatcctgcggcgtggcgatgagggggacgggggctctggccaagtggactgcaaggctgagcacatcctgctgtggatgtccaaggatgagatctatgccaactgccacaagatgctgggcgaggatggccaggtcatcgggccctcccaggagtctgcaggggaggttggggccctggacaaatctgtgctggaggagatggaaaccgacgtgaagtccctcattcagagagcccttcggcagctggaggagtgtgtgggcactatccctcctgctcctctacttcacactgtccacgtgctcagcgcctatgccagcattgagcccctcactggagtattcaaggacccaagggtcctggacttgctcatgcacatgttgagtagtcctgattatcagattcgctggagtgcaggccggatgatacaagccctgtcctcccatgacgctgggacccggactcagatccttctgtcactgagccaacaagaagccattgagaaacacctggattttgacagccgctgtgctctgctagcactgtttgcacaggccacgctctctgaacaccccatgtctttcgagggcattcagctaccacaggtcccaggaagggtgctcttctccctggtgaagcggtatttgcatgtcacctcgctcctggatcagctgaacgacagtgctgcggagccaggagcccagaacacctctgctcctgaggagttgagtggggagaggggtcaactggagctggagttcagtatggccatgggcaccctgatctcggagctggtgcaagccatgcgctgggaccaggcctcagacagaccaaggagctcagcacggtcccccggttccatcttccagcctcagctggcagatgtgagcccagggctccccgctgcccaggctcagccctccttcaggaggtcaagacgttttcgccctcgttctgagttcgcaagtggcaatacctatgctttgtatgtgcgggacacactgcagccggggatgcgagtgcggatgctggatgattatgaggagatcagtgccggggatgagggcgagtttcggcagagcaacaacggtgtgcctcctgtgcaggtattttgggagtcaacaggccgcacctattgggtgcactggcacatgctggagatcttgggctttgaggaagacattgaggacatggttgaggctgatgagtaccaaggggcagtggccagtagagtcctgggtagagccctgcctgcctggcgctggaggcccatgacagaactctatgctgtgccttatgtgctgcctgaggatgaggacactgaggagtgtgaacacctgaccctggctgagtggtgggaactcctcttcttcatcaagaagctggatggacctgaccatcaggaggttctccagatcctccaggagaacctagatggggaggtagagccagcctggagacactcagaggttggagggctctattgcaagggctggactgtatagagcatttggaaggctcaggatgaaaagtggaggtcagagagtggaaggggctgcagaggaggggtctggaattttcagaggtgggagggtgagctgtttgggaggagccagctgccagctgtgagaggatcaggatggagggtatgtgtgcagagagacccccacccctaccaagtgctccctggggcctctgggtcggcagggctgtctgcagtgagagcttctccttgatggcagattctggatgatgagatcctagctgaactggccgtgcccatagaattggcccaggacttgctgctgactctgccacagcgactcaatgacagtgccctcagggacctgatcaactgccatgtctacaagaagtatgggcctgaagccctagcagggaaccaagcctacccatcccttctagaagcccaagaagatgtcctcctgctagacgcgcaggcccaggctaaggactcagaagatgcagccaaagtggaagcaaaagaacccccatctcagagtcccaacactcccctgcagcgtctggtggagggttatggtccagctgggaaaatcctcctggatctagagcaagccctcagctcagaggggacccaggagaacaaggtcaagccactcctgctgcagctgcagcggcagccgcagcccttcctggcactgatgcagagcctggacactccggagactaacaggaccctgcacctgactgtgctgagaatcctgaagcagctggtggacttccccgaggcactgctgctcccctggcacgaggccgtggatgcctgcatggcctgcctgcggtccccaaacactgatcgagaggtgctccaggaactgattttcttcctgcaccgcctgacctcagtgagcagggactatgccgtggtgctgaatcagctgggagcaagagacgctatctccaaggccctggaaaagcacctgggaaagctggagctggctcaggagctgcgggacatggtgttcaagtgtgagaagcatgcccacctctaccgcaaactcatcaccaacatcctgggaggctgcatccagatggtgctgggccagatcgaagaccacagacgaacccaccggcccatcaacatccctttctttgatgtgttcctcagatacctgtgccagggctccagtgtggaagtgaaggaggacaagtgctgggagaaggtggaggtgtcctccaacccgcaccgggccagcaagctgacggaccacaaccccaagacctattgggagtccaacggcagcgccggctcccactacatcaccctgcacatgcgccggggcatcctcatcaggcaactgactctgcttgtggctagtgaggactcgagttacatgccggcccgagtggtggtgtgcgggggtgatagcactagctctcttcacacggaactcaactcggtgaatgtgatgccctctgccagccgggtgatcctcctggagaacctgacccgcttctggcccatcatccagatccgcataaagcgctgccagcagggtggcattgatacgcgcattcgggggttagagatcctaggccccaagcccacgttctggccagtgttccgggagcagctctgtcgtcacacacgcctcttctacatggttcgggcacaggcctggagccaggacatggcagaggaccgcaggagcctcctgcacctgagttctagactcaacggtgctctgcgccaggagcagaattttgctgaccgcttcctccctgatgacgaggctgcccaagctctgggcaagacctgctgggaggccctggtcagccccgtggtgcagaacatcacctcccctgatgaggatggcattagccccctgggttggctgctggaccagtacctggagtgtcaggaagctgtcttcaacccccagagccgcggcccagctttcttctcgcgggtgcgccgtctcactcacctgctggtgcatgtcgagccctgtgaggcaccccctcctgtggtggccactcctcggcccaaaggcagaaacagaagccacgactggagctccttggctacccggggccttccaagcagcatcatgagaaacctgacgcgctgttggcgggccgtggtggagaagcaggtgaacaattttctgacctcatcctggcgggatgatgactttgtgccacgctactgtgagcactttaatattctgcagaactcaagctctgaactgtttgggcctcgggcagccttcttgctggcgctgcaaaatggctgtgcgggagccttgctgaagctcccttttctcaaagctgcccacgtgagtgagcagttcgcccggcacattgaccagcagatccagggcagccggatcggtggagcccaggaaatggagaggctggcacagctgcagcaatgcctgcaagctgtcctgattttctccggcttggagatagccaccacttttgagcattattaccagcactacatggcggaccgtctcctgggcgtggtctcgagctggctggagggggccgtgctggagcagatcggtccctgcttccccaaccgcctcccccagcagatgttgcagagcctgagcacctctaaggagctgcagcgccagttccacgtctaccagctccagcagctggatcaggaactcctgaagctggaggatacagagaagaaaatacaggtgggccttggggccagtggcaaggagcacaagagcgagaaggaagaggaagctggggcagcagcagtggtggatgtggcggagggagaggaggaagaggaggagaatgaggacctctactatgaaggggcaatgccagaagtgtctgtgcttgtcctgtcccgacactcctggcctgttgcctcaatctgccacacactgaaccccagaacctgcctgccctcctacctgaggggcactttgaacagatactccaacttctacaacaagagtcagagccaccctgcccttgagcgaggctcacagaggcgactgcagtggacgtggctgggctgggctgagctgcagtttgggaaccagaccctgcatgtgtccaccgtgcagatgtggctactgctgtatctcaacgacctgaaggcggtctctgtggagagtctgctggcgttctcagggctctccgcagacatgctcaatcaggcgattgggcccctcacctcttcaagaggccccctggaccttcacgagcaaaaggatataccaggaggggtcctcaagattcgagatggcagcaaggaacccaggtcgagatgggacattgtgcggctcatcccacctcagacgtacctgcaagctgagggtgaagacggccagaacttggagaagagacggaatcttctgaactgcctcatcgtccgaatcctcaaggcccatggagatgaggggctgcacattgaccagcttgtctgtctggtgctggaggcttggcagaagggcccgtgtcctcccaggggtttggtcagcagccttggtaaggggtctgcatgcagcagcactgacgtcctctcctgcatcctacacctcctgggcaagggcacgctgagacgccatgacgaccggccccaggtgctgtcctatgcagtccctgtgactgtcatggagcctcacactgagtccctgaacccaggctcctcaggccccaacccacccctcaccttccataccctacagattcgctcccggggtgtgccctatgcctcctgcactgccacccagagcttctctaccttccggtagccctagacttggggtcaggggaaggtagagctggagcttttacagaaataaaacccaagagtttgattat

SEQ ID NO: 452149 - DNA, 5696 bp, Homo sapiens
gcggaaatgagccgtggcttttggctggcggagccgctggcagggaccgggccccaccctgccccagtggctgccgactcacgcgggtgcagctctgttccgcggaggcacgccccctcccgtctctccgtctcgaccccctcgcggggcccaggtggggcccaagtcgccgccagcgtctgtgccgcgtcccttgctctgtgaaggacaggcctcgcgccaggaccccggtggacttctgaggtgccaggatggtgggagaactccgctacagggaattcagggtgcccctggggcccggcttacatgcctatcctgatgagctgatccgccagcgcgtgggccatgatgggcatcctgagtaccagatccgttggctcatcctgcggcgtggcgatgagggggacgggggctctggccaagtggactgcaaggctgagcacatcctgctgtggatgtccaaggatgagatctatgccaactgccacaagatgctgggcgaggatggccaggtcatcgggccctcccaggagtctgcaggggaggttggggccctggacaaatctgtgctggaggagatggaaaccgacgtgaagtccctcattcagagagcccttcggcagctggaggagtgtgtgggcactatccctcctgctcctctacttcacactgtccacgtgctcagcgcctatgccagcattgagcccctcactggagtattcaaggacccaagggtcctggacttgctcatgcacatgttgagtagtcctgattatcagattcgctggagtgcaggccggatgatacaagccctgtcctcccatgacgctgggacccggactcagatccttctgtcactgagccaacaagaagccattgagaaacacctggattttgacagccgctgtgctctgctagcactgtttgcacaggccacgctctctgaacaccccatgtctttcgagggcattcagctaccacaggtcccaggaagggtgctcttctccctggtgaagcggtatttgcatgtcacctcgctcctggatcagctgaacgacagtgctgcggagccaggagcccagaacacctctgctcctgaggagttgagtggggagaggggtcaactggagctggagttcagtatggccatgggcaccctgatctcggagctggtgcaagccatgcgctgggaccaggcctcagacagaccaaggagctcagcacggtcccccggttccatcttccagcctcagctggcagatgtgagcccagggctccccgctgcccaggctcagccctccttcaggaggtcaagacgttttcgccctcgttctgagttcgcaagtggcaatacctatgctttgtatgtgcgggacacactgcagccggggatgcgagtgcggatgctggatgattatgaggagatcagtgccggggatgagggcgagtttcggcagagcaacaacggtgtgcctcctgtgcaggtattttgggagtcaacaggccgcacctattgggtgcactggcacatgctggagatcttgggctttgaggaagacattgaggacatggttgaggctgatgagtaccaaggggcagtggccagtagagtcctgggtagagccctgcctgcctggcgctggaggcccatgacagaactctatgctgtgccttatgtgctgcctgaggatgaggacactgaggagtgtgaacacctgaccctggctgagtggtgggaactcctcttcttcatcaagaagctggatggacctgaccatcaggaggttctccagatcctccaggagaacctagatggggagattctggatgatgagatcctagctgaactggccgtgcccatagaattggcccaggacttgctgctgactctgccacagcgactcaatgacagtgccctcagggacctgatcaactgccatgtctacaagaagtatgggcctgaagccctagcagggaaccaagcctacccatcccttctagaagcccaagaagatgtcctcctgctagacgcgcaggcccaggctaaggactcagaagatgcagccaaagtggaagcaaaagaacccccatctcagagtcccaacactcccctgcagcgtctggtggagggttatggtccagctgggaaaatcctcctggatctagagcaagccctcagctcagaggggacccaggagaacaaggtcaagccactcctgctgcagctgcagcggcagccgcagcccttcctggcactgatgcagagcctggacactccggagactaacaggaccctgcacctgactgtgctgagaatcctgaagcagctggtggacttccccgaggcactgctgctcccctggcacgaggccgtggatgcctgcatggcctgcctgcggtccccaaacactgatcgagaggtgctccaggaactgattttcttcctgcaccgcctgacctcagtgagcagggactatgccgtggtgctgaatcagctgggagcaagagacgctatctccaaggccctggaaaagcacctgggaaagctggagctggctcaggagctgcgggacatggtgttcaagtgtgagaagcatgcccacctctaccgcaaactcatcaccaacatcctgggaggctgcatccaggtcaggaggaaggggagcttgtgggcttagagtggcatcagaatatgaaacccaagcagtggcgggtaagggctgtgttcccatggctgggaacagcaggtgactctagtgaacctggggcatttgttccccttcccctctgccccatctgggcctgctctgctggtgctgtagaggaagtcccactgctgcatggtctctccttcatccgtgtttccgtgtgtgtctccgtgttccttctgcccctgtgccccttctctctgatgttctggctgcagatggtgctgggccagatcgaagaccacagacgaacccaccggcccatcaacatccctttctttgatgtgttcctcagatacctgtgccagggctccagtgtggaagtgaaggaggacaagtgctgggagaaggtggaggtgtcctccaacccgcaccgggccagcaagctgacggaccacaaccccaagacctattgggagtccaacggcagcgccggctcccactacatcaccctgcacatgcgccggggcatcctcatcaggcaactgactctgcttgtggctagtgaggactcgagttacatgccggcccgagtggtggtgtgcgggggtgatagcactagctctcttcacacggaactcaactcggtgaatgtgatgccctctgccagccgggtgatcctcctggagaacctgacccgcttctggcccatcatccagatccgcataaagcgctgccagcagggtggcattgatacgcgcattcgggggttagagatcctaggccccaagcccacgttctggccagtgttccgggagcagctctgtcgtcacacacgcctcttctacatggttcgggcacaggcctggagccaggacatggcagaggaccgcaggagcctcctgcacctgagttctagactcaacggtgctctgcgccaggagcagaattttgctgaccgcttcctccctgatgacgaggctgcccaagctctgggcaagacctgctgggaggccctggtcagccccgtggtgcagaacatcacctcccctgatgaggatggcattagccccctgggttggctgctggaccagtacctggagtgtcaggaagctgtcttcaacccccagagccgcggcccagctttcttctcgcgggtgcgccgtctcactcacctgctggtgcatgtcgagccctgtgaggcaccccctcctgtggtggccactcctcggcccaaaggcagaaacagaagccacgactggagctccttggctacccggggccttccaagcagcatcatgagaaacctgacgcgctgttggcgggccgtggtggagaagcaggtgaacaattttctgacctcatcctggcgggatgatgactttgtgccacgctactgtgagcactttaatattctgcagaactcaagctctgaactgtttgggcctcgggcagccttcttgctggcgctgcaaaatggctgtgcgggagccttgctgaagctcccttttctcaaagctgcccacgtgagtgagcagttcgcccggcacattgaccagcagatccagggcagccggatcggtggagcccaggaaatggagaggctggcacagctgcagcaatgcctgcaagctgtcctgattttctccggcttggagatagccaccacttttgagcattattaccagcactacatggcggaccgtctcctgggcgtggtctcgagctggctggagggggccgtgctggagcagatcggtccctgcttccccaaccgcctcccccagcagatgttgcagagcctgagcacctctaaggagctgcagcgccagttccacgtctaccagctccagcagctggatcaggaactcctgaagctggaggatacagagaagaaaatacaggtgggccttggggccagtggcaaggagcacaagagcgagaaggaagaggaagctggggcagcagcagtggtggatgtggcggagggagaggaggaagaggaggagaatgaggacctctactatgaaggggcaatgccagaagtgtctgtgcttgtcctgtcccgacactcctggcctgttgcctcaatctgccacacactgaaccccagaacctgcctgccctcctacctgaggggcactttgaacagatactccaacttctacaacaagagtcagagccaccctgcccttgagcgaggctcacagaggcgactgcagtggacgtggctgggctgggctgagctgcagtttgggaaccagaccctgcatgtgtccaccgtgcagatgtggctactgctgtatctcaacgacctgaaggcggtctctgtggagagtctgctggcgttctcagggctctccgcagacatgctcaatcaggcgattgggcccctcacctcttcaagaggccccctggaccttcacgagcaaaaggatataccaggaggggtcctcaagattcgagatggcagcaaggaacccaggtcgagatgggacattgtgcggctcatcccacctcagacgtacctgcaagctgagggtgaagacggccagaacttggagaagagacggaatcttctgaactgcctcatcgtccgaatcctcaaggcccatggagatgaggggctgcacattgaccagcttgtctgtctggtgctggaggcttggcagaagggcccgtgtcctcccaggggtttggtcagcagccttggtaaggggtctgcatgcagcagcactgacgtcctctcctgcatcctacacctcctgggcaagggcacgctgagacgccatgacgaccggccccaggtgctgtcctatgcagtccctgtgactgtcatggagcctcacactgagtccctgaacccaggctcctcaggccccaacccacccctcaccttccataccctacagattcgctcccggggtgtgccctatgcctcctgcactgccacccagagcttctctaccttccggtagccctagacttggggtcaggggaaggtagagctggagcttttacagaaataaaacccaagagtttgattat

SEQ ID NO: 452150 - DNA, 3055 bp, Homo sapiens
ttttttttaaataggtaatacattcacatggttcacaaatcaaaacgctctaacaaggtgctccaggaactgattttcttcctgcaccgcctgacctcagtgagcagggactatgccgtggtgctgaatcagctgggagcaagagacgctatctccaaggccctggaaaagcacctgggaaagctggagctggctcaggagctgcgggacatggtgttcaagtgtgagaagcatgcccacctctaccgcaaactcatcaccaacatcctgggaggctgcatccagatggtgctgggccagatcgaagaccacagacgaacccaccggcccatcaacatccctttctttgatgtgttcctcagatacctgtgccagggctccagtgtggaagtgaaggaggacaagtgctgggagaaggtggaggtgtcctccaacccgcaccgggccagcaagctgacggaccacaaccccaagacctattgggagtccaacggcagcgccggctcccactacatcaccctgcacatgcgccggggcatcctcatcaggcaactgactctgcttgtggctagtgaggactcgagttacatgccggcccgagtggtggtgtgcgggggtgatagcactagctctcttcacacggaactcaactcggtgaatgtgatgccctctgccagccgggtgatcctcctggagaacctgacccgcttctggcccatcatccagatccgcataaagcgctgccagcagggtggcattgatacgcgcattcgggggttagagatcctaggccccaagcccacgttctggccagtgttccgggagcagctctgtcgtcacacacgcctcttctacatggttcgggcacaggcctggagccaggacatggcagaggaccgcaggagcctcctgcacctgagttctagactcaacggtgctctgcgccaggagcagaattttgctgaccgcttcctccctgatgacgaggctgcccaagctctgggcaagacctgctgggaggccctggtcagccccgtggtgcagaacatcacctcccctgatgaggatggcattagccccctgggttggctgctggaccagtacctggagtgtcaggaagctgtcttcaacccccagagccgcggcccagctttcttctcgcgggtgcgccgtctcactcacctgctggtgcatgtcgagccctgtgaggcaccccctcctgtggtggccactcctcggcccaaaggcagaaacagaagccacgactggagctccttggctacccggggccttccaagcagcatcatgagaaacctgacgcgctgttggcgggccgtggtggagaagcaggtgaacaattttctgacctcatcctggcgggatgatgactttgtgccacgctactgtgagcactttaatattctgcagaactcaagctctgaactgtttgggcctcgggcagccttcttgctggcgctgcaaaatggctgtgcgggagccttgctgaagctcccttttctcaaagctgcccacgtgagtgagcagttcgcccggcacattgaccagcagatccagggcagccggatcggtggagcccaggaaatggagaggctggcacagctgcagcaatgcctgcaagctgtcctgattttctccggcttggagatagccaccacttttgagcattattaccagcactacatggcggaccgtctcctgggcgtggtctcgagctggctggagggggccgtgctggagcagatcggtccctgcttccccaaccgcctcccccagcagatgttgcagagcctgagcacctctaaggagctgcagcgccagttccacgtctaccagctccagcagctggatcaggaactcctgaagctggaggatacagagaagaaaatacaggtgggccttggggccagtggcaaggagcacaagagcgagaaggaagaggaagctggggcagcagcagtggtggatgtggcggagggagaggaggaagaggaggagaatgaggacctctactatgaaggggcaatgccagaagtgtctgtgcttgtcctgtcccgacactcctggcctgttgcctcaatctgccacacactgaaccccagaacctgcctgccctcctacctgaggggcactttgaacagatactccaacttctacaacaagagtcagagccaccctgcccttgagcgaggctcacagaggcgactgcagtggacgtggctgggctgggctgagctgcagtttgggaaccagaccctgcatgtgtccaccgtgcagatgtggctactgctgtatctcaacgacctgaaggcggtctctgtggagagtctgctggcgttctcagggctctccgcagacatgctcaatcaggcgattgggcccctcacctcttcaagaggccccctggaccttcacgagcaaaaggatataccaggaggggtcctcaagattcgagatggcagcaaggaacccaggtcgagatgggacattgtgcggctcatcccacctcagacgtacctgcaagctgagggtgaagacggccagaacttggagaagagacggaatcttctgaactgcctcatcgtccgaatcctcaaggcccatggagatgaggggctgcacattgaccagcttgtctgtctggtgctggaggcttggcagaagggcccgtgtcctcccaggggtttggtcagcagccttggtaaggggtctgcatgcagcagcactgacgtcctctcctgcatcctacacctcctgggcaagggcacgctgagacgccatgacgaccggccccaggtgctgtcctatgcagtccctgtgactgtcatggagcctcacactgagtccctgaacccaggctcctcaggccccaacccacccctcaccttccataccctacagattcgctcccggggtgtgccctatgcctcctgcactgccacccagagcttctctaccttccggtagccctagacttggggtcaggggaaggtagagctggagcttttacagaaataaaacccaagagtttgattat

SEQ ID NO: 452151 - DNA, 4020 bp, Homo sapiens
gcggaaatgagccgtggcttttggctggcggagccgctggcagggaccgggccccaccctgccccagtggctgccgactcacgcgggtgcagctctgttccgcggaggcacgccccctcccgtctctccgtctcgaccccctcgcggggcccaggtggggcccaagtcgccgccagcgtctgtgccgcgtcccttgctctgtgaaggacaggcctcgcgccaggaccccggtggacttctgaggtgccaggatggtgggagaactccgctacagggaattcagggtgcccctggggcccggcttacatgcctatcctgatgagctgatccgccagcgcgtgggccatgatgggcatcctgagtaccagatccgttggctcatcctgcggcgtggcgatgagggggacgggggctctggccaagtggactgcaaggctgagcacatcctgctgtggatgtccaaggatgagatctatgccaactgccacaagatgctgggcgaggatggccaggtcatcgggccctcccaggagtctgcaggggaggttggggccctggacaaatctgtgctggaggagatggaaaccgacgtgaagtccctcattcagagagcccttcggcagctggaggagtgtgtgggcactatccctcctgctcctctacttcacactgtccacgtgctcagcgcctatgccagcattgagcccctcactggagtattcaaggacccaagggtcctggacttgctcatgcacatgttgagtagtcctgattatcagattcgctggagtgcaggccggatgatacaagccctgtcctcccatgacgctgggacccggactcagatccttctgtcactgagccaacaagaagccattgagaaacacctggattttgacagccgctgtgctctgctagcactgtttgcacaggccacgctctctgaacaccccatgtctttcgagggcattcagctaccacaggtcccaggaagggtgctcttctccctggtgaagcggtatttgcatgtcacctcgctcctggatcagctgaacgacagtgctgcggagccaggagcccagaacacctctgctcctgaggagttgagtggggagaggggtcaactggagctggagttcagtatggccatgggcaccctgatctcggagctggtgcaagccatgcgctgggaccaggcctcagacagaccaaggagctcagcacggtcccccggttccatcttccagcctcagctggcagatgtgagcccagggctccccgctgcccaggctcagccctccttcaggaggtcaagacgttttcgccctcgttctgagttcgcaagtggcaatacctatgctttgtatgtgcgggacacactgcagccggggatgcgagtgcggatgctggatgattatgaggagatcagtgccggggatgagggcgagtttcggcagagcaacaacggtgtgcctcctgtgcaggtattttgggagtcaacaggccgcacctattgggtgcactggcacatgctggagatcttgggctttgaggaagacattgaggacatggttgaggctgatgagtaccaaggggcagtggccagtagagtcctgggtagagccctgcctgcctggcgctggaggcccatgacagaactctatgctgtgccttatgtgctgcctgaggatgaggacactgaggagtgtgaacacctgaccctggctgagtggtgggaactcctcttcttcatcaagaagctggatggacctgaccatcaggaggttctccagatcctccaggagaacctagatggggagattctggatgatgagatcctagctgaactggccgtgcccatagaattggcccaggacttgctgctgactctactcaacggtgctctgcgccaggagcagaattttgctgaccgcttcctccctgatgacgaggctgcccaagctctgggcaagacctgctgggaggccctggtcagccccgtggtgcagaacatcacctcccctgatgaggatggcattagccccctgggttggctgctggaccagtacctggagtgtcaggaagctgtcttcaacccccagagccgcggcccagctttcttctcgcgggtgcgccgtctcactcacctgctggtgcatgtcgagccctgtgaggcaccccctcctgtggtggccactcctcggcccaaaggcagaaacagaagccacgactggagctccttggctacccggggccttccaagcagcatcatgagaaacctgacgcgctgttggcgggccgtggtggagaagcaggtgaacaattttctgacctcatcctggcgggatgatgactttgtgccacgctactgtgagcactttaatattctgcagaactcaagctctgaactgtttgggcctcgggcagccttcttgctggcgctgcaaaatggctgtgcgggagccttgctgaagctcccttttctcaaagctgcccacgtgagtgagcagttcgcccggcacattgaccagcagatccagggcagccggatcggtggagcccaggaaatggagaggctggcacagctgcagcaatgcctgcaagctgtcctgattttctccggcttggagatagccaccacttttgagcattattaccagcactacatggcggaccgtctcctgggcgtggtctcgagctggctggagggggccgtgctggagcagatcggtccctgcttccccaaccgcctcccccagcagatgttgcagagcctgagcacctctaaggagctgcagcgccagttccacgtctaccagctccagcagctggatcaggaactcctgaagctggaggatacagagaagaaaatacaggtgggccttggggccagtggcaaggagcacaagagcgagaaggaagaggaagctggggcagcagcagtggtggatgtggcggagggagaggaggaagaggaggagaatgaggacctctactatgaaggggcaatgccagaagtgtctgtgcttgtcctgtcccgacactcctggcctgttgcctcaatctgccacacactgaaccccagaacctgcctgccctcctacctgaggggcactttgaacagatactccaacttctacaacaagagtcagagccaccctgcccttgagcgaggctcacagaggcgactgcagtggacgtggctgggctgggctgagctgcagtttgggaaccagaccctgcatgtgtccaccgtgcagatgtggctactgctgtatctcaacgacctgaaggcggtctctgtggagagtctgctggcgttctcagggctctccgcagacatgctcaatcaggcgattgggcccctcacctcttcaagaggccccctggaccttcacgagcaaaaggatataccaggaggggtcctcaagattcgagatggcagcaaggaacccaggtcgagatgggacattgtgcggctcatcccacctcagacgtacctgcaagctgagggtgaagacggccagaacttggagaagagacggaatcttctgaactgcctcatcgtccgaatcctcaaggcccatggagatgaggggctgcacattgaccagcttgtctgtctggtgctggaggcttggcagaagggcccgtgtcctcccaggggtttggtcagcagccttggtaaggggtctgcatgcagcagcactgacgtcctctcctgcatcctacacctcctgggcaagggcacgctgagacgccatgacgaccggccccaggtgctgtcctatgcagtccctgtgactgtcatggagcctcacactgagtccctgaacccaggctcctcaggccccaacccacccctcaccttccataccctacagattcgctcccggggtgtgccctatgcctcctgcactgccacccagagcttctctaccttccggtagccctagacttggggtcaggggaaggtagagctggagcttttacagaaataaaacccaagagtttgattat

SEQ ID NO: 452152 - DNA, 2924 bp, Homo sapiens
gcggaaatgagccgtggcttttggctggcggagccgctggcagggaccgggccccaccctgccccagtggctgccgactcacgcgggtgcagctctgttccgcggaggcacgccccctcccgtctctccgtctcgaccccctcgcggggcccaggtggggcccaagtcgccgccagcgtctgtgccgcgtcccttgctctgtgaaggacaggcctcgcgccaggaccccggtggacttctgaggtgccaggatggtgggagaactccgctacagggaattcagggtgcccctggggcccggcttacatgcctatcctgatgagctgatccgccagcgcgtgggccatgatgggcatcctgagtaccagatccgttggctcatcctgcggcgtggcgatgagggggacgggggctctggccaagtggactgcaaggctgagcacatcctgctgtggatgtccaaggatgagatctatgccaactgccacaagatgctgggcgaggatggccaggtcatcgggccctcccaggagtctgcaggggaggttggggccctggacaaatctgtgctggaggagatggaaaccgacgtgaagtccctcattcagagagcccttcggcagctggaggagtgtgtgggcactatccctcctgctcctctacttcacactgtccacgtgctcagcgcctatgccagcattgagcccctcactggagtattcaaggacccaagggtcctggacttgctcatgcacatgttgagtagtcctgattatcagattcgctggagtgcaggccggatgatacaagccctgtcctcccatgacgctgggacccggactcagatccttctgtcactgagccaacaagaagccattgagaaacacctggattttgacagccgctgtgctctgctagcactgtttgcacaggccacgctctctgaacaccccatgtctttcgagggcattcagctaccacaggtcccaggaagggtgctcttctccctggtgaagcggtatttgcatgtcacctcgctcctggatcagctgaacgacagtgctgcggagccaggagcccagaacacctctgctcctgaggagttgagtggggagaggggtcaactggagctggagttcagtatggccatgggcaccctgatctcggagctggtgcaagccatgcgctgggaccaggcctcagacagaccaaggagctcagcacggtcccccggttccatcttccagcctcagctggcagatgtgagcccagggctccccgctgcccaggctcagccctccttcaggaggtcaagacgttttcgccctcgttctgagttcgcaagtggcaatacctatgctttgtatgtgcgggacacactgcagccggggatgcgagtgcggatgctggatgattatgaggagatcagtgccggggatgagggcgagtttcggcagagcaacaacggtgtgcctcctgtgcaggtattttgggagtcaacaggccgcacctattgggtgcactggcacatgctggagatcttgggctttgaggaagacattgaggacatggttgaggctgatgagtaccaaggggcagtggccagtagagtcctgggtagagccctgcctgcctggcgctggaggcccatgacagaactctatgctgtgccttatgtgctgcctgaggatgaggacactgaggagtgtgaacacctgaccctggctgagtggtgggaactcctcttcttcatcaagaagctggatggacctgaccatcaggaggttctccagatcctccaggagaacctagatggggagattctggatgatgagatcctagctgaactggccgtgcccatagaattggcccaggacttgctgctgactctgccacagcgactcaatgacagtgccctcagggacctgatcaactgccatgtctacaagaagtatgggcctgaagccctagcagggaaccaagcctacccatcccttctagaagcccaagaagatgtcctcctgctagacgcgcaggcccaggctaaggactcagaagatgcagccaaagtggaagcaaaagaacccccatctcagagtcccaacactcccctgcagcgtctggtggagggttatggtccagctgggaaaatcctcctggatctagagcaagccctcagctcagaggggacccaggagaacaaggtcaagccactcctgctgcagctgcagcggcagccgcagcccttcctggcactgatgcagagcctggacactccggagactaacaggaccctgcacctgactgtgctgagaatcctgaagcagctggtggacttccccgaggcactgctgctcccctggcacgaggccgtggatgcctgcatggcctgcctgcggtccccaaacactgatcgagaggtgctccaggaactgattttcttcctgcaccgcctgacctcagtgagcagggactatgccgtggtgctgaatcagctgggagcaagagacgctatctccaaggccctggaaaagcacctgggaaagctggagctggctcaggagctgcgggacatggtgttcaagtgtgagaagcatgcccacctctaccgcaaactcatcaccaacatcctgggaggctgcatccagatggtgctgggccagatcgaagaccacagacgaacccaccggcccatcaacatccctttctttgatgtgttcctcacactgagtccctgaacccaggctcctcaggccccaacccacccctcaccttccataccctacagattcgctcccggggtgtgccctatgcctcctgcactgccacccagagcttctctaccttccggtagccctagacttggggtcaggggaaggtagagctggagcttttacagaaataaaacccaagagtttgattat

SEQ ID NO: 452153 - DNA, 2638 bp, Homo sapiens
gcggaaatgagccgtggcttttggctggcggagccgctggcagggaccgggccccaccctgccccagtggctgccgactcacgcgggtgcagctctgttccgcggaggcacgccccctcccgtctctccgtctcgaccccctcgcggggcccaggtggggcccaagtcgccgccagcgtctgtgccgcgtcccttgctctgtgaaggacaggcctcgcgccaggaccccggtggacttctgaggtgccaggatggtgggagaactccgctacagggaattcagggtgcccctggggcccggcttacatgcctatcctgatgagctgatccgccagcgcgtgggccatgatgggcatcctgagtaccagatccgttggctcatcctgcggcgtggcgatgagggggacgggggctctggccaagtggactgcaaggctgagcacatcctgctgtggatgtccaaggatgagatctatgccaactgccacaagatgctgggcgaggatggccaggtcatcgggccctcccaggagtctgcaggggaggttggggccctggacaaatctgtgctggaggagatggaaaccgacgtgaagtccctcattcagagagcccttcggcagctggaggagtgtgtgggcactatccctcctgctcctctacttcacactgtccacgtgctcagcgcctatgccagcattgagcccctcactggagtattcaaggacccaagggtcctggacttgctcatgcacatgttgagtagtcctgattatcagattcgctggagtgcaggccggatgatacaagccctgtcctcccatgacgctgggacccggactcagatccttctgtcactgagccaacaagaagccattgagaaacacctggattttgacagccgctgtgctctgctagcactgtttgcacaggccacgctctctgaacaccccatgtctttcgagggcattcagctaccacaggtcccaggaagggtgctcttctccctggtgaagcggtatttgcatgtcacctcgctcctggatcagctgaacgacagtgctgcggagccaggagcccagaacacctctgctcctgaggagttgagtggggagaggggtcaactggagctggagttcagtatggccatgggcaccctgatctcggagctggtgcaagccatgcgctgggaccaggcctcagacagaccaaggagctcagcacggtcccccggttccatcttccagcctcagctggcagatgtgagcccagggctccccgctgcccaggctcagccctccttcaggaggtcaagacgttttcgccctcgttctgagttcgcaagtggcaatacctatgctttgtatgtgcgggacacactgcagccggggatgcgagtgcggatgctggatgattatgaggagatcagtgccggggatgagggcgagtttcggcagagcaacaacggtgtgcctcctgtgcaggtattttgggagtcaacaggccgcacctattgggtgcactggcacatgctggagatcttgggctttgaggaagacattgaggacatggttgaggctgatgagtaccaaggggcagtggccagtagagtcctgggtagagccctgcctgcctggcgctggaggcccatgacagaactctatgctgtgccttatgtgctgcctgaggatgaggacactgaggagtgtgaacacctgaccctggctgagtggtgggaactcctcttcttcatcaagaagctggatggacctgaccatcaggaggttctccagatcctccaggagaacctagatggggaggtagagccagcctggagacactcagaggttggagggctctattgcaagggctggactgtatagagcatttggaaggctcaggatgaaaagtggaggtcagagagtggaaggggctgcagaggaggggtctggaattttcagaggtgggagggtgagctgtttgggaggagccagctgccagctgtgagaggatcaggatggagggtatgtgtgcagagagacccccacccctaccaagtgctccctggggcctctgggtcggcagggctgtctgcagtgagagcttctccttgatggcagattctggatgatgagatcctagctgaactggccgtgcccatagaattggcccaggacttgctgctgactctgccacagcgactcaatgacagtgccctcagggacctgatcaactgccatgtctacaagaagtatgggcctgaagccctagcagggaaccaagcctacccatcccttctagaagcccaagaagatgcagccaaagtggaaggtgggtgccagacacagcagctgagctgacacaccttcagggcagtagcacaggagagatgtctgtgctgatttttatgcaatcctttctggaagtgatgccaccttagaagctgcaacttagagagaagcaacaaacggagaagcaggcattgtgttccctcaaagaatgaaggaggatgtaaagttagaaaattgcaagagaattttgaagacttaaaaaagcccccacatttagctttttctcttgtacagaaacatattccatgctttgaaataaagggaagtgctctcctgttttcagatga

SEQ ID NO: 452154 - DNA, 2794 bp, Homo sapiens
gcggaaatgagccgtggcttttggctggcggagccgctggcagggaccgggccccaccctgccccagtggctgccgactcacgcgggtgcagctctgttccgcggaggcacgccccctcccgtctctccgtctcgaccccctcgcggggcccaggtggggcccaagtcgccgccagcgtctgtgccgcgtcccttgctctgtgaaggacaggcctcgcgccaggaccccggtggacttctgaggtgccaggatggtgggagaactccgctacagggaattcagggtgcccctggggcccggcttacatgcctatcctgatgagctgatccgccagcgcgtgggccatgatgggcatcctgagtaccagatccgttggctcatcctgcggcgtggcgatgagggggacgggggctctggccaagtggactgcaaggctgagcacatcctgctgtggatgtccaaggatgagatctatgccaactgccacaagatgctgggcgaggatggccaggtcatcgggccctcccaggagtctgcaggggaggttggggccctggacaaatctgtgctggaggagatggaaaccgacgtgaagtccctcattcagagagcccttcggcagctggaggagtgtgtgggcactatccctcctgctcctctacttcacactgtccacgtgctcagcgcctatgccagcattgagcccctcactggagtattcaaggacccaagggtcctggacttgctcatgcacatgttgagtagtcctgattatcagattcgctggagtgcaggccggatgatacaagccctgtcctcccatgacgctgggacccggactcagatccttctgtcactgagccaacaagaagccattgagaaacacctggattttgacagccgctgtgctctgctagcactgtttgcacaggccacgctctctgaacaccccatgtctttcgagggcattcagctaccacaggtcccaggaagggtgctcttctccctggtgaagcggtatttgcatgtcacctcgctcctggatcagctgaacgacagtgctgcggagccaggagcccagaacacctctgctcctgaggagttgagtggggagaggggtcaactggagctggagttcagtatggccatgggcaccctgatctcggagctggtgcaagccatgcgctgggaccaggcctcagacagaccaaggagctcagcacggtcccccggttccatcttccagcctcagctggcagatgtgagcccagggctccccgctgcccaggctcagccctccttcaggaggtcaagacgttttcgccctcgttctgagttcgcaagtggcaatacctatgctttgtatgtgcgggacacactgcagccggggatgcgagtgcggatgctggatgattatgaggagatcagtgccggggatgagggcgagtttcggcagagcaacaacggtgtgcctcctgtgcaggtattttgggagtcaacaggccgcacctattgggtgcactggcacatgctggagatcttgggctttgaggaagacattgaggacatggttgaggctgatgagtaccaaggggcagtggccagtagagtcctgggtagagccctgcctgcctggcgctggaggcccatgacagaactctatgctgtgccttatgtgctgcctgaggatgaggacactgaggagtgtgaacacctgaccctggctgagtggtgggaactcctcttcttcatcaagaagctggatggacctgaccatcaggaggttctccagatcctccaggagaacctagatggggaggtagagccagcctggagacactcagaggttggagggctctattgcaagggctggactgtatagagcatttggaaggctcaggatgaaaagtggaggtcagagagtggaaggggctgcagaggaggggtctggaattttcagaggtgggagggtgagctgtttgggaggagccagctgccagctgtgagaggatcaggatggagggtatgtgtgcagagagacccccacccctaccaagtgctccctggggcctctgggtcggcagggctgtctgcagtgagagcttctccttgatggcagattctggatgatgagatcctagctgaactggccgtgcccatagaattggcccaggacttgctgctgactctgccacagcgactcaatgacagtgccctcagggacctgatcaactgccatgtctacaagaagtatgggcctgaagccctagcagggaaccaagcctacccatcccttctagaagcccaagaagatgcagccaaagtggaaggtgggtgccagacacagcagctgagctgacacaccttcagggcagtagcacaggagagatgtctgtgctgatttttatgcaatcctttctggaagtgatgccaccttagaagctgcaacttagagagaagcaacaaacggagaagcaggcattgtgttccctcaaagaatgaaggaggatgtaaagttagaaaattgcaagagaattttgaagacttaaaaaagcccccacatttagctttttctcttgtacagaaacatattccatgctttgaaataaagggaagtgctctcctgttttcagatgaagctactttgctattttaagaatataaaggccgggcatggtggctcacgcctgtaatcccagcactttggaaggccaaggcaggtggatcatgaggtcaggagatcgagatcatcctgcctaacatggtgaaaccccgtctctactaaaactacaa

SEQ ID NO: 452155 - DNA, 455 bp, Homo sapiens
gtggcccagccccgctgcacctctctcctgtctcccactttgtcccttgcctctcttcccaaaaccttgactccctctgcttcttccctccatcctcttctctccactccttggggaggccctgaatgtctcccatctgttctctgaaggcggtctctgtggagagtctgctggcgttctcagggctctccgcagacatgctcaatcaggcgattgggcccctcacctcttcaagaggccccctggaccttcacgagcaaaaggatataccaggaggtatgcacttagggccagaggggcctctgctctgaggcagggccaggctcctcgtgggctctccactgagtgagtgatcagcatttatttcaggggtcctcaagattcgagatggcagcaaggaacccaggtcgagatgggacattgtgcggctcatcccacctcagacgtacctgcaa

SEQ ID NO: 452156 - DNA, 518 bp, Homo sapiens
ctgtcccgacactcctggcctgttgcctcaatctgccacacactgaaccccagaacctgcctgccctcctacctgaggggcactttgaacagatactccaacttctacaacaagagtgagcagccaggcagagggactggggactggggagagggtgggctgctaggaaaggacctggggttgggggcagaccctgatgttgggaggcttgatgtaaaaagagatagtctttggctgggcacagtgctcacgcctgtaatcccagcactttgggaggccgaggcaggcagatcacttgaggtcaggagttcaagaccagccttggccaacatggtgaaacctcgtctctgctaaaaatacagaaattagccgggtgtggtggtgtgtgcctgtagtcccagctactcgggaggctgaggcaggagaatcacttcaacccacaggcagatgttgcagtgagccgagatcgtgccactgcactctagcctgggcgacagcgagactccatctcaaaaaaa

SEQ ID NO: 452157 - DNA, 349 bp, Homo sapiens
actttccataattgttaatattgctaatttgtacaatggttaatgatcttataaaatagttgtatgaaagcaccaaccaccttagaaagctgccagcattcatatctactttccagaccctcatccctcctccccactcacctgctctgctcgctcattcatggctttcctgtgctctgccattgctcaggtgagtgagcagttcgcccggcacattgaccagcagatccagggcagccggatcggtggagcccaggaaatggagaggctggcacagctgcagcaatgcctgcaagctgtcctgattttctccggcttggagatagccaccacttttgagcattattac

SEQ ID NO: 452158 - DNA, 295 bp, Homo sapiens
tttgagttttgcttttaaaattgaattttattttttttaaataggtaatacattcacatggttcacaaatcaaaacgctctaacaaggtatacactgagaattcttgctctcacccaaatctctgttcccccagggtcccccacacaccccttactggtaactacttgtattaatttatgtatctttcccgtgttcccttatgcaaatataagcaaacccaaatgtgtgatcttgccactctcttttttacacaaaaggatatggagatattattacataaaacattaagagctt

SEQ ID NO: 452159 - DNA, 703 bp, Homo sapiens
tgaagatagtcctgtgtgtgtttcagggtggcattgatacgcgcattcgggggttagagatcctaggccccaagcccacgttctggccagtgttccgggagcagctctgtcgtcacacacgcctcttctacatggttcgggcacaggcctggagccaggacatggcagaggaccgcaggagcctcctgcacctgagttctaggtgtgtgagagtgtgcgtgtatgcttgtgtctgtgggaaaggtaaggctattgcaaatagctggcaggcaggggtccatagaagctgtgagatggaggtttaatatgcgtggggagggggctggagttttctgagctgtgggaggggaagaaaggataaagagaaaagatttctccagtgggctgggaatgggatataccagttagcacagagcagttctgaagtaccagggggccttcggtttgggtgctggggttagctggcagtcttaggaagggtggacactgagataacatatgcttcaagcccctgacaccttcctcctccattctcacccccaactcaacggtgctctgcgccaggagcagaattttgctgaccgcttcctccctgatgacgaggctgcccaagctctgggcaagacctgctgggaggccctggtcagccccgtggtgcagaacatcacctcccctggtaaccatcctgacatctggacccatt

SEQ ID NO: 452160 - DNA, 5418 bp, Homo sapiens
gcggaaatgagccgtggcttttggctggcggagccgctggcagggaccgggccccaccctgccccagtggctgccgactcacgcgggtgcagctctgttccgcggaggcacgccccctcccgtctctccgtctcgaccccctcgcggggcccaggtggggcccaagtcgccgccagcgtctgtgccgcgtcccttgctctgtgaaggacaggcctcgcgccaggaccccggtggacttctgaggtgccaggatggtgggagaactccgctacagggaattcagggtgcccctggggcccggcttacatgcctatcctgatgagctgatccgccagcgcgtgggccatgatgggcatcctgagtaccagatccgttggctcatcctgcggcgtggcgatgagggggacgggggctctggccaagtggactgcaaggctgagcacatcctgctgtggatgtccaaggatgagatctatgccaactgccacaagatgctgggcgaggatggccaggtcatcgggccctcccaggagtctgcaggggaggttggggccctggacaaatctgtgctggaggagatggaaaccgacgtgaagtccctcattcagagagcccttcggcagctggaggagtgtgtgggcactatccctcctgctcctctacttcacactgtccacgtgctcagcgcctatgccagcattgagcccctcactggagtattcaaggacccaagggtcctggacttgctcatgcacatgttgagtagtcctgattatcagattcgctggagtgcaggccggatgatacaagccctgtcctcccatgacgctgggacccggactcagatccttctgtcactgagccaacaagaagccattgagaaacacctggattttgacagccgctgtgctctgctagcactgtttgcacaggccacgctctctgaacaccccatgtctttcgagggcattcagctaccacaggtcccaggaagggtgctcttctccctggtgaagcggtatttgcatgtcacctcgctcctggatcagctgaacgacagtgctgcggagccaggagcccagaacacctctgctcctgaggagttgagtggggagaggggtcaactggagctggagttcagtatggccatgggcaccctgatctcggagctggtgcaagccatgcgctgggaccaggcctcagacagaccaaggagctcagcacggtcccccggttccatcttccagcctcagctggcagatgtgagcccagggctccccgctgcccaggctcagccctccttcaggaggtcaagacgttttcgccctcgttctgagttcgcaagtggcaatacctatgctttgtatgtgcgggacacactgcagccggggatgcgagtgcggatgctggatgattatgaggagatcagtgccggggatgagggcgagtttcggcagagcaacaacggtgtgcctcctgtgcaggtattttgggagtcaacaggccgcacctattgggtgcactggcacatgctggagatcttgggctttgaggaagacattgaggacatggttgaggctgatgagtaccaaggggcagtggccagtagagtcctgggtagagccctgcctgcctggcgctggaggcccatgacagaactctatgctgtgccttatgtgctgcctgaggatgaggacactgaggagtgtgaacacctgaccctggctgagtggtgggaactcctcttcttcatcaagaagctggatggacctgaccatcaggaggttctccagatcctccaggagaacctagatggggagattctggatgatgagatcctagctgaactggccgtgcccatagaattggcccaggacttgctgctgactctgccacagcgactcaatgacagtgccctcagggacctgatcaactgccatgtctacaagaagtatgggcctgaagccctagcagggaaccaagcctacccatcccttctagaagcccaagaagatgtcctcctgctagacgcgcaggcccaggctaaggactcagaagatgcagccaaagtggaagcaaaagaacccccatctcagagtcccaacactcccctgcagcgtctggtggagggttatggtccagctgggaaaatcctcctggatctagagcaagccctcagctcagaggggacccaggagaacaaggtcaagccactcctgctgcagctgcagcggcagccgcagcccttcctggcactgatgcagagcctggacactccggagactaacaggaccctgcacctgactgtgctgagaatcctgaagcagctggtggacttccccgaggcactgctgctcccctggcacgaggccgtggatgcctgcatggcctgcctgcggtccccaaacactgatcgagaggtgctccaggaactgattttcttcctgcaccgcctgacctcagtgagcagggactatgccgtggtgctgaatcagctgggagcaagagacgctatctccaaggccctggaaaagcacctgggaaagctggagctggctcaggagctgcgggacatggtgttcaagtgtgagaagcatgcccacctctaccgcaaactcatcaccaacatcctgggaggctgcatccagatggtgctgggccagatcgaagaccacagacgaacccaccggcccatcaacatccctttctttgatgtgttcctcagatacctgtgccagggctccagtgtggaagtgaaggaggacaagtgctgggagaaggtggaggtgtcctccaacccgcaccgggccagcaagctgacggaccacaaccccaagacctattgggagtccaacggcagcgccggctcccactacatcaccctgcacatgcgccggggcatcctcatcaggcaactgactctgcttgtggctagtgaggactcgagttacatgccggcccgagtggtggtgtgcgggggtgatagcactagctctcttcacacggaactcaactcggtgaatgtgatgccctctgccagccgggtgatcctcctggagaacctgacccgcttctggcccatcatccagatccgcataaagcgctgccagcagggtggcattgatacgcgcattcgggggttagagatcctaggccccaagcccacgttctggccagtgttccgggagcagctctgtcgtcacacacgcctcttctacatggttcgggcacaggcctggagccaggacatggcagaggaccgcaggagcctcctgcacctgagttctagactcaacggtgctctgcgccaggagcagaattttgctgaccgcttcctccctgatgacgaggctgcccaagctctgggcaagacctgctgggaggccctggtcagccccgtggtgcagaacatcacctcccctgatgaggatggcattagccccctgggttggctgctggaccagtacctggagtgtcaggaagctgtcttcaacccccagagccgcggcccagctttcttctcgcgggtgcgccgtctcactcacctgctggtgcatgtcgagccctgtgaggcaccccctcctgtggtggccactcctcggcccaaaggcagaaacagaagccacgactggagctccttggctacccggggccttccaagcagcatcatgagaaacctgacgcgctgttggcgggccgtggtggagaagcaggtgaacaattttctgacctcatcctggcgggatgatgactttgtgccacgctactgtgagcactttaatattctgcagaactcaagctctgaactgtttgggcctcgggcagccttcttgctggcgctgcaaaatggctgtgcgggagccttgctgaagctcccttttctcaaagctgcccacgtgagtgagcagttcgcccggcacattgaccagcagatccagggcagccggatcggtggagcccaggaaatggagaggctggcacagctgcagcaatgcctgcaagctgtcctgattttctccggcttggagatagccaccacttttgagcattattaccagcactacatggcggaccgtctcctgggcgtggtctcgagctggctggagggggccgtgctggagcagatcggtccctgcttccccaaccgcctcccccagcagatgttgcagagcctgagcacctctaaggagctgcagcgccagttccacgtctaccagctccagcagctggatcaggaactcctgaagctggaggatacagagaagaaaatacaggtgggccttggggccagtggcaaggagcacaagagcgagaaggaagaggaagctggggcagcagcagtggtggatgtggcggagggagaggaggaagaggaggagaatgaggacctctactatgaaggggcaatgccagaagtgtctgtgcttgtcctgtcccgacactcctggcctgttgcctcaatctgccacacactgaaccccagaacctgcctgccctcctacctgaggggcactttgaacagatactccaacttctacaacaagagtcagagccaccctgcccttgagcgaggctcacagaggcgactgcagtggacgtggctgggctgggctgagctgcagtttgggaaccagaccctgcatgtgtccaccgtgcagatgtggctactgctgtatctcaacgacctgaaggcggtctctgtggagagtctgctggcgttctcagggctctccgcagacatgctcaatcaggcgattgggcccctcacctcttcaagaggccccctggaccttcacgagcaaaaggatataccaggaggggtcctcaagattcgagatggcagcaaggaacccaggtcgagatgggacattgtgcggctcatcccacctcagacgtacctgcaagctgagggtgaagacggccagaacttggagaagagacggaatcttctgaactgcctcatcgtccgaatcctcaaggcccatggagatgaggggctgcacattgaccagcttgtctgtctggtgctggaggcttggcagaagggcccgtgtcctcccaggggtttggtcagcagccttggtaaggggtctgcatgcagcagcactgacgtcctctcctgcatcctacacctcctgggcaagggcacgctgagacgccatgacgaccggccccaggtgctgtcctatgcagtccctgtgactgtcatggagcctcacactgagtccctgaacccaggctcctcaggccccaacccacccctcaccttccataccctacagattcgctcccggggtgtgccctatgcctcctgcactgccacccagagcttctctaccttccggtagccctagacttggggtcaggggaaggtagagctggagcttttacagaaataaaacccaagagtttgattat

SEQ ID NO: 452161 - DNA, 5514 bp, Homo sapiens
gcggaaatgagccgtggcttttggctggcggagccgctggcagggaccgggccccaccctgccccagtggctgccgactcacgcgggtgcagctctgttccgcggaggcacgccccctcccgtctctccgtctcgaccccctcgcggggcccaggtggggcccaagtcgccgccagcgtctgtgccgcgtcccttgctctgtgaaggacaggcctcgcgccaggaccccggtggacttctgaggtgccaggatggtgggagaactccgctacagggaattcagggtgcccctggggcccggcttacatgcctatcctgatgagctgatccgccagcgcgtgggccatgatgggcatcctgagtaccagatccgttggctcatcctgcggcgtggcgatgagggggacgggggctctggccaagtggactgcaaggctgagcacatcctgctgtggatgtccaaggatgagatctatgccaactgccacaagatgctgggcgaggatggccaggtcatcgggccctcccaggagtctgcaggggaggttggggccctggacaaatctgtgctggaggagatggaaaccgacgtgaagtccctcattcagagagcccttcggcagctggaggagtgtgtgggcactatccctcctgctcctctacttcacactgtccacgtgctcagcgcctatgccagcattgagcccctcactggagtattcaaggacccaagggtcctggacttgctcatgcacatgttgagtagtcctgattatcagattcgctggagtgcaggccggatgatacaagccctgtcctcccatgacgctggtgaggggcagtgtggggaggaagggaaagcaggagaagggctgggtcggctcagggactcacaggacactgtggcaggagcctctgatctcatcaggacccggactcagatccttctgtcactgagccaacaagaagccattgagaaacacctggattttgacagccgctgtgctctgctagcactgtttgcacaggccacgctctctgaacaccccatgtctttcgagggcattcagctaccacaggtcccaggaagggtgctcttctccctggtgaagcggtatttgcatgtcacctcgctcctggatcagctgaacgacagtgctgcggagccaggagcccagaacacctctgctcctgaggagttgagtggggagaggggtcaactggagctggagttcagtatggccatgggcaccctgatctcggagctggtgcaagccatgcgctgggaccaggcctcagacagaccaaggagctcagcacggtcccccggttccatcttccagcctcagctggcagatgtgagcccagggctccccgctgcccaggctcagccctccttcaggaggtcaagacgttttcgccctcgttctgagttcgcaagtggcaatacctatgctttgtatgtgcgggacacactgcagccggggatgcgagtgcggatgctggatgattatgaggagatcagtgccggggatgagggcgagtttcggcagagcaacaacggtgtgcctcctgtgcaggtattttgggagtcaacaggccgcacctattgggtgcactggcacatgctggagatcttgggctttgaggaagacattgaggacatggttgaggctgatgagtaccaaggggcagtggccagtagagtcctgggtagagccctgcctgcctggcgctggaggcccatgacagaactctatgctgtgccttatgtgctgcctgaggatgaggacactgaggagtgtgaacacctgaccctggctgagtggtgggaactcctcttcttcatcaagaagctggatggacctgaccatcaggaggttctccagatcctccaggagaacctagatggggagattctggatgatgagatcctagctgaactggccgtgcccatagaattggcccaggacttgctgctgactctgccacagcgactcaatgacagtgccctcagggacctgatcaactgccatgtctacaagaagtatgggcctgaagccctagcagggaaccaagcctacccatcccttctagaagcccaagaagatgtcctcctgctagacgcgcaggcccaggctaaggactcagaagatgcagccaaagtggaagcaaaagaacccccatctcagagtcccaacactcccctgcagcgtctggtggagggttatggtccagctgggaaaatcctcctggatctagagcaagccctcagctcagaggggacccaggagaacaaggtcaagccactcctgctgcagctgcagcggcagccgcagcccttcctggcactgatgcagagcctggacactccggagactaacaggaccctgcacctgactgtgctgagaatcctgaagcagctggtggacttccccgaggcactgctgctcccctggcacgaggccgtggatgcctgcatggcctgcctgcggtccccaaacactgatcgagaggtgctccaggaactgattttcttcctgcaccgcctgacctcagtgagcagggactatgccgtggtgctgaatcagctgggagcaagagacgctatctccaaggccctggaaaagcacctgggaaagctggagctggctcaggagctgcgggacatggtgttcaagtgtgagaagcatgcccacctctaccgcaaactcatcaccaacatcctgggaggctgcatccagatggtgctgggccagatcgaagaccacagacgaacccaccggcccatcaacatccctttctttgatgtgttcctcagatacctgtgccagggctccagtgtggaagtgaaggaggacaagtgctgggagaaggtggaggtgtcctccaacccgcaccgggccagcaagctgacggaccacaaccccaagacctattgggagtccaacggcagcgccggctcccactacatcaccctgcacatgcgccggggcatcctcatcaggcaactgactctgcttgtggctagtgaggactcgagttacatgccggcccgagtggtggtgtgcgggggtgatagcactagctctcttcacacggaactcaactcggtgaatgtgatgccctctgccagccgggtgatcctcctggagaacctgacccgcttctggcccatcatccagatccgcataaagcgctgccagcagggtggcattgatacgcgcattcgggggttagagatcctaggccccaagcccacgttctggccagtgttccgggagcagctctgtcgtcacacacgcctcttctacatggttcgggcacaggcctggagccaggacatggcagaggaccgcaggagcctcctgcacctgagttctagactcaacggtgctctgcgccaggagcagaattttgctgaccgcttcctccctgatgacgaggctgcccaagctctgggcaagacctgctgggaggccctggtcagccccgtggtgcagaacatcacctcccctgatgaggatggcattagccccctgggttggctgctggaccagtacctggagtgtcaggaagctgtcttcaacccccagagccgcggcccagctttcttctcgcgggtgcgccgtctcactcacctgctggtgcatgtcgagccctgtgaggcaccccctcctgtggtggccactcctcggcccaaaggcagaaacagaagccacgactggagctccttggctacccggggccttccaagcagcatcatgagaaacctgacgcgctgttggcgggccgtggtggagaagcaggtgaacaattttctgacctcatcctggcgggatgatgactttgtgccacgctactgtgagcactttaatattctgcagaactcaagctctgaactgtttgggcctcgggcagccttcttgctggcgctgcaaaatggctgtgcgggagccttgctgaagctcccttttctcaaagctgcccacgtgagtgagcagttcgcccggcacattgaccagcagatccagggcagccggatcggtggagcccaggaaatggagaggctggcacagctgcagcaatgcctgcaagctgtcctgattttctccggcttggagatagccaccacttttgagcattattaccagcactacatggcggaccgtctcctgggcgtggtctcgagctggctggagggggccgtgctggagcagatcggtccctgcttccccaaccgcctcccccagcagatgttgcagagcctgagcacctctaaggagctgcagcgccagttccacgtctaccagctccagcagctggatcaggaactcctgaagctggaggatacagagaagaaaatacaggtgggccttggggccagtggcaaggagcacaagagcgagaaggaagaggaagctggggcagcagcagtggtggatgtggcggagggagaggaggaagaggaggagaatgaggacctctactatgaaggggcaatgccagaagtgtctgtgcttgtcctgtcccgacactcctggcctgttgcctcaatctgccacacactgaaccccagaacctgcctgccctcctacctgaggggcactttgaacagatactccaacttctacaacaagagtcagagccaccctgcccttgagcgaggctcacagaggcgactgcagtggacgtggctgggctgggctgagctgcagtttgggaaccagaccctgcatgtgtccaccgtgcagatgtggctactgctgtatctcaacgacctgaaggcggtctctgtggagagtctgctggcgttctcagggctctccgcagacatgctcaatcaggcgattgggcccctcacctcttcaagaggccccctggaccttcacgagcaaaaggatataccaggaggggtcctcaagattcgagatggcagcaaggaacccaggtcgagatgggacattgtgcggctcatcccacctcagacgtacctgcaagctgagggtgaagacggccagaacttggagaagagacggaatcttctgaactgcctcatcgtccgaatcctcaaggcccatggagatgaggggctgcacattgaccagcttgtctgtctggtgctggaggcttggcagaagggcccgtgtcctcccaggggtttggtcagcagccttggtaaggggtctgcatgcagcagcactgacgtcctctcctgcatcctacacctcctgggcaagggcacgctgagacgccatgacgaccggccccaggtgctgtcctatgcagtccctgtgactgtcatggagcctcacactgagtccctgaacccaggctcctcaggccccaacccacccctcaccttccataccctacagattcgctcccggggtgtgccctatgcctcctgcactgccacccagagcttctctaccttccggtagccctagacttggggtcaggggaaggtagagctggagcttttacagaaataaaacccaagagtttgattat

SEQ ID NO: 452162 - DNA, 5220 bp, Homo sapiens
tgaggctgggcgatgttcggcagagcaacaacggtgtgccctgtgcaggtatttgggagtcaacaggccgcacctattgggtgcactggcacatgctggagatcttgggctttgaggaagacattgaggacatggttgaggctgagcacatcctgctgtggatgtccaaggatgagatctatgccaactgccacaagatgctgggcgaggatggccaggtcatcgggccctcccaggagtctgcaggggaggttggggccctggacaaatctgtgctggaggagatggaaaccgacgtgaagtccctcattcagagagcccttcggcagctggaggagtgtgtgggcactatccctcctgctcctctacttcacactgtccacgtgctcagcgcctatgccagcattgagcccctcactggagtattcaaggacccaagggtcctggacttgctcatgcacatgttgagtagtcctgattatcagattcgctggagtgcaggccggatgatacaagccctgtcctcccatgacgctggtgaggggcagtgtggggaggaagggaaagcaggagaagggctgggtcggctcagggactcacaggacactgtggcaggagcctctgatctcatcaggacccggactcagatccttctgtcactgagccaacaagaagccattgagaaacacctggattttgacagccgctgtgctctgctagcactgtttgcacaggccacgctctctgaacaccccatgtctttcgagggcattcagctaccacaggtcccaggaagggtgctcttctccctggtgaagcggtatttgcatgtcacctcgctcctggatcagctgaacgacagtgctgcggagccaggagcccagaacacctctgctcctgaggagttgagtggggagaggggtcaactggagctggagttcagtatggccatgggcaccctgatctcggagctggtgcaagccatgcgctgggaccaggcctcagacagaccaaggagctcagcacggtcccccggttccatcttccagcctcagctggcagatgtgagcccagggctccccgctgcccaggctcagccctccttcaggaggtcaagacgttttcgccctcgttctgagttcgcaagtggcaatacctatgctttgtatgtgcgggacacactgcagccggggatgcgagtgcggatgctggatgattatgaggagatcagtgccggggatgagggcgagtttcggcagagcaacaacggtgtgcctcctgtgcaggtattttgggagtcaacaggccgcacctattgggtgcactggcacatgctggagatcttgggctttgaggaagacattgaggacatggttgaggctgatgagtaccaaggggcagtggccagtagagtcctgggtagagccctgcctgcctggcgctggaggcccatgacagaactctatgctgtgccttatgtgctgcctgaggatgaggacactgaggagtgtgaacacctgaccctggctgagtggtgggaactcctcttcttcatcaagaagctggatggacctgaccatcaggaggttctccagatcctccaggagaacctagatggggagattctggatgatgagatcctagctgaactggccgtgcccatagaattggcccaggacttgctgctgactctgccacagcgactcaatgacagtgccctcagggacctgatcaactgccatgtctacaagaagtatgggcctgaagccctagcagggaaccaagcctacccatcccttctagaagcccaagaagatgtcctcctgctagacgcgcaggcccaggctaaggactcagaagatgcagccaaagtggaagcaaaagaacccccatctcagagtcccaacactcccctgcagcgtctggtggagggttatggtccagctgggaaaatcctcctggatctagagcaagccctcagctcagaggggacccaggagaacaaggtcaagccactcctgctgcagctgcagcggcagccgcagcccttcctggcactgatgcagagcctggacactccggagactaacaggaccctgcacctgactgtgctgagaatcctgaagcagctggtggacttccccgaggcactgctgctcccctggcacgaggccgtggatgcctgcatggcctgcctgcggtccccaaacactgatcgagaggtgctccaggaactgattttcttcctgcaccgcctgacctcagtgagcagggactatgccgtggtgctgaatcagctgggagcaagagacgctatctccaaggccctggaaaagcacctgggaaagctggagctggctcaggagctgcgggacatggtgttcaagtgtgagaagcatgcccacctctaccgcaaactcatcaccaacatcctgggaggctgcatccagatggtgctgggccagatcgaagaccacagacgaacccaccggcccatcaacatccctttctttgatgtgttcctcagatacctgtgccagggctccagtgtggaagtgaaggaggacaagtgctgggagaaggtggaggtgtcctccaacccgcaccgggccagcaagctgacggaccacaaccccaagacctattgggagtccaacggcagcgccggctcccactacatcaccctgcacatgcgccggggcatcctcatcaggcaactgactctgcttgtggctagtgaggactcgagttacatgccggcccgagtggtggtgtgcgggggtgatagcactagctctcttcacacggaactcaactcggtgaatgtgatgccctctgccagccgggtgatcctcctggagaacctgacccgcttctggcccatcatccagatccgcataaagcgctgccagcagggtggcattgatacgcgcattcgggggttagagatcctaggccccaagcccacgttctggccagtgttccgggagcagctctgtcgtcacacacgcctcttctacatggttcgggcacaggcctggagccaggacatggcagaggaccgcaggagcctcctgcacctgagttctagactcaacggtgctctgcgccaggagcagaattttgctgaccgcttcctccctgatgacgaggctgcccaagctctgggcaagacctgctgggaggccctggtcagccccgtggtgcagaacatcacctcccctgatgaggatggcattagccccctgggttggctgctggaccagtacctggagtgtcaggaagctgtcttcaacccccagagccgcggcccagctttcttctcgcgggtgcgccgtctcactcacctgctggtgcatgtcgagccctgtgaggcaccccctcctgtggtggccactcctcggcccaaaggcagaaacagaagccacgactggagctccttggctacccggggccttccaagcagcatcatgagaaacctgacgcgctgttggcgggccgtggtggagaagcaggtgaacaattttctgacctcatcctggcgggatgatgactttgtgccacgctactgtgagcactttaatattctgcagaactcaagctctgaactgtttgggcctcgggcagccttcttgctggcgctgcaaaatggctgtgcgggagccttgctgaagctcccttttctcaaagctgcccacgtgagtgagcagttcgcccggcacattgaccagcagatccagggcagccggatcggtggagcccaggaaatggagaggctggcacagctgcagcaatgcctgcaagctgtcctgattttctccggcttggagatagccaccacttttgagcattattaccagcactacatggcggaccgtctcctgggcgtggtctcgagctggctggagggggccgtgctggagcagatcggtccctgcttccccaaccgcctcccccagcagatgttgcagagcctgagcacctctaaggagctgcagcgccagttccacgtctaccagctccagcagctggatcaggaactcctgaagctggaggatacagagaagaaaatacaggtgggccttggggccagtggcaaggagcacaagagcgagaaggaagaggaagctggggcagcagcagtggtggatgtggcggagggagaggaggaagaggaggagaatgaggacctctactatgaaggggcaatgccagaagtgtctgtgcttgtcctgtcccgacactcctggcctgttgcctcaatctgccacacactgaaccccagaacctgcctgccctcctacctgaggggcactttgaacagatactccaacttctacaacaagagtcagagccaccctgcccttgagcgaggctcacagaggcgactgcagtggacgtggctgggctgggctgagctgcagtttgggaaccagaccctgcatgtgtccaccgtgcagatgtggctactgctgtatctcaacgacctgaaggcggtctctgtggagagtctgctggcgttctcagggctctccgcagacatgctcaatcaggcgattgggcccctcacctcttcaagaggccccctggaccttcacgagcaaaaggatataccaggaggggtcctcaagattcgagatggcagcaaggaacccaggtcgagatgggacattgtgcggctcatcccacctcagacgtacctgcaagctgagggtgaagacggccagaacttggagaagagacggaatcttctgaactgcctcatcgtccgaatcctcaaggcccatggagatgaggggctgcacattgaccagcttgtctgtctggtgctggaggcttggcagaagggcccgtgtcctcccaggggtttggtcagcagccttggtaaggggtctgcatgcagcagcactgacgtcctctcctgcatcctacacctcctgggcaagggcacgctgagacgccatgacgaccggccccaggtgctgtcctatgcagtccctgtgactgtcatggagcctcacactgagtccctgaacccaggctcctcaggccccaacccacccctcaccttccataccctacagattcgctcccggggtgtgccctatgcctcctgcactgccacccagagcttctctaccttccggtagccctagacttggggtcaggggaaggtagagctggagcttttacagaaataaaacccaagagtttgattat

SEQ ID NO: 452163 - DNA, 2811 bp, Homo sapiens
gcggaaatgagccgtggcttttggctggcggagccgctggcagggaccgggccccaccctgccccagtggctgccgactcacgcgggtgcagctctgttccgcggaggcacgcccccctcgttctgagttcgcaagtggcaatacctatgctttgtatgtgcgggacacactgcagccggggatgcgagtgcggatgctggatgattatgaggagatcagtgccggggatgagggcgagtttcggcagagcaacaacggtgtgcctcctgtgcaggtattttgggagtcaacaggccgcacctattgggtgcactggcacatgctggagatcttgggctttgaggaagacattgaggacatggttgaggctgatgagtaccaaggggcagtggccagtagagtcctgggtagagccctgcctgcctggcgctggaggcccatgacagaactctatgctgtgccttatgtgctgcctgaggatgaggacactgaggagtgtgaacacctgaccctggctgagtggtgggaactcctcttcttcatcaagaagctggatggacctgaccatcaggaggttctccagatcctccaggagaacctagatggggagattctggatgatgagatcctagctgaactggccgtgcccatagaattggcccaggacttgctgctgactctactcaacggtgctctgcgccaggagcagaattttgctgaccgcttcctccctgatgacgaggctgcccaagctctgggcaagacctgctgggaggccctggtcagccccgtggtgcagaacatcacctcccctgatgaggatggcattagccccctgggttggctgctggaccagtacctggagtgtcaggaagctgtcttcaacccccagagccgcggcccagctttcttctcgcgggtgcgccgtctcactcacctgctggtgcatgtcgagccctgtgaggcaccccctcctgtggtggccactcctcggcccaaaggcagaaacagaagccacgactggagctccttggctacccggggccttccaagcagcatcatgagaaacctgacgcgctgttggcgggccgtggtggagaagcaggtgaacaattttctgacctcatcctggcgggatgatgactttgtgccacgctactgtgagcactttaatattctgcagaactcaagctctgaactgtttgggcctcgggcagccttcttgctggcgctgcaaaatggctgtgcgggagccttgctgaagctcccttttctcaaagctgcccacgtgagtgagcagttcgcccggcacattgaccagcagatccagggcagccggatcggtggagcccaggaaatggagaggctggcacagctgcagcaatgcctgcaagctgtcctgattttctccggcttggagatagccaccacttttgagcattattaccagcactacatggcggaccgtctcctgggcgtggtctcgagctggctggagggggccgtgctggagcagatcggtccctgcttccccaaccgcctcccccagcagatgttgcagagcctgagcacctctaaggagctgcagcgccagttccacgtctaccagctccagcagctggatcaggaactcctgaagctggaggatacagagaagaaaatacaggtgggccttggggccagtggcaaggagcacaagagcgagaaggaagaggaagctggggcagcagcagtggtggatgtggcggagggagaggaggaagaggaggagaatgaggacctctactatgaaggggcaatgccagaagtgtctgtgcttgtcctgtcccgacactcctggcctgttgcctcaatctgccacacactgaaccccagaacctgcctgccctcctacctgaggggcactttgaacagatactccaacttctacaacaagagtcagagccaccctgcccttgagcgaggctcacagaggcgactgcagtggacgtggctgggctgggctgagctgcagtttgggaaccagaccctgcatgtgtccaccgtgcagatgtggctactgctgtatctcaacgacctgaaggcggtctctgtggagagtctgctggcgttctcagggctctccgcagacatgctcaatcaggcgattgggcccctcacctcttcaagaggccccctggaccttcacgagcaaaaggatataccaggaggggtcctcaagattcgagatggcagcaaggaacccaggtcgagatgggacattgtgcggctcatcccacctcagacgtacctgcaagctgagggtgaagacggccagaacttggagaagagacggaatcttctgaactgcctcatcgtccgaatcctcaaggcccatggagatgaggggctgcacattgaccagcttgtctgtctggtgctggaggcttggcagaagggcccgtgtcctcccaggggtttggtcagcagccttggtaaggggtctgcatgcagcagcactgacgtcctctcctgcatcctacacctcctgggcaagggcacgctgagacgccatgacgaccggccccaggtgctgtcctatgcagtccctgtgactgtcatggagcctcacactgagtccctgaacccaggctcctcaggccccaacccacccctcaccttccataccctacagattcgctcccggggtgtgccctatgcctcctgcactgccacccagagcttctctaccttccggtagccctagacttggggtcaggggaaggtagagctggagcttttacagaaataaaacccaagagtttgattat

SEQ ID NO: 452164 - DNA, 2683 bp, Homo sapiens
gcggaaatgagccgtggcttttggctggcggagccgctggcagggaccgggccccaccctgccccagtggctgccgactcacgcgggtgcagctctgttccgcggaggcacgccccctcccgtctctccgtctcgaccccctcgcggggcccaggtggggcccaagtcgccgccagcgtctgtgccgcgtcccttgctctgtgaaggacaggcctcgcgccaggaccccggtggacttctgaggtgccaggatggtgggagaactccgctacagggaattcagggtgcccctggggcccggcttacatgcctatcctgatgagctgatccgccagcgcgtgggccatgatgggcatcctgagtaccagatccgttggctcatcctgcggcgtggcgatgagggggacgggggctctggccaagtggactgcaaggctgagcacatcctgctgtggatgtccaaggatgagatctatgccaactgccacaagatgctgggcgaggatggccaggtcatcgggccctcccaggagtctgcaggggaggttggggccctggacaaatctgtgctggaggagatggaaaccgacgtgaagtccctcattcagagagcccttcggcagctggaggagtgtgtgggcactatccctcctgctcctctacttcacactgtccacgtgctcagcgcctatgccagcattgagcccctcactggagtattcaaggacccaagggtcctggacttgctcatgcacatgttgagtagtcctgattatcagattcgctggagtgcaggccggatgatacaagccctgtcctcccatgacgctgggacccggactcagatccttctgtcactgagccaacaagaagccattgagaaacacctggattttgacagccgctgtgctctgctagcactgtttgcacaggccacgctctctgaacaccccatgtctttcgagggcattcagctaccacaggtcccaggaagggtgctcttctccctggtgaagcggtatttgcatgtcacctcgctcctggatcagctgaacgacagtgctgcggagccaggagcccagaacacctctgctcctgaggagttgagtggggagaggggtcaactggagctggagttcagtatggccatgggcaccctgatctcggagctggtgcaagccatgcgctgggaccaggcctcagacagaccaaggagctcagcacggtcccccggttccatcttccagcctcagctggcagatgtgagcccagggctccccgctgcccaggctcagccctccttcaggaggtcaagacgttttcgccctcgttctgagttcgcaagtggcaatacctatgctttgtatgtgcgggacacactgcagccggggatgcgagtgcggatgctggatgattatgaggagatcagtgccggggatgagggcgagtttcggcagagcaacaacggtgtgcctcctgtgcaggtattttgggagtcaacaggccgcacctattgggtgcactggcacatgctggagatcttgggctttgaggaagacattgaggacatggttgaggctgatgagtaccaaggggcagtggccagtagagtcctgggtagagccctgcctgcctggcgctggaggcccatgacagaactctatgctgtgccttatgtgctgcctgaggatgaggacactgaggagtgtgaacacctgaccctggctgagtggtgggaactcctcttcttcatcaagaagctggatggacctgaccatcaggaggttctccagatcctccaggagaacctagatggggaggtagagccagcctggagacactcagaggttggagggctctattgcaagggctggactgtatagagcatttggaaggctcaggatgaaaagtggaggtcagagagtggaaggggctgcagaggaggggtctggaattttcagaggtgggagggtgagctgtttgggaggagccagctgccagctgtgagaggatcaggatggagggtatgtgtgcagagagacccccacccctaccaagtgctccctggggcctctgggtcggcagggctgtctgcagtgagagcttctccttgatggcagattctggatgatgagatcctagctgaactggccgtgcccatagaattggcccaggacttgctgctgactctgccacagcgactcaatgacagtgccctcagggacctgatcaactgccatgtctacaagaagtatgggcctgaagccctagcagggaaccaagcctacccatcccttctagaagcccaagaagatgtcctcctgctagacgcgcaggcccaggctaaggactcagaagatgcagccaaagtggaaggtgggtgccagacacagcagctgagctgacacaccttcagggcagtagcacaggagagatgtctgtgctgatttttatgcaatcctttctggaagtgatgccaccttagaagctgcaacttagagagaagcaacaaacggagaagcaggcattgtgttccctcaaagaatgaaggaggatgtaaagttagaaaattgcaagagaattttgaagacttaaaaaagcccccacatttagctttttctcttgtacagaaacatattccatgctttgaaataaagggaagtgctctcctgttttcagatga

SEQ ID NO: 452165 - DNA, 2839 bp, Homo sapiens
gcggaaatgagccgtggcttttggctggcggagccgctggcagggaccgggccccaccctgccccagtggctgccgactcacgcgggtgcagctctgttccgcggaggcacgccccctcccgtctctccgtctcgaccccctcgcggggcccaggtggggcccaagtcgccgccagcgtctgtgccgcgtcccttgctctgtgaaggacaggcctcgcgccaggaccccggtggacttctgaggtgccaggatggtgggagaactccgctacagggaattcagggtgcccctggggcccggcttacatgcctatcctgatgagctgatccgccagcgcgtgggccatgatgggcatcctgagtaccagatccgttggctcatcctgcggcgtggcgatgagggggacgggggctctggccaagtggactgcaaggctgagcacatcctgctgtggatgtccaaggatgagatctatgccaactgccacaagatgctgggcgaggatggccaggtcatcgggccctcccaggagtctgcaggggaggttggggccctggacaaatctgtgctggaggagatggaaaccgacgtgaagtccctcattcagagagcccttcggcagctggaggagtgtgtgggcactatccctcctgctcctctacttcacactgtccacgtgctcagcgcctatgccagcattgagcccctcactggagtattcaaggacccaagggtcctggacttgctcatgcacatgttgagtagtcctgattatcagattcgctggagtgcaggccggatgatacaagccctgtcctcccatgacgctgggacccggactcagatccttctgtcactgagccaacaagaagccattgagaaacacctggattttgacagccgctgtgctctgctagcactgtttgcacaggccacgctctctgaacaccccatgtctttcgagggcattcagctaccacaggtcccaggaagggtgctcttctccctggtgaagcggtatttgcatgtcacctcgctcctggatcagctgaacgacagtgctgcggagccaggagcccagaacacctctgctcctgaggagttgagtggggagaggggtcaactggagctggagttcagtatggccatgggcaccctgatctcggagctggtgcaagccatgcgctgggaccaggcctcagacagaccaaggagctcagcacggtcccccggttccatcttccagcctcagctggcagatgtgagcccagggctccccgctgcccaggctcagccctccttcaggaggtcaagacgttttcgccctcgttctgagttcgcaagtggcaatacctatgctttgtatgtgcgggacacactgcagccggggatgcgagtgcggatgctggatgattatgaggagatcagtgccggggatgagggcgagtttcggcagagcaacaacggtgtgcctcctgtgcaggtattttgggagtcaacaggccgcacctattgggtgcactggcacatgctggagatcttgggctttgaggaagacattgaggacatggttgaggctgatgagtaccaaggggcagtggccagtagagtcctgggtagagccctgcctgcctggcgctggaggcccatgacagaactctatgctgtgccttatgtgctgcctgaggatgaggacactgaggagtgtgaacacctgaccctggctgagtggtgggaactcctcttcttcatcaagaagctggatggacctgaccatcaggaggttctccagatcctccaggagaacctagatggggaggtagagccagcctggagacactcagaggttggagggctctattgcaagggctggactgtatagagcatttggaaggctcaggatgaaaagtggaggtcagagagtggaaggggctgcagaggaggggtctggaattttcagaggtgggagggtgagctgtttgggaggagccagctgccagctgtgagaggatcaggatggagggtatgtgtgcagagagacccccacccctaccaagtgctccctggggcctctgggtcggcagggctgtctgcagtgagagcttctccttgatggcagattctggatgatgagatcctagctgaactggccgtgcccatagaattggcccaggacttgctgctgactctgccacagcgactcaatgacagtgccctcagggacctgatcaactgccatgtctacaagaagtatgggcctgaagccctagcagggaaccaagcctacccatcccttctagaagcccaagaagatgtcctcctgctagacgcgcaggcccaggctaaggactcagaagatgcagccaaagtggaaggtgggtgccagacacagcagctgagctgacacaccttcagggcagtagcacaggagagatgtctgtgctgatttttatgcaatcctttctggaagtgatgccaccttagaagctgcaacttagagagaagcaacaaacggagaagcaggcattgtgttccctcaaagaatgaaggaggatgtaaagttagaaaattgcaagagaattttgaagacttaaaaaagcccccacatttagctttttctcttgtacagaaacatattccatgctttgaaataaagggaagtgctctcctgttttcagatgaagctactttgctattttaagaatataaaggccgggcatggtggctcacgcctgtaatcccagcactttggaaggccaaggcaggtggatcatgaggtcaggagatcgagatcatcctgcctaacatggtgaaaccccgtctctactaaaactacaa

SEQ ID NO: 452166 - DNA, 450 bp, Homo sapiens
gtaggaccccagggccattagccattactccacccctcacaggatctgccctcctgcttctatctggccctatcctacttttttctaactcccacctgtcttgagccccacagaaagtagtgtcctttatccctgtgcttgtgccaccaggccctgaacaatgagggtggcatgaggacagctttgtcaggaccctacacatcccagggctggggaagggagggaaacagtgaggggactggagcctagagccaacttggctctgcatgtgtggaggtgacagctttctctgccccctgccaggtgaatgtgatgccctctgccagccgggtgatcctcctggagaacctgacccgcttctggcccatcatccagatccgcataaagcgctgccagcaggtggggccagggatgtggggtgtggccctgggtagggggctctgagcccca

SEQ ID NO: 452167 - DNA, 1717 bp, Homo sapiens
  misc_feature (11)..(11): n is a, c, g, or t
tcggcctaagngatcagagctgtcagccacggcagggttggctgaagctccactgtttttctttttcctttttttttgagatggagtctcactctgttgcccaggctggagtgcagtggtgtgatatctgctcactgcaaactttgcctcccaggttcaagcgattctcctgcctcagcctcctgagttgctgggattacaggtgtggcgtgagccaccatgcctggccttaccaattatttaactttccttgaaggccctacgctctctagtcagtacgcctttgcacatgctgttcctctgcctagaacaccgtcttgtcctcacttctatccccttcatcctgcatgtccttcaggtctcagcttagatctgaagcaagcttcttggggaagggttctttggacgccccctctctccatgggttagttaccatggatgtgtgcttccatatacttttcacattctaaccattaacacacagctttgtagtcgcctgttcccttgactttccacctcactaggcagtatcatcattaacttttgcattcctttaactgaacaaacgtgtgttacttgttaactatgtgtcatagttacacacatacatacacgataaagacccagaccctgcccttgagatgagtaactgcgtctcttctctggggtctcggcgtctaacagcgtcaggtccaaagcgcttgttgaacgaatgaaccaaggaacgagtgaatgaacgaatgaatgcccgcgaaggacgtggtgccgcgcggtcttctgggaatcgtagtcccctggttcgggcctgtctttacggcgcaggcgtattcacatggaggccgtgttgctgttaatgcgcatgtcccggaatgcggctgggaggactgcgcatgctcgaagggtgggggttgaggccgacggggcgccgtacggcggaggcggggtttcagtggcttctggtgctctagggtgagctctgcccggctgcagggatggcggggaggggtaagctcatcgcagtgatcggagacgaggacacggtgactggtttcctgctgggcggcataggggagcttaacaagaaccgccatcccaatttcctggtggtggagaaggatacaaccatcaatgagatcgaagacactttccggcaatttctaaaccgggatgacattggcatcatcctcatcaaccagtacatcgcagagatggtgcggcatgccctggacgcccaccagcagtccatccccgctgtcctggagatcccctccaaggagcacccatatgacgccgccaaggactccatcctgcgcagggccaggggcatgttcactgccgaagacctgcgctaggggactcctcatagccctcagcccttccctcgtttccaggcctctccccaggcttgccatcagccttctttactttttgagcctctgatttccaattccctgctccttcccactccattaagaggctaggtgaggcgcttctaggttgctggggctctgctggttaaggaacaggaagcctgaccatctccctccactacctcttccctgtgctgttacacagtgtcattgttgatgttaaattaaagtcatattcttgcttctctccaaaaaaaaagaaaaaaagggaaaagcattcgggccgaattcgaactcacttgggccattggcccttaaggaggcgtattcaaatcaatgggccccta

SEQ ID NO: 452168 - DNA, 849 bp, Homo sapiens
agtgaagagaagcagagagaggtgaggctggtgtgggtgttttgacagggtgagaaggcaacaaactccaccttgatcaacccctgaaggctgaaggagaaagctggaattctaggagctactggcgggaagagagagctagtttgatgaattggaatccttcattcattggaacaagaccccagttaaggaaattttgattcactagagcttataaatgatggcaagcttgggcagtgtcccaggtaatctgtgaggccagctgcatagtgatcatgaagcctcagaaatgtgtacagaatttgggggcgttctctctccactccgggagtggagagagaaggatacaaccatcaatgagatcgaagacactttccggcaatttctaaaccgggatgacattggcatcatcctcatcaaccagtacatcgcagagatggtgcggcatgccctggacgcccaccagcagtccatccccgctgtcctggagatcccctccaaggagcacccatatgacgccgccaaggactccatcctgcgcagggccaggggcatgttcactgccgaagacctgcgctaggggactcctcatagccctcagcccttccctcgtttccaggcctctccccaggcttgccatcagccttctttactttttgagcctctgatttccaattccctgctccttcccactccattaagaggctaggtgaggcgcttctaggttgctggggctctgctggttaaggaacaggaagcctgaccatctccctccactacctcttccctgtgctgttacacagtgtcattgttgatgttaaattaaagtcatattcttgcttctctcca

SEQ ID NO: 452169 - DNA, 1705 bp, Homo sapiens
  misc_feature (11)..(11): n is a, c, g, or t
tcggcctaagngatcagagctgtcagccacggcagggttggctgaagctccactgtttttctttttcctttttttttgagatggagtctcactctgttgcccaggctggagtgcagtggtgtgatatctgctcactgcaaactttgcctcccaggttcaagcgattctcctgcctcagcctcctgagttgctgggattacaggtgtggcgtgagccaccatgcctggccttaccaattatttaactttccttgaaggccctacgctctctagtcagtacgcctttgcacatgctgttcctctgcctagaacaccgtcttgtcctcacttctatccccttcatcctgcatgtccttcaggtctcagcttagatctgaagcaagcttcttggggaagggttctttggacgccccctctctccatgggttagttaccatggatgtgtgcttccatatacttttcacattctaaccattaacacacagctttgtagtcgcctgttcccttgactttccacctcactaggcagtatcatcattaacttttgcattcctttaactgaacaaacgtgtgttacttgttaactatgtgtcatagttacacacatacatacacgataaagacccagaccctgcccttgagatgagtaactgcgtctcttctctggggtctcggcgtctaacagcgtcaggtccaaagcgcttgttgaacgaatgaaccaaggaacgagtgaatgaacgaatgaatgcccgcgaaggacgtggtgccgcgcggtcttctgggaatcgtagtcccctggttcgggcctgtctttacggcgcaggcgtattcacatggaggccgtgttgctgttaatgcgcatgtcccggaatgcggctgggaggactgcgcatgctcgaagggtgggggttgaggccgacggggcgccgtacggcggaggcggggtttcagtggcttctggtgctctagggtgagctctgcccggctgcagggatggcggggaggggtaagctcatcgcagtgatcggagacgaggacacggtgactggtttcctgctgggcggcataggggagcttaacaagaaccgccatcccaatttcctggtggtggagaaggatacaaccatcaatgagatcgaagacactttccgttcacttggaagccttccgggcagtgttgtagaagccaaccctaatcagcgtgaccctccgctttgggatgaaattgattctaggcaatttctaaaccgggatgacattggcatcatcctcatcaaccagtacatcgcagagatggtgcggcatgccctggacgcccaccagcagtccatccccgctgtcctggagatcccctccaaggagcacccatatgacgccgccaaggactccatcctgcgcagggccaggggcatgttcactgccgaagacctgcgctaggggactcctcatagccctcagcccttccctcgtttccaggcctctccccaggcttgccatcagccttctttactttttgagcctctgatttccaattccctgctccttcccactccattaagaggctaggtgaggcgcttctaggttgctggggctctgctggttaaggaacaggaagcctgaccatctccctccactacctcttccctgtgctgttacacagtgtcattgttgatgttaaattaaagtcatattcttgcttctctcca

SEQ ID NO: 452170 - DNA, 879 bp, Homo sapiens
gtatatatatagatagatagatagatccgccacatccagccatttttttgtgtgtgtatatatagatagagagagagagagagagagagggagatgggggtctcactatgtggcccattctggtctcaaactcctgggttcaagcaatccacctgcctcggcctcccaaagtgctgggattacaggcgtgagccatcacagctggccttcagtatctgcacataaaaagggatctgcatacatataatcttatccttcccctttctgacacatcactgcatattgaatacaccagtgtgcaccctaatcaatcttcattaccagttcacttggaagccttccgggcagtgttgtagaagccaaccctaatcagcgtgaccctccgctttgggatgaaattgattctaggcaatttctaaaccgggatgacattggcatcatcctcatcaaccagtacatcgcagagatggtgcggcatgccctggacgcccaccagcagtccatccccgctgtcctggagatcccctccaaggagcacccatatgacgccgccaaggactccatcctgcgcagggccaggggcatgttcactgccgaagacctgcgctaggggactcctcatagccctcagcccttccctcgtttccaggcctctccccaggcttgccatcagccttctttactttttgagcctctgatttccaattccctgctccttcccactccattaagaggctaggtgaggcgcttctaggttgctggggctctgctggttaaggaacaggaagcctgaccatctccctccactacctcttccctgtgctgttacacagtgtcattgttgatgttaaattaaagtcatattcttgcttctctcca

SEQ ID NO: 452171 - DNA, 1647 bp, Homo sapiens
  misc_feature (11)..(11): n is a, c, g, or t
tcggcctaagngatcagagctgtcagccacggcagggttggctgaagctccactgtttttctttttcctttttttttgagatggagtctcactctgttgcccaggctggagtgcagtggtgtgatatctgctcactgcaaactttgcctcccaggttcaagcgattctcctgcctcagcctcctgagttgctgggattacaggtgtggcgtgagccaccatgcctggccttaccaattatttaactttccttgaaggccctacgctctctagtcagtacgcctttgcacatgctgttcctctgcctagaacaccgtcttgtcctcacttctatccccttcatcctgcatgtccttcaggtctcagcttagatctgaagcaagcttcttggggaagggttctttggacgccccctctctccatgggttagttaccatggatgtgtgcttccatatacttttcacattctaaccattaacacacagctttgtagtcgcctgttcccttgactttccacctcactaggcagtatcatcattaacttttgcattcctttaactgaacaaacgtgtgttacttgttaactatgtgtcatagttacacacatacatacacgataaagacccagaccctgcccttgagatgagtaactgcgtctcttctctggggtctcggcgtctaacagcgtcaggtccaaagcgcttgttgaacgaatgaaccaaggaacgagtgaatgaacgaatgaatgcccgcgaaggacgtggtgccgcgcggtcttctgggaatcgtagtcccctggttcgggcctgtctttacggcgcaggcgtattcacatggaggccgtgttgctgttaatgcgcatgtcccggaatgcggctgggaggactgcgcatgctcgaagggtgggggttgaggccgacggggcgccgtacggcggaggcggggtttcagtggcttctggtgctctagggtgagctctgcccggctgcagggatggcggggaggggtaagctcatcgcagtgatcggagacgaggacacggtgactggtttcctgctgggcggcataggggagcttaacaagaaccgccatcccaatttcctggtggtggagaaggatacaaccatcaatgagatcgaagacactttccggcaatttctaaaccgggatgacattggcatcatcctcatcaaccagtacatcgcagagatggtgcggcatgccctggacgcccaccagcagtccatccccgctgtcctggagatcccctccaaggagcacccatatgacgccgccaaggactccatcctgcgcagggccaggggcatgttcactgccgaagacctgcgctaggggactcctcatagccctcagcccttccctcgtttccaggcctctccccaggcttgccatcagccttctttactttttgagcctctgatttccaattccctgctccttcccactccattaagaggctaggtgaggcgcttctaggttgctggggctctgctggttaaggaacaggaagcctgaccatctccctccactacctcttccctgtgctgttacacagtgtcattgttgatgttaaattaaagtcatattcttgcttctctccaaaaaaaaaaaaaaaaaaaaaaaaaac

SEQ ID NO: 452172 - DNA, 1581 bp, Homo sapiens
  misc_feature (11)..(11): n is a, c, g, or t
tcggcctaagngatcagagctgtcagccacggcagggttggctgaagctccactgtttttctttttcctttttttttgagatggagtctcactctgttgcccaggctggagtgcagtggtgtgatatctgctcactgcaaactttgcctcccaggttcaagcgattctcctgcctcagcctcctgagttgctgggattacaggtgtggcgtgagccaccatgcctggccttaccaattatttaactttccttgaaggccctacgctctctagtcagtacgcctttgcacatgctgttcctctgcctagaacaccgtcttgtcctcacttctatccccttcatcctgcatgtccttcaggtctcagcttagatctgaagcaagcttcttggggaagggttctttggacgccccctctctccatgggttagttaccatggatgtgtgcttccatatacttttcacattctaaccattaacacacagctttgtagtcgcctgttcccttgactttccacctcactaggcagtatcatcattaacttttgcattcctttaactgaacaaacgtgtgttacttgttaactatgtgtcatagttacacacatacatacacgataaagacccagaccctgcccttgagatgagtaactgcgtctcttctctggggtctcggcgtctaacagcgtcaggtccaaagcgcttgttgaacgaatgaaccaaggaacgagtgaatgaacgaatgaatgcccgcgaaggacgtggtgccgcgcggtcttctgggaatcgtagtcccctggttcgggcctgtctttacggcgcaggcgtattcacatggaggccgtgttgctgttaatgcgcatgtcccggaatgcggctgggaggactgcgcatgctcgaagggtgggggttgaggccgacggggcgccgtacggcggaggcggggtttcagtggcttctggtgctctagggtgagctctgcccggctgcagggatggcggggaggggtaagctcatcgcagtgatcggagacgaggacacggtgactggtttcctgctgggcggcataggggagcttaacaagaaccgccatcccaatttcctggtggtggagaaggatacaaccatcaatgagatcgaagacactttccggcaatttctaaaccgggatgacattggcatcatcctcatcaaccagtacatcgcagagatggtgcggcatgccctggacgcccaccagcagtccatccccgctgtcctggagatcccctccaaggagcacccatatgacgccgccaaggactccatcctgcgcagggccaggggcatgttcactgccgaagacctgcgctaggggactcctcatagccctcagcccttccctcgtttccaggcctctccccaggcttgccatcagccttctttactttttgagcctctgatttccaattcctctaggttgctggggctctgctggttaaggaacaggaagcctgaccatctccctccactacctcttccctgtgctgttacacagtgtcattgttgatgttaaattaaagtcatattcttgcttctctcca

SEQ ID NO: 452173 - DNA, 600 bp, Homo sapiens
ccaaggagcagagagcgcaaaggcacaccaaccccagcctcagggccagagagaccagacacacgtctacctcacgtccagttctgtgttgagccaaagctcacccagaatttttctttgttgttgacctcgtgttgcgtgcaagactgggcgctcgttcaagcaagcatgtagggatttatgggtgctacaaggattgctgttgccctgggggcctcctacaaaggcgcaggcccagtcgccacgactcaaggagcacccatatgacgccgccaaggactccatcctgcgcagggccaggggcatgttcactgccgaagacctgcgctaggggactcctcatagccctcagcccttccctcgtttccaggcctctccccaggcttgccatcagccttctttactttttgagcctctgatttccaattccctgctccttcccactccattaagaggctaggtgaggcgcttctaggttgctggggctctgctggttaaggaacaggaagcctgaccatctccctccactacctcttccctgtgctgttacacagtgtcattgttgatgttaaattaaagtcatattcttgcttctctcca

SEQ ID NO: 452174 - DNA, 1590 bp, Homo sapiens
  misc_feature (11)..(11): n is a, c, g, or t
tcggcctaagngatcagagctgtcagccacggcagggttggctgaagctccactgtttttctttttcctttttttttgagatggagtctcactctgttgcccaggctggagtgcagtggtgtgatatctgctcactgcaaactttgcctcccaggttcaagcgattctcctgcctcagcctcctgagttgctgggattacaggtgtggcgtgagccaccatgcctggccttaccaattatttaactttccttgaaggccctacgctctctagtcagtacgcctttgcacatgctgttcctctgcctagaacaccgtcttgtcctcacttctatccccttcatcctgcatgtccttcaggtctcagcttagatctgaagcaagcttcttggggaagggttctttggacgccccctctctccatgggttagttaccatggatgtgtgcttccatatacttttcacattctaaccattaacacacagctttgtagtcgcctgttcccttgactttccacctcactaggcagtatcatcattaacttttgcattcctttaactgaacaaacgtgtgttacttgttaactatgtgtcatagttacacacatacatacacgataaagacccagaccctgcccttgagatgagtaactgcgtctcttctctggggtctcggcgtctaacagcgtcaggtccaaagcgcttgttgaacgaatgaaccaaggaacgagtgaatgaacgaatgaatgcccgcgaaggacgtggtgccgcgcggtcttctgggaatcgtagtcccctggttcgggcctgtctttacggcgcaggcgtattcacatggaggccgtgttgctgttaatgcgcatgtcccggaatgcggctgggaggactgcgcatgctcgaagggtgggggttgaggccgacggggcgccgtacggcggaggcggggtttcagtggcttctggtgctctagggtgagctctgcccggctgcagggatggcggggaggggtaagctcatcgcagtgatcggagacgaggacacggtgactggtttcctgctgggcggcataggggagcttaacaagaaccgccatcccaatttcctggtggtggagaaggatacaaccatcaatgagatcgaagacactttccggcaatttctaaaccgggatgacattggcatcatcctcatcaaccagtacatcgcagagatggtgcggcatgccctggacgcccaccagcagtccatccccgctgtcctggagatcccctccaaggagcacccatatgacgccgccaaggatcctcatagccctcagcccttccctcgtttccaggcctctccccaggcttgccatcagccttctttactttttgagcctctgatttccaattccctgctccttcccactccattaagaggctaggtgaggcgcttctaggttgctggggctctgctggttaaggaacaggaagcctgaccatctccctccactacctcttccctgtgctgttacacagtgtcattgttgatgttaaattaaagtcatattcttgcttctctccaaaaaaaaaaaaaaaaaaaaaaaaaac

SEQ ID NO: 452175 - DNA, 1306 bp, Homo sapiens
  misc_feature (11)..(11): n is a, c, g, or t
tcggcctaagngatcagagctgtcagccacggcagggttggctgaagctccactgtttttctttttcctttttttttgagatggagtctcactctgttgcccaggctggagtgcagtggtgtgatatctgctcactgcaaactttgcctcccaggttcaagcgattctcctgcctcagcctcctgagttgctgggattacaggtgtggcgtgagccaccatgcctggccttaccaattatttaactttccttgaaggccctacgctctctagtcagtacgcctttgcacatgctgttcctctgcctagaacaccgtcttgtcctcacttctatccccttcatcctgcatgtccttcaggtctcagcttagatctgaagcaagcttcttggggaagggttctttggacgccccctctctccatgggttagttaccatggatgtgtgcttccatatacttttcacattctaaccattaacacacagctttgtagtcgcctgttcccttgactttccacctcactaggcagtatcatcattaacttttgcattcctttaactgaacaaacgtgtgttacttgttaactatgtgtcatagttacacacatacatacacgataaagacccagaccctgcccttgagatgagtaactgcgtctcttctctggggtctcggcgtctaacagcgtcaggtccaaagcgcttgttgaacgaatgaaccaaggaacgagtgaatgaacgaatgaatgcccgcgaaggacgtggtgccgcgcggtcttctgggaatcgtagtcccctggttcgggcctgtctttacggcgcaggcgtattcacatggaggccgtgttgctgttaatgcgcatgtcccggaatgcggctgggaggactgcgcatgctcgaagggtgggggttgaggccgacggggcgccgtacggcggaggcggggtttcagtggcttctggtgctctagggtgagctctgcccggctgcagggatggcggggaggggtaagctcatcgcagtgatcggagacgaggacacggtgactggtttcctgctgggcggcataggggagcttaacaagaaccgccatcccaatttcctggtggtggagaaggatacaaccatcaatgagatcgaagacactttccggcaatttctaaaccgggatgacattgtctaggttgctggggctctgctggttaaggaacaggaagcctgaccatctccctccactacctcttccctgtgctgttacacagtgtcattgttgatgttaaattaaagtcatattcttgcttctctcca

SEQ ID NO: 452176 - DNA, 1773 bp, Homo sapiens
  misc_feature (11)..(11): n is a, c, g, or t
tcggcctaagngatcagagctgtcagccacggcagggttggctgaagctccactgtttttctttttcctttttttttgagatggagtctcactctgttgcccaggctggagtgcagtggtgtgatatctgctcactgcaaactttgcctcccaggttcaagcgattctcctgcctcagcctcctgagttgctgggattacaggtgtggcgtgagccaccatgcctggccttaccaattatttaactttccttgaaggccctacgctctctagtcagtacgcctttgcacatgctgttcctctgcctagaacaccgtcttgtcctcacttctatccccttcatcctgcatgtccttcaggtctcagcttagatctgaagcaagcttcttggggaagggttctttggacgccccctctctccatgggttagttaccatggatgtgtgcttccatatacttttcacattctaaccattaacacacagctttgtagtcgcctgttcccttgactttccacctcactaggcagtatcatcattaacttttgcattcctttaactgaacaaacgtgtgttacttgttaactatgtgtcatagttacacacatacatacacgataaagacccagaccctgcccttgagatgagtaactgcgtctcttctctggggtctcggcgtctaacagcgtcaggtccaaagcgcttgttgaacgaatgaaccaaggaacgagtgaatgaacgaatgaatgcccgcgaaggacgtggtgccgcgcggtcttctgggaatcgtagtcccctggttcgggcctgtctttacggcgcaggcgtattcacatggaggccgtgttgctgttaatgcgcatgtcccggaatgcggctgggaggactgcgcatgctcgaagggtgggggttgaggccgacggggcgccgtacggcggaggcggggtttcagtggcttctggtgctctagggtgagctctgcccggctgcagggatggcggggaggggtaagctcatcgcagtgatcggagacgaggacacggtgactggtttcctgctgggcggcataggggagcttaacaagaaccgccatcccaatttcctggtggtggagaaggatacaaccatcaatgagatcgaagacactttccggtacggtaccgcgcgaggcctgaacgggcccttctgctgctcggtggagtgcggggcgaggctggaggctgcccggacgggggtgaggggacgatcctgaaagtccttccgcccttccggagcggaggcctccgcgccccaagtccccgtttggggctcggtgggacagaagctgtatcaggtccacgagcccccccacctcacatgatcgtgtgtcatgaaagaaggggaacagagctcgtgacagcctagacagtgggcttggactttgttctgctttctcctcctttagaggctcaccatcgtcccgtaaggcagggatgatttttgtcctactcacaggtgagaaaactaaagctcggagagggtaaggcacacactaaagttacgagtcggcagaggcagagctagaatttgaacccaatctcaaccctttctgcctccggtaagccaggtacacactcttggcaggtctcctcaggcggcctcggaatttccttgtagtcttgagcacagtaggcagaaatgtcgggactgtgagagccttctgctaagaccttgcactcaagccctcactgcctgccttaggtcaagtgtgggtgcaggcatgcttttaatccacc

SEQ ID NO: 452177 - DNA, 254 bp, Homo sapiens
cagatgggttgggtgctggaaaggacatgtgtggggtgaggccatggggcagattcggttggcaaggatggaaaaggtgctgccaaagacaggcatagaagaggtggcccaggaggattgtgccgggaggcagaactcaaggactggtccttggatcagagaagaccagctctggtctggggaggaatgggaggaggcttgagcccagctcctgcttcccccaccttgctcggcattgggctgggaagggggcc

SEQ ID NO: 452178 - DNA, 1747 bp, Homo sapiens
  misc_feature (11)..(11): n is a, c, g, or t
  misc_feature (1668)..(1668): n is a, c, g, or t
tcggcctaagngatcagagctgtcagccacggcagggttggctgaagctccactgtttttctttttcctttttttttgagatggagtctcactctgttgcccaggctggagtgcagtggtgtgatatctgctcactgcaaactttgcctcccaggttcaagcgattctcctgcctcagcctcctgagttgctgggattacaggtgtggcgtgagccaccatgcctggccttaccaattatttaactttccttgaaggccctacgctctctagtcagtacgcctttgcacatgctgttcctctgcctagaacaccgtcttgtcctcacttctatccccttcatcctgcatgtccttcaggtctcagcttagatctgaagcaagcttcttggggaagggttctttggacgccccctctctccatgggttagttaccatggatgtgtgcttccatatacttttcacattctaaccattaacacacagctttgtagtcgcctgttcccttgactttccacctcactaggcagtatcatcattaacttttgcattcctttaactgaacaaacgtgtgttacttgttaactatgtgtcatagttacacacatacatacacgataaagacccagaccctgcccttgagatgagtaactgcgtctcttctctggggtctcggcgtctaacagcgtcaggtccaaagcgcttgttgaacgaatgaaccaaggaacgagtgaatgaacgaatgaatgcccgcgaaggacgtggtgccgcgcggtcttctgggaatcgtagtcccctggttcgggcctgtctttacggcgcaggcgtattcacatggaggccgtgttgctgttaatgcgcatgtcccggaatgcggctgggaggactgcgcatgctcgaagggtgggggttgaggccgacggggcgccgtacggcggaggcggggtttcagtggcttctggtgctctagggtgagctctgcccggctgcagggatggcggggaggggtaagctcatcgcagtgatcggagacgaggacacggtgactggtttcctgctgggcggcataggggagcttaacaagaaccgccatcccaatttcctggtggtggagaaggatacaaccatcaatgagatcgaagacactttccggcaatttctaaaccgggatgacattggcatcatcctcatcaaccagtacatcgcagagatggtgcggcatgccctggacgcccaccagcagtccatccccgctgtcctggagatcccctccaaggagcacccatatgacgccgccaaggactccatcctgcgcagggccaggggcatgttcactgccgaagacctgcgctaggggactcctcatagccctcagcccttccctcgtttccaggcctctccccaggcttgccatcagccttctttactttttgagcctctgatttccaattccctgctccttcccactccattaagaggctaggtgaggcgcttctaggttgctggggctctgctggttaaggaacaggaagcctgaccatctccctccactacctcttccctgtgctgttacacagtgtcattgttgatgttaaattaaagtcatattcttgcttctctccaaaaaaaaaataaaaaaaaaattcactggccggtggtttacaacgtgngactggggaaacccctgggtccccaacttatcggcttgcagacatccccttttgccagttgggaatatacgaaaggcct

SEQ ID NO: 452179 - DNA, 1621 bp, Homo sapiens
  misc_feature (11)..(11): n is a, c, g, or t
tcggcctaagngatcagagctgtcagccacggcagggttggctgaagctccactgtttttctttttcctttttttttgagatggagtctcactctgttgcccaggctggagtgcagtggtgtgatatctgctcactgcaaactttgcctcccaggttcaagcgattctcctgcctcagcctcctgagttgctgggattacaggtgtggcgtgagccaccatgcctggccttaccaattatttaactttccttgaaggccctacgctctctagtcagtacgcctttgcacatgctgttcctctgcctagaacaccgtcttgtcctcacttctatccccttcatcctgcatgtccttcaggtctcagcttagatctgaagcaagcttcttggggaagggttctttggacgccccctctctccatgggttagttaccatggatgtgtgcttccatatacttttcacattctaaccattaacacacagctttgtagtcgcctgttcccttgactttccacctcactaggcagtatcatcattaacttttgcattcctttaactgaacaaacgtgtgttacttgttaactatgtgtcatagttacacacatacatacacgataaagacccagaccctgcccttgagatgagtaactgcgtctcttctctggggtctcggcgtctaacagcgtcaggtccaaagcgcttgttgaacgaatgaaccaaggaacgagtgaatgaacgaatgaatgcccgcgaaggacgtggtgccgcgcggtcttctgggaatcgtagtcccctggttcgggcctgtctttacggcgcaggcgtattcacatggaggccgtgttgctgttaatgcgcatgtcccggaatgcggctgggaggactgcgcatgctcgaagggtgggggttgaggccgacggggcgccgtacggcggaggcggggtttcagtggcttctggtgctctagggtgagctctgcccggctgcagggatggcggggaggggtaagctcatcgcagtgatcggagacgaggacacggtgactggtttcctgctgggcggcataggggagcttaacaagaaccgccatcccaatttcctggtggtggagaaggatacaaccatcaatgagatcgaagacactttccggcaatttctaaaccgggatgacattggcatcatcctcatcaaccagtacatcgcagagatggtgcggcatgccctggacgcccaccagcagtccatccccgctgtcctggagatcccctccaaggagcacccatatgacgccgccaaggactccatcctgcgcagggccaggggcatgttcactgccgaagacctgcgctaggggactcctcatagccctcagcccttccctcgtttccaggcctctccccaggcttgccatcagccttctttactttttgagcctctgatttccaattccctgctccttcccactccattaagaggctaggtgaggcgcttctaggttgctggggctctgctggttaaggaacaggaagcctgaccatctccctccactacctcttccctgtgctgttacacagtgtcattgttgatgttaaattaaagtcatattcttgcttctctcca

SEQ ID NO: 452180 - DNA, 1404 bp, Homo sapiens
gcacagatggtttctaagatccctcccaggcctggaacttctaagcgattaggtcaaaggaaaaaggcagaacgttcctccgctggcgccagccaatcagcaggactcctgccttccttcggggcaaggtcgcagcatctgcctcggaaatcacgaaatcacggggcttctttctgctggctcagccgggaggcccagagtgttctgcagaggctgcgtattgaaggctgctctctgaagctccctgccccaggtcacgccgccggttccagatgaatccagagtgggggcaggccttcgtgcacgtggccgtggccggtggcctctgtgccgtggctgtgttcacgggcattttcgacagtgtttccgtgcaagtgggctatgagcactacgccgaggcgcccgtggccggcctccctgccttcctggccatgccgttcaactcactcgtgaacatggcctacacgctgctggggctgtcgtggctgcacaggggcggcgcgatggggctgggtccccgctacctgaaggacgtgttcgcagccatggccctgctctatggccccgtgcagtggctgcgcctgtggacgcagtggcgccgtgccgcggtgctggaccagtggctcacactgcccatctttgcatggcccgtggcctggtgcctctacctagaccgcggctggcggccctggctgttcctctctcttgagtgcgtctccctggccagttatggcctcgctctgctgcatccccagggcttcgaggtcgcactgggtgctcacgtggtggccgctgtggggcaggcgctgcgcacccacaggcactatggcagcaccacctcggctacctacttagctttgggggtgctctcttgcctgggctttgtggtcctcaagctgtgtgaccatcagctcgcacggtggcgtctcttccagtgcctcacaggccacttctggtccaaggtctgtgacgtgctccagttccactttgcgtttttgtttctgacgcatttcaacactcacccaagattccatccctctggcgggaagacgcgttgaacccagggaagaacctgctgaaaaccgatgacccccagcattgaaatggactctgagatggcagcgtggtgccagtgtcagacatcctgtgtgtgatgatatgcactgatcacacaagactgccctttcctgagaagctgcgggcttcggtgtggaggggtggagtgctgtgatctcgacaacttactttcaaagacataaagcacagatctccgcacaggggatgtgtgtgttcctgatgtaatttgcataacttttctgtagtttgaaatgtttccaaataaatattggcaaggggagtggaaatgacaccaagaagcccctcatgctcatggttggacagaga

SEQ ID NO: 452181 - DNA, 1429 bp, Homo sapiens
attctagaggcttgagagagtcagtgtgcagcggtttcactctgatttgcttctccagtgaagatggttggtagctcctgaggccgggggtcaggaacatggaggcggtgctggggacggtttgttttctaaccacactccttttgtaaccacaaaggaaaaaggcagaacgttcctccgctggcgccagccaatcagcaggactcctgccttccttcggggcaaggtcgcagcatctgcctcggaaatcacgaaatcacggggcttctttctgctggctcagccgggaggcccagagtgttctgcagaggctgcgtattgaaggctgctctctgaagctccctgccccaggtcacgccgccggttccagatgaatccagagtgggggcaggccttcgtgcacgtggccgtggccggtggcctctgtgccgtggcggcctccctgccttcctggccatgccgttcaactcactcgtgaacatggcctacacgctgctggggctgtcgtggctgcacaggggcggcgcgatggggctgggtccccgctacctgaaggacgtgttcgcagccatggccctgctctatggccccgtgcagtggctgcgcctgtggacgcagtggcgccgtgccgcggtgctggaccagtggctcacactgcccatctttgcatggcccgtggcctggtgcctctacctagaccgcggctggcggccctggctgttcctctctcttgagtgcgtctccctggccagttatggcctcgctctgctgcatccccagggcttcgaggtcgcactgggtgctcacgtggtggccgctgtggggcaggcgctgcgcacccacaggcactatggcagcaccacctcggctacctacttagctttgggggtgctctcttgcctgggctttgtggtcctcaagctgtgtgaccatcagctcgcacggtggcgtctcttccagtgcctcacaggccacttctggtccaaggtctgtgacgtgctccagttccactttgcgtttttgtttctgacgcatttcaacactcacccaagattccatccctctggcgggaagacgcgttgaacccagggaagaacctgctgaaaaccgatgacccccagcattgaaatggactctgagatggcagcgtggtgccagtgtcagacatcctgtgtgtgatgatatgcactgatcacacaagactgccctttcctgagaagctgcgggcttcggtgtggaggggtggagtgctgtgatctcgacaacttactttcaaagacataaagcacagatctccgcacaggggatgtgtgtgttcctgatgtaatttgcataacttttctgtagtttgaaatgtttccaaataaatattggcaaggggagtggaaatgacaccaagaagcccctcatgctcatggttggacagaga

SEQ ID NO: 452182 - DNA, 1540 bp, Homo sapiens
gaaagaaagaaaaaaaaacaaaagaaagaaagggggtgtatggtaagtatagcccggtggttataggaagcgtgggtggtagcgcatccggtatatccgggatagctgtgagccaggctgtcggtatacagcagtgaggtcgagtgaggctgaaataggcgtatggtgatcgctgggcttattcgcgccaatactgaaaaaggcagaacgttcctccgctggcgccagccaatcagcaggactcctgccttccttcggggcaaggtcgcagcatctgcctcggaaatcacgaaatcacggggcttctttctgctggctcagccgggaggcccagagtgttctgcagaggctgcgtattgaaggctgctctctgaagctccctgccccaggtcacgccgccggttccagatgaatccagagtgggggcaggccttcgtgcacgtggccgtggccggtggcctctgtgccgtggctgtgttcacgggcattttcgacagtgtttccgtgcaagtgggctatgagcactacgccgaggcgcccgtggccggcctccctgccttcctggccatgccgttcaactcactcgtgaacatggcctacacgctgctggggctgtcgtggctgcacaggggcggcgcgatggggctgggtccccgctacctgaaggacgtgttcgcagccatggccctgctctatggccccgtgcagtggctgcgcctgtggacgcagtggcgccgtgccgcggtgctggaccagtggctcacactgcccatctttgcatggcccgtggcctggtgcctctacctagaccgcggctggcggccctggctgttcctctctcttgagtgcgtctccctggccagttatggcctcgctctgctgcatccccagggcttcgaggtcgcactgggtgctcacgtggtggccgctgtggggcaggcgctgcgcacccacaggcactatggcagcaccacctcggctacctacttagctttgggggtgctctcttgcctgggctttgtggtcctcaagctgtgtgaccatcagctcgcacggtggcgtctcttccagtgcctcacaggccacttctggtccaaggtctgtgacgtgctccagttccactttgcgtttttgtttctgacgcatttcaacactcacccaagattccatccctctggcgggaagacgcgttgaacccagggaagaacctgctgaaaaccgatgacccccagcattgaaatggactctgagatggcagcgtggtgccagtgtcagacatcctgtgtgtgatgatatgcactgatcacacaagactgccctttcctgagaagctgcgggcttcggtgtggaggggtggagtgctgtgatctcgacaacttactttcaaagacataaagcacagatctccgcacaggggatgtgtgtgttcctgatgtaatttgcataacttttctgtagtttgaaatgtttccaaataaatattggcaaggggagtggaaatgacaccaagaagcccctcatgctcatggttggacagaga

SEQ ID NO: 452183 - DNA, 1872 bp, Homo sapiens
  misc_feature (315)..(315): n is a, c, g, or t
ggcgaacagccactgcagccgcgcctgcggccgggaagcgagcattttcgcgccctgcacacccagcagccgcaggaggcggcccgaggcgcgccgcgggggagccgggggcggggcgacagtgggaggcgacgcagccgagcgccggcgcccgggggtggagcctccgcccgctcccaggctcccaggctgcggggcccgccctcgggcgccaccgcctccgcccgcgccgcagcaaaatgagccgggccgcgcgccccagaccgccgcgcgctcggccgcccccactgccgagaggcccgcagtcgggccggntggcgcacgagccgggcgggcgaccgcgggaggcgtccgcgtcatctcgcgtcacctcgccccgcccgcttcccaggcttcgagtcccgccctgcgcgcaggcgcaccggcgctgctcggatcctcccttttcggagatttgaatttcccccagcgaggcgagtgaggcgaaatacccgtatggtgatagctggccttttcgcgccaatactgaaaaaggcagaacgttcctccgctggcgccagccaatcagcaggactcctgccttccttcggggcaaggtcgcagcatctgcctcggaaatcacgaaatcacggggcttctttctgctggctcagccgggaggcccagagtgttctgcagaggctgcgtattgaaggctgctctctgaagctccctgccccaggtcacgccgccggttccagatgaatccagagtgggggcaggccttcgtgcacgtggccgtggccggtggcctctgtgccgtggctgtgttcacgggcattttcgacagtgtttccgtgcaagtgggctatgagcactacgccgaggcgcccgtggccggcctccctgccttcctggccatgccgttcaactcactcgtgaacatggcctacacgctgctggggctgtcgtggctgcacaggggcggcgcgatggggctgggtccccgctacctgaaggacgtgttcgcagccatggccctgctctatggccccgtgcagtggctgcgcctgtggacgcagtggcgccgtgccgcggtgctggaccagtggctcacactgcccatctttgcatggcccgtggcctggtgcctctacctagaccgcggctggcggccctggctgttcctctctcttgagtgcgtctccctggccagttatggcctcgctctgctgcatccccagggcttcgaggtcgcactgggtgctcacgtggtggccgctgtggggcaggcgctgcgcacccacaggcactatggcagcaccacctcggctacctacttagctttgggggtgctctcttgcctgggctttgtggtcctcaagctgtgtgaccatcagctcgcacggtggcgtctcttccagtgcctcacaggccacttctggtccaaggtctgtgacgtgctccagttccactttgcgtttttgtttctgacgcatttcaacactcacccaagattccatccctctggcgggaagacgcgttgaacccagggaagaacctgctgaaaaccgatgacccccagcattgaaatggactctgagatggcagcgtggtgccagtgtcagacatcctgtgtgtgatgatatgcactgatcacacaagactgccctttcctgagaagctgcgggcttcggtgtggaggggtggagtgctgtgatctcgacaacttactttcaaagacataaagcacagatctccgcacaggggatgtgtgtgttcctgatgtaatttgcataacttttctgtagtttgaaatgtttccaaataaatattggcaaggggagtggaaatgacaccaagaagcccctcatgctcatggttggacagaga

SEQ ID NO: 452184 - DNA, 1475 bp, Homo sapiens
  misc_feature (315)..(315): n is a, c, g, or t
ggcgaacagccactgcagccgcgcctgcggccgggaagcgagcattttcgcgccctgcacacccagcagccgcaggaggcggcccgaggcgcgccgcgggggagccgggggcggggcgacagtgggaggcgacgcagccgagcgccggcgcccgggggtggagcctccgcccgctcccaggctcccaggctgcggggcccgccctcgggcgccaccgcctccgcccgcgccgcagcaaaatgagccgggccgcgcgccccagaccgccgcgcgctcggccgcccccactgccgagaggcccgcagtcgggccggntggcgcacgagccgggcgggcgaccgcgggaggcgtccgcgtcatctcgcgtcacctcgccccgcccgcttcccaggcttcgagtcccgccctgcgcgcaggcgcaccggcgctgctcggatcctcccttttcggagatttgaatttcccccagcgaggcgagtgaggcgaaatacccgtatggtgatagctggccttttcgcgccaatactgaaaaaggcagaacgttcctccgctggcgccagccaatcagcaggactcctgccttccttcggggcaaggtcgcagcatctgcctcggaaatcacgaaatcacggggcttctttctgctggctcagccgggaggcccagagtgttctgcagaggctgcgtattgaaggctgctctctgaagctccctgccccaggtcacgccgccggttccagatgaatccagagtgggggcaggccttcgtgcacgtggccgtggccggtggcctctgtgccgtggctgtgttcacgggcattttcgacagtgtttccgtgcaatgggtgctcacgtggtggccgctgtggggcaggcgctgcgcacccacaggcactatggcagcaccacctcggctacctacttagctttgggggtgctctcttgcctgggctttgtggtcctcaagctgtgtgaccatcagctcgcacggtggcgtctcttccagtgcctcacaggccacttctggtccaaggtctgtgacgtgctccagttccactttgcgtttttgtttctgacgcatttcaacactcacccaagattccatccctctggcgggaagacgcgttgaacccagggaagaacctgctgaaaaccgatgacccccagcattgaaatggactctgagatggcagcgtggtgccagtgtcagacatcctgtgtgtgatgatatgcactgatcacacaagactgccctttcctgagaagctgcgggcttcggtgtggaggggtggagtgctgtgatctcgacaacttactttcaaagacataaagcacagatctccgcacaggggatgtgtgtgttcctgatgtaatttgcataacttttctgtagtttgaaatgtttccaaataaatattggcaaggggagtggaaatgacaccaagaagcccctcatgctcatggttggacagaga

SEQ ID NO: 452185 - DNA, 1502 bp, Homo sapiens
attctagaggcttgagagagtcagtgtgcagcggtttcactctgatttgcttctccagtgaagatggttggtagctcctgaggccgggggtcaggaacatggaggcggtgctggggacggtttgttttctaaccacactccttttgtaaccacaaaggaaaaaggcagaacgttcctccgctggcgccagccaatcagcaggactcctgccttccttcggggcaaggtcgcagcatctgcctcggaaatcacgaaatcacggggcttctttctgctggctcagccgggaggcccagagtgttctgcagaggctgcgtattgaaggctgctctctgaagctccctgccccaggtcacgccgccggttccagatgaatccagagtgggggcaggccttcgtgcacgtggccgtggccggtggcctctgtgccgtggctgtgttcacgggcattttcgacagtgtttccgtgcaagtgggctatgagcactacgccgaggcgcccgtggccggcctccctgccttcctggccatgccgttcaactcactcgtgaacatggcctacacgctgctggggctgtcgtggctgcacaggggcggcgcgatggggctgggtccccgctacctgaaggacgtgttcgcagccatggccctgctctatggccccgtgcagtggctgcgcctgtggacgcagtggcgccgtgccgcggtgctggaccagtggctcacactgcccatctttgcatggcccgtggcctggtgcctctacctagaccgcggctggcggccctggctgttcctctctcttgagtgcgtctccctggccagttatggcctcgctctgctgcatccccagggcttcgaggtcgcactgggtgctcacgtggtggccgctgtggggcaggcgctgcgcacccacaggcactatggcagcaccacctcggctacctacttagctttgggggtgctctcttgcctgggctttgtggtcctcaagctgtgtgaccatcagctcgcacggtggcgtctcttccagtgcctcacaggccacttctggtccaaggtctgtgacgtgctccagttccactttgcgtttttgtttctgacgcatttcaacactcacccaagattccatccctctggcgggaagacgcgttgaacccagggaagaacctgctgaaaaccgatgacccccagcattgaaatggactctgagatggcagcgtggtgccagtgtcagacatcctgtgtgtgatgatatgcactgatcacacaagactgccctttcctgagaagctgcgggcttcggtgtggaggggtggagtgctgtgatctcgacaacttactttcaaagacataaagcacagatctccgcacaggggatgtgtgtgttcctgatgtaatttgcataacttttctgtagtttgaaatgtttccaaataaatattggcaaggggagtggaaatgacaccaagaagcccctcatgctcatggttggacagaga

SEQ ID NO: 452186 - DNA, 4094 bp, Homo sapiens
  misc_feature (3835)..(3835): n is a, c, g, or t
  misc_feature (3974)..(3974): n is a, c, g, or t
  misc_feature (4050)..(4050): n is a, c, g, or t
cctctatttcttcctttttcctttcttctgtctaaaaactctctcttgttccccttttccagcttcccttggactactgccccaatggccccttggactcgcgtttcatgtatgcgagcacacacacacacaaacttgcaaaataccgtttttcttaaggattgtgggaccgaataatatcacgtgccttcatcttttccttttatagttagatgaacctcttcctctttacaatttttttaaaaagtgataggggaggttgatgtgttagtggaagatttgggcatcgtttgagaagtaacttttgtttaacacattccccctaaacattgaacacaaacatttcaaccccttcatgacactctttggacatttaaagcattgagtaaccatgtacatgacagcctaaatccgtttgatttcagagcatttcctgaacattgtatttcatagacttctctgattttttcaaaaatgaggtgagcaatggcaagcagccttgttctcccaatttggtgcttttgcttttggtgtggggtgggcatggggggttgggggtggtgtgggtgtgtttagaaaaaagatgcattcctgaagatctctggtgctgaagggcctcgagttcctttcagagactgtatttgacacactttaggtacacacaaacgaatggtatcacatgcaatattttaatggagcaatgggagaggctctttgaaatggggtttgcatctttttgtaacattttgatttctctggtgccttattcctacttgatgctggcactcacatacccacaagaagctgacacagaagtcagccttaggcgtggggacatatgggtgatgtttgagcatgcaggggccatggggagtttggtgtcagttggtggagaagggactagatggcatctcttagccgaggccaacaggaactgcacaagtccattatagtcaaagttagcaattttgatacgtaaacacaatacttcattcttcctcatctgagctttccttccttcttccttttctatctctaccttctcataaaggtgctgctgctgctgctaaggtgcccggagtccagaatgtccattaatcactcaggcacgagcctggcactgccacgtcagcccccagcatgaccaaacccaggtttctcttgcttggggctgagaactgtcagatttttctcatcaaaaatgttttccaaggaatcagtggattacagtttttctgcattgaaaatgcactttaaaaaataaattaaagctccagactgtttaaaatatacagagggagcaggggaaagttaagcatgtgctagtgtctgaacccagttcagtttatctccagttgaaacgatatacactatattatgtataaatgtatacacacttcctatatgtatccacatatatatagtgtatatattatacatgtataggtgtgtatatgtgcatatatacacacatgcacataacaaaatcagatgctcattacaaatccagatgctcattacaaaaccagatgctacacaaacagcagcagaggaaacaaggttggactcttgcaacagatcacaaaaaataaaaacagctacttgcagtgactttggtcatttctgtatgttcataaagaatggattgtaacaaggaaaaaaaggaacagtgttagtgaaaaaggaaaaatgggcgaaaccatcttgatccgatgcgaatgcagtaatgttctatataccatttcatcagttatttcttttagtcatgttgatttgatttcagtttctggctatgaaaaacatttttaaactcgtcacccacaacaaactgaacaaaactactacagtgaaagcccttttcagtgaaagatgtcagaaacctcaaaacctttggcctgactcagaactaccatgtgaaaatcagtactctcttaatgtttgaaataaaaactgaaaaaaaaaacaaaaaaacaaaaaaccttttttgaagcaccttaacgtggccatccatttgagaagtgggtgccacttttttctttgagcaccttattgatgtgtttgctatctgctgtctttctgttacctgttggctgaatggctagctgttaacatatacatgtgcacagaagagatatctgggcatgtatgttctcaatgaagtttactgtggtgactgctgaaaggtgaacccatttcctgatttttcccgccgcagtgttgtgataagattcgaagaaacctttttccctgcacagaaatgtttcttatcacattgtatcttagtatggaaaggaatatggtcccttttttgcaattgctactgtgtacacacacacacacacacacacacacacacacacacacacactctgtatgtttagacctaaaatacacacacccacgcacacactgtatgtttatgtgacctaaaacatacacacatgcacacacacatacatatccattcattcattcattcaagtggtgtttccagtgtctgtgtgtcactgtttatgcagtttccatttcccagtgaattatgagtggagggcaacttttctaaccagattgtcttttcagaacaaagacctgggaattgaggaagagtttggaaagagggagaggcaaggaaagagagctttaaattgaaaggttaatttcctaagaggaacctgggctgaatgactacagtgttataccctccaatctttgcaggtgggcatggaacactgcttgtatcactctgtgcacggtataaatccatatatccacaaaaacacacatccatccatcaacatatacatggtttgggatgagcaggtcaatagttttgagagggagtttgttcctttttttttctcattatactcttaaattgttgtcagttatcaaacaaacaaacagaaaaattgtttggaaaaaccttgcatacgccttttctatcaagtgctttaaaatatagactaaatacacacatcctgccagttttttcttacagtgacagtatccttacctgccatttaatattagcctcgtatttttctcacgtatatttacctgtgacttgtatttgttatttaaacaggaaaaaaaacattcaaaaaaagaaaaattaactgtagcgcttcattatactattatattattattattattgtgacattttggaatactgtgaagttttatctcttgcatatactttatacggaagtattacgccttaaaaatacgaaaataaattttacaaggtttctgttttgtgtggaagagtaattgatgttgctaagaatgatgtttgtttttttggggtttttgttgttttttttttaaatgttaccagcactttttttgtaagtttcactttccgaggtattgtacaagttcacactgtttgtgaagtttgaatatgaaggaataattaaaaaaaaaactcttaaaaaaaaaaaataattacagagggggaatataataaaaaacctataacaaaaggaaaatgactaataatctcaactataacaactgcctacataggttattaccttccgggtagtcccttaacattctgaggggccacatggatgacaaacttactatccgccatgcccttcgttgacacagacctatgccaatgattttgaggatgctactaagcatacaaataaacattgtggatggcatcatagccaaagttagtctttccttgcccaacgattgagccaaagcgattttagaatcgagaaggtttatccatgatgtcgatataacagctcattaatccaattcctcctattgcaacatatatccaatttgccgttgccctggtttacacttactntaccttgaaaacctcggcgtttcccaacataataggcttggataaaacccttattttcccactcaaaattatagggaaaagcccaaaccggctagctttcctaacaaagggggcagcctaataggcaatagaactttgnagccgtattattctttgtgaaattgggcctaaatctatcttaaactagctcttttttttacccctaacttggaatnggcaagggacttgtggatcaaaagactaaccgggagggggttaa

SEQ ID NO: 452187 - DNA, 4040 bp, Homo sapiens
  misc_feature (3781)..(3781): n is a, c, g, or t
  misc_feature (3920)..(3920): n is a, c, g, or t
  misc_feature (3996)..(3996): n is a, c, g, or t
cctctatttcttcctttttcctttcttctgtctaaaaactctctcttgttccccttttccagcttcccttggactactgccccaatggccccttggactcgcgtttcatgtatgcgagcacacacacacacaaacttgcaaaataccgtttttcttaaggattgtgggaccgaataatatcacgtgccttcatcttttccttttatagttagatgaacctcttcctctttacaatttttttaaaaagtgataggggaggttgatgtgttagtggaagatttgggcatcgtttgagaagtaacttttgtttaacacattccccctaaacattgaacacaaacatttcaaccccttcatgacactctttggacatttaaagcattgagtaaccatgtacatgacagcctaaatccgtttgatttcagagcatttcctgaacattgtatttcatagacttctctgattttttcaaaaatgaggtgagcaatggcaagcagccttgttctcccaatttggtgcttttgcttttggtgtggggtgggcatggggggttgggggtggtgtgggtgtgtttagaaaaaagatgcattcctgaagatctctggtgctgaagggcctcgagttcctttcagagactgtatttgacacactttaggtacacacaaacgaatggtatcacatgcaatattttaatggagcaatgggagaggctctttgaaatggggtttgcatctttttgtaacattttgatttctctggtgccttattcctacttgatgctggcactcacatacccacaagaagctgacacagaagtcagccttaggcgtggggacatatgggtgatgtttgagcatgcaggggccatggggagtttggtgtcagttggtggagaagggactagatggcatctcttagccgaggccaacaggaactgcacaagtccattatagtcaaagttagcaattttgatacgtaaacacaatacttcattcttcctcatctgagctttccttccttcttccttttctatctctaccttctcataaaggtgctgctgctgctgctaaggtgcccggagtccagaatgtccattaatcactcaggcacgagcctggcactgccacgtcagcccccagcatgaccaaacccaggtttctcttgcttggggctgagaactgtcagatttttctcatcaaaaatgttttccaaggaatcagtggattacagtttttctgcattgaaaatgcactttaaaaaataaattaaagctccagactgttagttcagtttatctccagttgaaacgatatacactatattatgtataaatgtatacacacttcctatatgtatccacatatatatagtgtatatattatacatgtataggtgtgtatatgtgcatatatacacacatgcacataacaaaatcagatgctcattacaaatccagatgctcattacaaaaccagatgctacacaaacagcagcagaggaaacaaggttggactcttgcaacagatcacaaaaaataaaaacagctacttgcagtgactttggtcatttctgtatgttcataaagaatggattgtaacaaggaaaaaaaggaacagtgttagtgaaaaaggaaaaatgggcgaaaccatcttgatccgatgcgaatgcagtaatgttctatataccatttcatcagttatttcttttagtcatgttgatttgatttcagtttctggctatgaaaaacatttttaaactcgtcacccacaacaaactgaacaaaactactacagtgaaagcccttttcagtgaaagatgtcagaaacctcaaaacctttggcctgactcagaactaccatgtgaaaatcagtactctcttaatgtttgaaataaaaactgaaaaaaaaaacaaaaaaacaaaaaaccttttttgaagcaccttaacgtggccatccatttgagaagtgggtgccacttttttctttgagcaccttattgatgtgtttgctatctgctgtctttctgttacctgttggctgaatggctagctgttaacatatacatgtgcacagaagagatatctgggcatgtatgttctcaatgaagtttactgtggtgactgctgaaaggtgaacccatttcctgatttttcccgccgcagtgttgtgataagattcgaagaaacctttttccctgcacagaaatgtttcttatcacattgtatcttagtatggaaaggaatatggtcccttttttgcaattgctactgtgtacacacacacacacacacacacacacacacacacacacacactctgtatgtttagacctaaaatacacacacccacgcacacactgtatgtttatgtgacctaaaacatacacacatgcacacacacatacatatccattcattcattcattcaagtggtgtttccagtgtctgtgtgtcactgtttatgcagtttccatttcccagtgaattatgagtggagggcaacttttctaaccagattgtcttttcagaacaaagacctgggaattgaggaagagtttggaaagagggagaggcaaggaaagagagctttaaattgaaaggttaatttcctaagaggaacctgggctgaatgactacagtgttataccctccaatctttgcaggtgggcatggaacactgcttgtatcactctgtgcacggtataaatccatatatccacaaaaacacacatccatccatcaacatatacatggtttgggatgagcaggtcaatagttttgagagggagtttgttcctttttttttctcattatactcttaaattgttgtcagttatcaaacaaacaaacagaaaaattgtttggaaaaaccttgcatacgccttttctatcaagtgctttaaaatatagactaaatacacacatcctgccagttttttcttacagtgacagtatccttacctgccatttaatattagcctcgtatttttctcacgtatatttacctgtgacttgtatttgttatttaaacaggaaaaaaaacattcaaaaaaagaaaaattaactgtagcgcttcattatactattatattattattattattgtgacattttggaatactgtgaagttttatctcttgcatatactttatacggaagtattacgccttaaaaatacgaaaataaattttacaaggtttctgttttgtgtggaagagtaattgatgttgctaagaatgatgtttgtttttttggggtttttgttgttttttttttaaatgttaccagcactttttttgtaagtttcactttccgaggtattgtacaagttcacactgtttgtgaagtttgaatatgaaggaataattaaaaaaaaaactcttaaaaaaaaaaaataattacagagggggaatataataaaaaacctataacaaaaggaaaatgactaataatctcaactataacaactgcctacataggttattaccttccgggtagtcccttaacattctgaggggccacatggatgacaaacttactatccgccatgcccttcgttgacacagacctatgccaatgattttgaggatgctactaagcatacaaataaacattgtggatggcatcatagccaaagttagtctttccttgcccaacgattgagccaaagcgattttagaatcgagaaggtttatccatgatgtcgatataacagctcattaatccaattcctcctattgcaacatatatccaatttgccgttgccctggtttacacttactntaccttgaaaacctcggcgtttcccaacataataggcttggataaaacccttattttcccactcaaaattatagggaaaagcccaaaccggctagctttcctaacaaagggggcagcctaataggcaatagaactttgnagccgtattattctttgtgaaattgggcctaaatctatcttaaactagctcttttttttacccctaacttggaatnggcaagggacttgtggatcaaaagactaaccgggagggggttaa

SEQ ID NO: 452188 - DNA, 4040 bp, Homo sapiens
  misc_feature (3781)..(3781): n is a, c, g, or t
  misc_feature (3920)..(3920): n is a, c, g, or t
  misc_feature (3996)..(3996): n is a, c, g, or t
cctctatttcttcctttttcctttcttctgtctaaaaactctctcttgttccccttttccagcttcccttggactactgccccaatggccccttggactcgcgtttcatgtatgcgagcacacacacacacaaacttgcaaaataccgtttttcttaaggattgtgggaccgaataatatcacgtgccttcatcttttccttttatagttagatgaacctcttcctctttacaatttttttaaaaagtgataggggaggttgatgtgttagtggaagatttgggcatcgtttgagaagtaacttttgtttaacacattccccctaaacattgaacacaaacatttcaaccccttcatgacactctttggacatttaaagcattgagtaaccatgtacatgacagcctaaatccgtttgatttcagagcatttcctgaacattgtatttcatagacttctctgattttttcaaaaatgaggtgagcaatggcaagcagccttgttctcccaatttggtgcttttgcttttggtgtggggtgggcatggggggttgggggtggtgtgggtgtgtttagaaaaaagatgcattcctgaagatctctggtgctgaagggcctcgagttcctttcagagactgtatttgacacactttaggtacacacaaacgaatggtatcacatgcaatattttaatggagcaatgggagaggctctttgaaatggggtttgcatctttttgtaacattttgatttctctggtgccttattcctacttgatgctggcactcacatacccacaagaagctgacacagaagtcagccttaggcgtggggacatatgggtgatgtttgagcatgcaggggccatggggagtttggtgtcagttggtggagaagggactagatggcatctcttagccgaggccaacaggaactgcacaagtccattatagtcaaagttagcaattttgatacgtaaacacaatacttcattcttcctcatctgagctttccttccttcttccttttctatctctaccttctcataaaggtgctgctgctgctgctaaggtgcccggagtccagaatgtccattaatcactcaggcacgagcctggcactgccacgtcagcccccagcatgaccaaacccaggtttctcttgcttggggctgagaactgtcagatttttctcatcaaaaatgttttccaaggaatcagtggattacagtttttctgcattgaaaatgcactttaaaaaataaattaaagctccagactgtttaaaatatacagagggagcaggggaaagttaagcatgtgctagtgtctgaacccagttcagtttatctccagttgaaacgatatacactatattatgtataaatgtatacacacttcctatatgtatccacatatatatagtgtatatattatacatgtataggtgtgtatatgtgcatatatacacacatgcacataacaaaatcagatgctcattacaaatccagatgctcattacaaaaccagatgctacacaaacagcagcagaggaaacaaggttggactcttgcaacagatcacaaaaaataaaaacagctacttgcagtgactttggtcatttctgtatgttcataaagaatggattgtaacaaggaaaaaaaggaacagtgttagtgaaaaaggaaaaatgggcgaaaccatcttgatccgatgcgaatgcagtaatgttctatataccatttcatcagttatttcttttagtcatgttgatttgatttcagtttctggctatgaaaaacatttttaaactcgtcacccacaacaaactgaacaaaactactacagtgaaagcccttttcagtgaaagatgtcagaaacctcaaaacctttggcctgactcagaactaccatgtgaaaatcagtactctcttaatgtttgaaataaaaactgaaaaaaaaaacaaaaaaacaaaaaaccttttttgaagcaccttaacgtggccatccatttgagaagtgggtgccacttttttctttgagcaccttattgatgtgtttgctatctgctgtctttctgttacctgttggctgaatggctagctgttaacatatacatgtgcacagaagagatatctgggcatgtatgttctcaatgaagtttactgtggtgactgctgaaaggtgaacccatttcctgatttttcccgccgcagtgttgtgataagattcgaagaaacctttttccctgcacagaaatgtttcttatcacattgtatcttagtatggaaaggaatatggtcccttttttgcaattgctactgtgtacacacacacacacacacacacacacacacacacacacacactctgtatgtttagacctaaaatacacacacccacgcacacactgtatgtttatgtgacctaaaacatacacacatgcacacacacatacatatccattcattcattcattcaagtggtgtttccagtgtctgtgtgtcactgtttatgcagtttccatttcccagtgaattatgagtggagggcaacttttctaaccagattgtcttttcagaacaaagacctgggaattgaggaagagtttggaaagagggagaggcaaggaaagagagctttaaattgaaaggttaatttcctaagaggaacctgggctgaatgactacagtgttataccctccaatctttgcaggtgggcatggaacactgcttgtatcactctgtgcacggtataaatccatatatccacaaaaacacacatccatccatcaacatatacatggtttgggatgagcaggtcaatagttttgagagggagtttgttcctttttttttctcattatactcttaaattgttgtcagttatcaaacaaacaaacagaaaaattgtttggaaaaaccttgcatacgccttttctatcaagtgctttaaaatatagactaaatacacacatcctgccagttttttcttacagtgacagtatccttacctgccatttaatattagcctcgtatttttctcacgtatatttacctgtgacttgtatttgttatttaaacaggaaaaaaaacattcaaaaaaagaaaaattaactgtagcgcttcattatactattatattattattattattgtgacattttggaatactgtgaagttttatctcttgcatatactttatacggaagtattacgccttaaaaatacgaaaatgatgtttgtttttttggggtttttgttgttttttttttaaatgttaccagcactttttttgtaagtttcactttccgaggtattgtacaagttcacactgtttgtgaagtttgaatatgaaggaataattaaaaaaaaaactcttaaaaaaaaaaaataattacagagggggaatataataaaaaacctataacaaaaggaaaatgactaataatctcaactataacaactgcctacataggttattaccttccgggtagtcccttaacattctgaggggccacatggatgacaaacttactatccgccatgcccttcgttgacacagacctatgccaatgattttgaggatgctactaagcatacaaataaacattgtggatggcatcatagccaaagttagtctttccttgcccaacgattgagccaaagcgattttagaatcgagaaggtttatccatgatgtcgatataacagctcattaatccaattcctcctattgcaacatatatccaatttgccgttgccctggtttacacttactntaccttgaaaacctcggcgtttcccaacataataggcttggataaaacccttattttcccactcaaaattatagggaaaagcccaaaccggctagctttcctaacaaagggggcagcctaataggcaatagaactttgnagccgtattattctttgtgaaattgggcctaaatctatcttaaactagctcttttttttacccctaacttggaatnggcaagggacttgtggatcaaaagactaaccgggagggggttaa

SEQ ID NO: 452189 - DNA, 1450 bp, Homo sapiens
cgctcacttctgcttgcacttaggcgacctcgggagctcggactcctacgcagtcaccgggaagggccgccgccccgcccgcggctgctggcccgggtgacacttccgcctgctataagagcagcggccctcggtgcctccttcctgacctcgcacccagctcggagcccggagcgtgcctcggcggcctgtcggttttcaccatggagcagctgagctcagcaaacacccgcttcgccttggacctgttcctggcgttgagtgagaacaatccggctggaaacatcttcatctctcccttcagcatttcatctgctatggccatggtttttctggggaccagaggtaacacggcagcacagctgtccaagactttccatttcaacacggttgaagaggttcattcaagattccagagtctgaatgctgatatcaacaaacgtggagcgtcttatattctgaaacttgctaatagattatatggagagaaaacttacaatttccttcctgagttcttggtttcgactcagaaaacatatggtgctgacctggccagtgtggattttcagcatgcctctgaagatgcaaggaagaccataaaccagtgggtcaaaggacagacagaaggaaaaattccggaactgttggcttcgggcatggttgataacatgaccaaacttgtgctagtaaatgccatctatttcaagggaaactggaaggataaattcatgaaagaagccacgacgaatgcaccattcagattgaataagaaagacagaaaaactgtgaaaatgatgtatcagaagaaaaaatttgcatatggctacatcgaggaccttaagtgccgtgtgctggaactgccttaccaaggcgaggagctcagcatggtcatcctgctgccggatgacattgaggacgagtccacgggcctgaagaagattgaggaacagttgactttggaaaagttgcatgagtggactaaacctgagaatctcgatttcattgaagttaatgtcagcttgcccaggttcaaactggaagagagttacactctcaactccgacctcgcccgcctaggtgtgcaggatctctttaacagtagcaaggctgatctgtctggcatgtcaggagccagagatatttttatatcaaaaattgtccacaagtcatttgtggaagtgaatgaagagggaacagaggcggcagctgccacagcaggcatcgcaactttctgcatgttgatgcccgaagaaaatttcactgccgaccatccattccttttctttattcggcataattcctcaggtagcatcctattcttggggagattttcttccccttagaagaaagagactgtagcaatacaaaaatcaagcttagtgctttattacctgagtttttaatagagccaatatgtcttatatctttaccaataaaaccactgtccaga

SEQ ID NO: 452190 - DNA, 511 bp, Homo sapiens
gtagaaagaagattttctttattttagactttccatttcaacacggttgaagaggttcattcaagattccagagtctgaatgctgatatcaacaaacgtggagcgtcttatattctgaaacttgctaatagattatatggagagaaaacttacaatttccttcctgtaagtactttgcccttcacattctaaaaccccactagacagtgcagatattttccagcacaatcaagtcatggaggtcagttttaatatttgtaaactttcagaaaaacaatacagaaggcaaacatggcaaaaacaatatggaaggcaaacacgacagaatgcaaactttaattgacatggtgattttgtgttacagtctttttagtgaaaagatagctcttggaggttttactgaagcaagagtacaatcagtgtttgtgaaatcttagtcaaagttcagaaaagagtggtaatttctatataacaacaacagtataagggttaggcttaccactactggaat

SEQ ID NO: 452191 - DNA, 469 bp, Homo sapiens
gcgaattcactagtgattgagtacctggttctcgtgtggaataaaaaagcggggagaaagtacaagatccaggatgcctcagggcggttggcagaaattgaggaagcttctggagaaatagtgctgcctaatctgctggcgtgggcagtgggcaccatgaggaccctgttctgtgttgcagttttcaccatggagcagctgagctcagcaaacacccgcttcgccttggacctgttcctggcgttgagtgagaacaatccggctggaaacatcttcatctctcccttcagcatttcatctgctatggccatggtttttctggggaccagaggtaacacggcagcacagctgtccaaggtcagcagaaacaaaaaaaagggtctgctttcctcccatctccctacgaatggacagtctgcatggaaaggttgtgcctttgagctcttaccttgtgttttcagaactgtat

SEQ ID NO: 452192 - DNA, 502 bp, Homo sapiens
cgctcacttctgcttgcacttaggcgacctcgggagctcggactcctacgcagtcaccgggaagggccgccgccccgcccgcggctgctggcccgggtgacacttccgcctgctataagagcagcggccctcggtgcctccttcctgacctcgcacccagctcggagcccggagcgtgcctcggcggcctgtcgggtaaggccgggcctcggagcggtggcgcgggggcgggcgcggggagaggccaggctccctcgctcagcttccagcccggcaccccccaccccccaggctcaggcccctcagacccgcagctccctgcgctcgccctccccgccagcttcgcgcccccatcccttccgggcgccccgacggagacagacgacctctgatcccccgcccccgcctgggtacaggccgggccagcccgcgagggagggagggagggaggacgacagatgcaggcggaaggcaagactgaaacctgagatcagaatgttgt

SEQ ID NO: 452193 - DNA, 2052 bp, Homo sapiens
cgctcacttctgcttgcacttaggcgacctcgggagctcggactcctacgcagtcaccgggaagggccgccgccccgcccgcggctgctggcccgggtgacacttccgcctgctataagagcagcggccctcggtgcctccttcctgacctcgcacccagctcggagcccggagcgtgcctcggcggcctgtcggttttcaccatggagcagctgagctcagcaaacacccgcttcgccttggacctgttcctggcgttgagtgagaacaatccggctggaaacatcttcatctctcccttcagcatttcatctgctatggccatggtttttctggggaccagaggtaacacggcagcacagctgtccaagactttccatttcaacacggttgaagaggttcattcaagattccagagtctgaatgctgatatcaacaaacgtggagcgtcttatattctgaaacttgctaatagattatatggagagaaaacttacaatttccttcctgagttcttggtttcgactcagaaaacatatggtgctgacctggccagtgtggattttcagcatgcctctgaagatgcaaggaagaccataaaccagtgggtcaaaggacagacagaaggaaaaattccggaactgttggcttcgggcatggttgataacatgaccaaacttgtgctagtaaatgccatctatttcaagggaaactggaaggataaattcatgaaagaagccacgacgaatgcaccattcagattgaataagaaagacagaaaaactgtgaaaatgatgtatcagaagaaaaaatttgcatatggctacatcgaggaccttaagtgccgtgtgctggaactgccttaccaaggcgaggagctcagcatggtcatcctgctgccggatgacattgaggacgagtccacgggcctgaagaagattgaggaacagttgactttggaaaagttgcatgagtggactaaacctgagaatctcgatttcattgaagttaatgtcagcttgcccaggttcaaactggaagagagttacactctcaactccgacctcgcccgcctaggtgtgcaggatctctttaacagtagcaaggctgatctgtctggcatgtcaggagccagagatatttttatatcaaaaattgtccacaagtcatttgtggaagtgaatgaagagggaacagaggcggcagctgccacagcaggcatcgcaactttctgcatgttgatgcccgaagaaaatttcactgccgaccatccattccttttctttattcggcataattcctcaggtagcatcctattcttggggagattttcttccccttagaagaaagagactgtagcaatacaaaaatcaagcttagtgctttattacctgagtttttaatagagccaatatgtcttatatctttaccaataaaaccactgtccagaaacaagtctttcattttctttgtaagtttggctctgttggctgtttacacccatgaattttggcatgggtatctatttttcttttttacattgaaaaaaatccagtggttgcttttgaatgcatcaagtaaagaagaagaaaagaatacatccgatgcgtagattcttgaccatgtagtaatctataaaattgctatatcctcctgatagccatgggaaaacatgataagatggtcatttattttgcagttagaattttggaagccacaaaatagacagacaccctgactgttgaagggaggtttaaaaacagatattcaattgaaatgtaagagagcaccccaattgagagcccaggttacgaagacaagcttgcctcgcctgacttttctgtcccttgttctgcaggattagtattctgttacagacctctagtttttagactcttcaattaaagggccaatggttataacctgcattcccttgtttgttcttctttatgtataatatatagttcatgtggcgctgcatgaaatcaagaagtgggtgtcttaggataaaagataccaagagtctacaaaaataaccatgtagtaagataa

SEQ ID NO: 452194 - DNA, 1996 bp, Homo sapiens
cgctcacttctgcttgcacttaggcgacctcgggagctcggactcctacgcagtcaccgggaagggccgccgccccgcccgcggctgctggcccgggtgacacttccgcctgctataagagcagcggccctcggtgcctccttcctgacctcgcacccagctcggagcccggagcgtgcctcggcggcctgtcggttttcaccatggagcagctgagctcagcaaacacccgcttcgccttggacctgttcctggcgttgagtgagaacaatccggctggaaacatcttcatctctcccttcagcatttcatctgctatggccatggtttttctggggaccagaggtaacacggcagcacagctgtccaagactttccatttcaacacggttgaagaggttcattcaagattccagagtctgaatgctgatatcaacaaacgtggagcgtcttatattctgaaacttgctaatagattatatggagagaaaacttacaatttccttcctgagttcttggtttcgactcagaaaacatatggtgctgacctggccagtgtggattttcagcatgcctctgaagatgcaaggaagaccataaaccagtgggtcaaaggacagacagaaggaaaaattccggaactgttggcttcgggcatggttgataacatgaccaaacttgtgctagtaaatgccatctatttcaagggaaactggaaggataaattcatgaaagaagccacgacgaatgcaccattcagattgaataagaaagacagaaaaactgtgaaaatgatgtatcagaagaaaaaatttgcatatggctacatcgaggaccttaagtgccgtgtgctggaactgccttaccaaggcgaggagctcagcatggtcatcctgctgccggatgacattgaggacgagtccacgggcctgaagaagattgaggaacagttgactttggaaaagttgcatgagtggactaaacctgagaatctcgatttcattgaagttaatgtcagcttgcccaggttcaaactggaagagagttacactctcaactccgacctcgcccgcctaggtgtgcaggatctctttaacagtagcaaggctgatctgtctggcatgtcaggagccagagatatttttatatcaaaaattgtccacaagtcatttgtggaagtgaatgaagagggaacagaggcggcagctgccacagcaggcatcgcaactttctgcatgttgatgcccgaagaaaatttcactgccgaccatccattccttttctttattcggcataattcctcaggtagcatcctattcttggggagattttcttccccttagaagaaagagactgtagcaatacaaaaatcaagcttagtgctttattacctgagtttttaatagagccaatatgtcttatatctttaccaataaaaccactgtccagaaacaagtctttcattttctttgtaagtttggctctgttggctgtttacacccatgaattttggcatgggtatctatttttcttttttacattgaaaaaaatccagtggttgcttttgaatgcatcaagtaaagaagaagaaaagaatacatccgatgcgtagattcttgaccatgtagtaatctataaaattgctatatcctcctgatagccatgggaaaacatgataagatggtcatttattttgcagttagaattttggaagccacaaaatagacagacaccctgactgttgaagggaggttacgaagacaagcttgcctcgcctgacttttctgtcccttgttctgcaggattagtattctgttacagacctctagtttttagactcttcaattaaagggccaatggttataacctgcattcccttgtttgttcttctttatgtataatatatagttcatgtggcgctgcatgaaatcaagaagtgggtgtcttaggataaaagataccaagagtctacaaaaataaccatgtagtaagataa

SEQ ID NO: 452195 - DNA, 2807 bp, Homo sapiens
cgctcacttctgcttgcacttaggcgacctcgggagctcggactcctacgcagtcaccgggaagggccgccgccccgcccgcggctgctggcccgggtgacacttccgcctgctataagagcagcggccctcggtgcctccttcctgacctcgcacccagctcggagcccggagcgtgcctcggcggcctgtcggagctgtttgtgacggtttccaggcagcccagggccaggccgcggctcctatctgcagctgcagggagagagaggaggaaccccgtgcgattctagagacgatttcacaacaaggagaaatcagctttgtgcttacatgccgagcagccagcacagttcttctttgcctgtcctcgggggaaatcagggctctgagagtggagatcgagatgggctagtgggtggcggatgggacgctgcacggccagaccctggactgtggtgggtttccaaactggcacatcctacaccggctctgagactgtgggcactggacctcataccttttgaacctcaaaaataaggaagaattatattattataataattacagtgatacctttgctggagttttaatgcatagtaggtagctgagtctctgatagaaggctcttagttcaggtgaaggtaggcaatggattcattgcccaatgaatcagagacttgaatcaaaggctcagaagcacgtgcgctcccacacataggttgggaagacccagggctgggtgggccctcccaccccactaaagctggggtagctggggcctgccttacccccgccccacccccagactcacctgtctgcaaggtcagagccctttagggcaccctgggtgccctaaaatcccctataactgctgagtccttggccagagtggtcccacatttgtgggcctgggaaagtgttcttgccctgctggaataaaaaagcggggagaaagtacaagatccaggatgcctcagggcggttggcagaaattgaggaagcttctggagaaatagtgctgcctaatctgctggcgtgggcagtgggcaccatgaggaccctgttctgtgttgcagttttcaccatggagcagctgagctcagcaaacacccgcttcgccttggacctgttcctggcgttgagtgagaacaatccggctggaaacatcttcatctctcccttcagcatttcatctgctatggccatggtttttctggggaccagaggtaacacggcagcacagctgtccaagactttccatttcaacacggttgaagaggttcattcaagattccagagtctgaatgctgatatcaacaaacgtggagcgtcttatattctgaaacttgctaatagattatatggagagaaaacttacaatttccttcctgagttcttggtttcgactcagaaaacatatggtgctgacctggccagtgtggattttcagcatgcctctgaagatgcaaggaagaccataaaccagtgggtcaaaggacagacagaaggaaaaattccggaactgttggcttcgggcatggttgataacatgaccaaacttgtgctagtaaatgccatctatttcaagggaaactggaaggataaattcatgaaagaagccacgacgaatgcaccattcagattgaataagaaagacagaaaaactgtgaaaatgatgtatcagaagaaaaaatttgcatatggctacatcgaggaccttaagtgccgtgtgctggaactgccttaccaaggcgaggagctcagcatggtcatcctgctgccggatgacattgaggacgagtccacgggcctgaagaagattgaggaacagttgactttggaaaagttgcatgagtggactaaacctgagaatctcgatttcattgaagttaatgtcagcttgcccaggttcaaactggaagagagttacactctcaactccgacctcgcccgcctaggtgtgcaggatctctttaacagtagcaaggctgatctgtctggcatgtcaggagccagagatatttttatatcaaaaattgtccacaagtcatttgtggaagtgaatgaagagggaacagaggcggcagctgccacagcaggcatcgcaactttctgcatgttgatgcccgaagaaaatttcactgccgaccatccattccttttctttattcggcataattcctcaggtagcatcctattcttggggagattttcttccccttagaagaaagagactgtagcaatacaaaaatcaagcttagtgctttattacctgagtttttaatagagccaatatgtcttatatctttaccaataaaaccactgtccagaaacaagtctttcattttctttgtaagtttggctctgttggctgtttacacccatgaattttggcatgggtatctatttttcttttttacattgaaaaaaatccagtggttgcttttgaatgcatcaagtaaagaagaagaaaagaatacatccgatgcgtagattcttgaccatgtagtaatctataaaattgctatatcctcctgatagccatgggaaaacatgataagatggtcatttattttgcagttagaattttggaagccacaaaatagacagacaccctgactgttgaagggaggtttaaaaacagatattcaattgaaatgtaagagagcaccccaattgagagcccaggttacgaagacaagcttgcctcgcctgacttttctgtcccttgttctgcaggattagtattctgttacagacctctagtttttagactcttcaattaaagggccaatggttataacctg

SEQ ID NO: 452196 - DNA, 2298 bp, Homo sapiens
cgtcatagccgtttcctgaggataaacagcgggcagtgtaccacgctaataattacagtgatacctttgctggagttttaatgcatagtaggtagctgagtctctgatagaaggctcttagttcaggtgaaggtaggcaatggattcattgcccaatgaatcagagacttgaatcaaaggctcagaagcacgtgcgctcccacacataggttgggaagacccagggctgggtgggccctcccaccccactaaagctggggtagctggggcctgccttacccccgccccacccccagactcacctgtctgcaaggtcagagccctttagggcaccctgggtgccctaaaatcccctataactgctgagtccttggccagagtggtcccacatttgtgggcctgggaaagtgttcttgccctgctggaataaaaaagcggggagaaagtacaagatccaggatgcctcagggcggttggcagaaattgaggaagcttctggagaaatagtgctgcctaatctgctggcgtgggcagtgggcaccatgaggaccctgttctgtgttgcagttttcaccatggagcagctgagctcagcaaacacccgcttcgccttggacctgttcctggcgttgagtgagaacaatccggctggaaacatcttcatctctcccttcagcatttcatctgctatggccatggtttttctggggaccagaggtaacacggcagcacagctgtccaagactttccatttcaacacggttgaagaggttcattcaagattccagagtctgaatgctgatatcaacaaacgtggagcgtcttatattctgaaacttgctaatagattatatggagagaaaacttacaatttccttcctgagttcttggtttcgactcagaaaacatatggtgctgacctggccagtgtggattttcagcatgcctctgaagatgcaaggaagaccataaaccagtgggtcaaaggacagacagaaggaaaaattccggaactgttggcttcgggcatggttgataacatgaccaaacttgtgctagtaaatgccatctatttcaagggaaactggaaggataaattcatgaaagaagccacgacgaatgcaccattcagattgaataagaaagacagaaaaactgtgaaaatgatgtatcagaagaaaaaatttgcatatggctacatcgaggaccttaagtgccgtgtgctggaactgccttaccaaggcgaggagctcagcatggtcatcctgctgccggatgacattgaggacgagtccacgggcctgaagaagattgaggaacagttgactttggaaaagttgcatgagtggactaaacctgagaatctcgatttcattgaagttaatgtcagcttgcccaggttcaaactggaagagagttacactctcaactccgacctcgcccgcctaggtgtgcaggatctctttaacagtagcaaggctgatctgtctggcatgtcaggagccagagatatttttatatcaaaaattgtccacaagtcatttgtggaagtgaatgaagagggaacagaggcggcagctgccacagcaggcatcgcaactttctgcatgttgatgcccgaagaaaatttcactgccgaccatccattccttttctttattcggcataattcctcaggtagcatcctattcttggggagattttcttccccttagaagaaagagactgtagcaatacaaaaatcaagcttagtgctttattacctgagtttttaatagagccaatatgtcttatatctttaccaataaaaccactgtccagaaacaagtctttcattttctttgtaagtttggctctgttggctgtttacacccatgaattttggcatgggtatctatttttcttttttacattgaaaaaaatccagtggttgcttttgaatgcatcaagtaaagaagaagaaaagaatacatccgatgcgtagattcttgaccatgtagtaatctataaaattgctatatcctcctgatagccatgggaaaacatgataagatggtcatttattttgcagttagaattttggaagccacaaaatagacagacaccctgactgttgaagggaggtttaaaaacagatattcaattgaaatgtaagagagcaccccaattgagagcccaggttacgaagacaagcttgcctcgcctgacttttctgtcccttgttctgcaggattagtattctgttacagacctctagtttttagactcttcaattaaagggccaatggttataacctg

SEQ ID NO: 452197 - DNA, 1817 bp, Homo sapiens
cgctcacttctgcttgcacttaggcgacctcgggagctcggactcctacgcagtcaccgggaagggccgccgccccgcccgcggctgctggcccgggtgacacttccgcctgctataagagcagcggccctcggtgcctccttcctgacctcgcacccagctcggagcccggagcgtgcctcggcggcctgtcggcatttcatctgctatggccatggtttttctggggaccagaggtaacacggcagcacagctgtccaagactttccatttcaacacggttgaagaggttcattcaagattccagagtctgaatgctgatatcaacaaacgtggagcgtcttatattctgaaacttgctaatagattatatggagagaaaacttacaatttccttcctgagttcttggtttcgactcagaaaacatatggtgctgacctggccagtgtggattttcagcatgcctctgaagatgcaaggaagaccataaaccagtgggtcaaaggacagacagaaggaaaaattccggaactgttggcttcgggcatggttgataacatgaccaaacttgtgctagtaaatgccatctatttcaagggaaactggaaggataaattcatgaaagaagccacgacgaatgcaccattcagattgaataagaaagacagaaaaactgtgaaaatgatgtatcagaagaaaaaatttgcatatggctacatcgaggaccttaagtgccgtgtgctggaactgccttaccaaggcgaggagctcagcatggtcatcctgctgccggatgacattgaggacgagtccacgggcctgaagaagattgaggaacagttgactttggaaaagttgcatgagtggactaaacctgagaatctcgatttcattgaagttaatgtcagcttgcccaggttcaaactggaagagagttacactctcaactccgacctcgcccgcctaggtgtgcaggatctctttaacagtagcaaggctgatctgtctggcatgtcaggagccagagatatttttatatcaaaaattgtccacaagtcatttgtggaagtgaatgaagagggaacagaggcggcagctgccacagcaggcatcgcaactttctgcatgttgatgcccgaagaaaatttcactgccgaccatccattccttttctttattcggcataattcctcaggtagcatcctattcttggggagattttcttccccttagaagaaagagactgtagcaatacaaaaatcaagcttagtgctttattacctgagtttttaatagagccaatatgtcttatatctttaccaataaaaccactgtccagaaacaagtctttcattttctttgtaagtttggctctgttggctgtttacacccatgaattttggcatgggtatctatttttcttttttacattgaaaaaaatccagtggttgcttttgaatgcatcaagtaaagaagaagaaaagaatacatccgatgcgtagattcttgaccatgtagtaatctataaaattgctatatcctcctgatagccatgggaaaacatgataagatggtcatttattttgcagttagaattttggaagccacaaaatagacagacaccctgactgttgaagggaggtttaaaaacagatattcaattgaaatgtaagagagcaccccaattgagagcccaggttacgaagacaagcttgcctcgcctgacttttctgtcccttgttctgcaggattagtattctgttacagacctctagtttttagactcttcaattaaagggccaatggttataacctg

SEQ ID NO: 452198 - DNA, 1996 bp, Homo sapiens
cgctcacttctgcttgcacttaggcgacctcgggagctcggactcctacgcagtcaccgggaagggccgccgccccgcccgcggctgctggcccgggtgacacttccgcctgctataagagcagcggccctcggtgcctccttcctgacctcgcacccagctcggagcccggagcgtgcctcggcggcctgtcggttttcaccatggagcagctgagctcagcaaacacccgcttcgccttggacctgttcctggcgttgagtgagaacaatccggctggaaacatcttcatctctcccttcagcatttcatctgctatggccatggtttttctggggaccagaggtaacacggcagcacagctgtccaaggtcagcagaaacaaaaaaaagggtctgctttcctcccatctccctacgaatggacagtctgcatggaaagactttccatttcaacacggttgaagaggttcattcaagattccagagtctgaatgctgatatcaacaaacgtggagcgtcttatattctgaaacttgctaatagattatatggagagaaaacttacaatttccttcctgagttcttggtttcgactcagaaaacatatggtgctgacctggccagtgtggattttcagcatgcctctgaagatgcaaggaagaccataaaccagtgggtcaaaggacagacagaaggaaaaattccggaactgttggcttcgggcatggttgataacatgaccaaacttgtgctagtaaatgccatctatttcaagggaaactggaaggataaattcatgaaagaagccacgacgaatgcaccattcagattgaataagaaagacagaaaaactgtgaaaatgatgtatcagaagaaaaaatttgcatatggctacatcgaggaccttaagtgccgtgtgctggaactgccttaccaaggcgaggagctcagcatggtcatcctgctgccggatgacattgaggacgagtccacgggcctgaagaagattgaggaacagttgactttggaaaagttgcatgagtggactaaacctgagaatctcgatttcattgaagttaatgtcagcttgcccaggttcaaactggaagagagttacactctcaactccgacctcgcccgcctaggtgtgcaggatctctttaacagtagcaaggctgatctgtctggcatgtcaggagccagagatatttttatatcaaaaattgtccacaagtcatttgtggaagtgaatgaagagggaacagaggcggcagctgccacagcaggcatcgcaactttctgcatgttgatgcccgaagaaaatttcactgccgaccatccattccttttctttattcggcataattcctcaggtagcatcctattcttggggagattttcttccccttagaagaaagagactgtagcaatacaaaaatcaagcttagtgctttattacctgagtttttaatagagccaatatgtcttatatctttaccaataaaaccactgtccagaaacaagtctttcattttctttgtaagtttggctctgttggctgtttacacccatgaattttggcatgggtatctatttttcttttttacattgaaaaaaatccagtggttgcttttgaatgcatcaagtaaagaagaagaaaagaatacatccgatgcgtagattcttgaccatgtagtaatctataaaattgctatatcctcctgatagccatgggaaaacatgataagatggtcatttattttgcagttagaattttggaagccacaaaatagacagacaccctgactgttgaagggaggtttaaaaacagatattcaattgaaatgtaagagagcaccccaattgagagcccaggttacgaagacaagcttgcctcgcctgacttttctgtcccttgttctgcaggattagtattctgttacagacctctagtttttagactcttcaattaaagggccaatggttataacctg

SEQ ID NO: 452199 - DNA, 1342 bp, Homo sapiens
  misc_feature (24)..(24): n is a, c, g, or t
aattcgcggccgcgtcgacacggntgcgagaagacgacagaaggaaaaattccggaactgttggcttcgggcatggttgataacatgaccaaacttgtgctagtaaatgccatctatttcaagggaaactggaaggataaattcatgaaagaagccacgacgaatgcaccattcagattgaataagaaagacagaaaaactgtgaaaatgatgtatcagaagaaaaaatttgcatatggctacatcgaggaccttaagtgccgtgtgctggaactgccttaccaaggcgaggagctcagcatggtcatcctgctgccggatgacattgaggacgagtccacgggcctgaagaagattgaggaacagttgactttggaaaagttgcatgagtggactaaacctgagaatctcgatttcattgaagttaatgtcagcttgcccaggttcaaactggaagagagttacactctcaactccgacctcgcccgcctaggtgtgcaggatctctttaacagtagcaaggctgatctgtctggcatgtcaggagccagagatatttttatatcaaaaattgtccacaagtcatttgtggaagtgaatgaagagggaacagaggcggcagctgccacagcaggcatcgcaactttctgcatgttgatgcccgaagaaaatttcactgccgaccatccattccttttctttattcggcataattcctcaggtagcatcctattcttggggagattttcttccccttagaagaaagagactgtagcaatacaaaaatcaagcttagtgctttattacctgagtttttaatagagccaatatgtcttatatctttaccaataaaaccactgtccagaaacaagtctttcattttctttgtaagtttggctctgttggctgtttacacccatgaattttggcatgggtatctatttttcttttttacattgaaaaaaatccagtggttgcttttgaatgcatcaagtaaagaagaagaaaagaatacatccgatgcgtagattcttgaccatgtagtaatctataaaattgctatatcctcctgatagccatgggaaaacatgataagatggtcatttattttgcagttagaattttggaagccacaaaatagacagacaccctgactgttgaagggaggtttaaaaacagatattcaattgaaatgtaagagagcaccccaattgagagcccaggttacgaagacaagcttgcctcgcctgacttttctgtcccttgttctgcaggattagtattctgttacagacctctagtttttagactcttcaattaaagggccaatggttataacctg

SEQ ID NO: 452200 - DNA, 1445 bp, Homo sapiens
cgctcacttctgcttgcacttaggcgacctcgggagctcggactcctacgcagtcaccgggaagggccgccgccccgcccgcggctgctggcccgggtgacacttccgcctgctataagagcagcggccctcggtgcctccttcctgacctcgcacccagctcggagcccggagcgtgcctcggcggcctgtcggttttcaccatggagcagctgagctcagcaaacacccgcttcgccttggacctgttcctggcgttgagtgagaacaatccggctggaaacatcttcatctctcccttcagcatttcatctgctatggccatggtttttctggggaccagaggtaacacggcagcacagctgtccaagactttccatttcaacacggttgaagaggttcattcaagattccagagtctgaatgctgatatcaacaaacgtggagcgtcttatattctgaaacttgctaatagattatatggagagaaaacttacaatttccttcctgagttcttggtttcgactcagaaaacatatggtgctgacctggccagtgtggattttcagcatgcctctgaagatgcaaggaagaccataaaccagtgggtcaaaggacagacagaaggaaaaattccggaactgttggcttcgggcatggttgataacatgaccaaacttgtgctagtaaatgccatctatttcaagggaaactggaaggataaattcatgaaagaagccacgacgaatgcaccattcagattgaataagaaaatttcactgccgaccatccattccttttctttattcggcataattcctcaggtagcatcctattcttggggagattttcttccccttagaagaaagagactgtagcaatacaaaaatcaagcttagtgctttattacctgagtttttaatagagccaatatgtcttatatctttaccaataaaaccactgtccagaaacaagtctttcattttctttgtaagtttggctctgttggctgtttacacccatgaattttggcatgggtatctatttttcttttttacattgaaaaaaatccagtggttgcttttgaatgcatcaagtaaagaagaagaaaagaatacatccgatgcgtagattcttgaccatgtagtaatctataaaattgctatatcctcctgatagccatgggaaaacatgataagatggtcatttattttgcagttagaattttggaagccacaaaatagacagacaccctgactgttgaagggaggtttaaaaacagatattcaattgaaatgtaagagagcaccccaattgagagcccaggttacgaagacaagcttgcctcgcctgacttttctgtcccttgttctgcaggattagtattctgttacagacctctagtttttagactcttcaattaaagggccaatggttataacctg

SEQ ID NO: 452201 - DNA, 826 bp, Homo sapiens
cgctcacttctgcttgcacttaggcgacctcgggagctcggactcctacgcagtcaccgggaagggccgccgccccgcccgcggctgctggcccgggtgacacttccgcctgctataagagcagcggccctcggtgcctccttcctgacctcgcacccagctcggagcccggagcgtgcctcggcggcctgtcggttttcaccatggagcagctgagctcagcaaacacccgcttcgccttggacctgttcctggcgttgagtgagaacaatccggctggaaacatcttcatctctcccttcagcatttcatctgctatggccatggtttttctggggaccagaggtaacacggcagcacagctgtccaagactttccatttcaacacggttgaagaggttcattcaagattccagagtctgaatgctgatatcaacaaacgtggagcgtcttatattctgaaacttgctaatagattatatggagagaaaacttacaatttccttcctgagttcttggtttcgactcagaaaacatatggtgctgacctggccagtgtggattttcagcatgcctctgaagatgcaaggaagaccataaaccagtgggtcaaaggacagacagaaggaaaaattccggaactgttggcttcgggcatggttgataacatgaccaaacttgtgctagtaaatgccatctatttcaagggaaactggaaggataaattcatgaaagaagccacgacgaatgcaccattcagattgaataagtctgatttgattactaatgacagacaggactctaagggccccttcctcctgcaact

SEQ ID NO: 452202 - DNA, 659 bp, Homo sapiens
tctgctcagaggatactagagcgtggataattcctcaggtagcatcctattcttggggagattttcttccccttagaagaaagagactgtagcaatacaaaaatcaagcttagtgctttattacctgagtttttaatagagccaatatgtcttatatctttaccaataaaaccactgtccagaaacaagtctttcattttctttgtaagtttggctctgttggctgtttacacccatgaattttggcatgggtatctatttttcttttttacattgaaaaaaatccagtggttgcttttgaatgcatcaagtaaagaagaagaaaagaatacatccgatgcgtagattcttgaccatgtagtaatctataaaattgctatatcctcctgatagccatgggaaaacatgataagatggtcatttattttgcagttagaattttggaagccacaaaatagacagacaccctgactgttgaagggaggtttaaaaacagatattcaattgaaatgtaagagagcaccccaattgagagcccaggttacgaagacaagcttgcctcgcctgacttttctgtcccttgttctgcaggattagtattctgttacagacctctagtttttagactcttcaattaaagggccaatggttataacctg

SEQ ID NO: 452203 - DNA, 1302 bp, Homo sapiens
cgctcacttctgcttgcacttaggcgacctcgggagctcggactcctacgcagtcaccgggaagggccgccgccccgcccgcggctgctggcccgggtgacacttccgcctgctataagagcagcggccctcggtgcctccttcctgacctcgcacccagctcggagcccggagcgtgcctcggcggcctgtcggagctgtttgtgacggtttccaggcagcccagggccaggccgcggctcctatctgcagctgcagggagagagaggaggaaccccgtgcgattctagagacgatttcacaacaaggagaaatcagctttgtgcttacatgccgagcagccagcacagttcttctttgcctgtcctcgggggaaatcagggctctgagagtggagatcgagatgggctagtgggtggcggatgggacgctgcacggccagaccctggactgtggtgggtttccaaactggcacatcctacaccggctctgagactgtgggcactggacctcataccttttgaacctcaaaaataaggaagaattatattattataataattacagtgatacctttgctggagttttaatgcatagtaggtagctgagtctctgatagaaggctcttagttcaggtgaaggtaggcaatggattcattgcccaatgaatcagagacttgaatcaaaggctcagaagcacgtgcgctcccacacataggttgggaagacccagggctgggtgggccctcccaccccactaaagctggggtagctggggcctgccttacccccgccccacccccagactcacctgtctgcaaggtcagagccctttagggcaccctgggtgccctaaaatcccctataactgctgagtccttggccagagtggtcccacatttgtgggcctgggaaagtgttcttgccctgctggaataaaaaagcggggagaaagtacaagatccaggatgcctcagggcggttggcagaaattgaggaagcttctggagaaatagtgctgcctaatctgctggcgtgggcagtgggcaccatgaggaccctgttctgtgttgcagttttcaccatggagcagctgagctcagcaaacacccgcttcgccttggacctgttcctggcgttgagtgagaacaatccggcttccatccgcaccacacctcacacacacagtgtaaaaaatgccatcagccttttatccttcatactcagattagatcttgccatttctttctgttcccatacaggctttcttcctttactgctcgtcgagtcaacgcagctggg

SEQ ID NO: 452204 - DNA, 463 bp, Homo sapiens
gctactactactaaattcccccccgtcgacgcttgcccaggttcaaactggaagagagttacactctcaactccgacctcgcccgcctaggtgtgcaggatctctttaacagtagcaaggctgatctgtctggcatgtcaggagccagagatatttttatatcaaaaattgtccacaagtcatttgtggaagtgaatgaagagggaacagaggcggcagctgccacagcaggcatcgcaactttctgcatgttgatgcccgaagaaaatttcactgccgaccatccattccttttctttattcggcataattcctcaggtagcatcctattcttggggagattttcttccccttagaagaaagagactgtagcaatacaaaaatcaagcttagtgctttattacctgagtttttaatagagccaatatgtcttatatctttaccaataaaaccactgtccaga

SEQ ID NO: 452205 - DNA, 1926 bp, Homo sapiens
cgctcacttctgcttgcacttaggcgacctcgggagctcggactcctacgcagtcaccgggaagggccgccgccccgcccgcggctgctggcccgggtgacacttccgcctgctataagagcagcggccctcggtgcctccttcctgacctcgcacccagctcggagcccggagcgtgcctcggcggcctgtcggttttcaccatggagcagctgagctcagcaaacacccgcttcgccttggacctgttcctggcgttgagtgagaacaatccggctggaaacatcttcatctctcccttcagcatttcatctgctatggccatggtttttctggggaccagaggtaacacggcagcacagctgtccaagactttccatttcaacacggttgaagaggttcattcaagattccagagtctgaatgctgatatcaacaaacgtggagcgtcttatattctgaaacttgctaatagattatatggagagaaaacttacaatttccttcctgagttcttggtttcgactcagaaaacatatggtgctgacctggccagtgtggattttcagcatgcctctgaagatgcaaggaagaccataaaccagtgggtcaaaggacagacagaaggaaaaattccggaactgttggcttcgggcatggttgataacatgaccaaacttgtgctagtaaatgccatctatttcaagggaaactggaaggataaattcatgaaagaagccacgacgaatgcaccattcagattgaataagaaagacagaaaaactgtgaaaatgatgtatcagaagaaaaaatttgcatatggctacatcgaggaccttaagtgccgtgtgctggaactgccttaccaaggcgaggagctcagcatggtcatcctgctgccggatgacattgaggacgagtccacgggcctgaagaagattgaggaacagttgactttggaaaagttgcatgagtggactaaacctgagaatctcgatttcattgaagttaatgtcagcttgcccaggttcaaactggaagagagttacactctcaactccgacctcgcccgcctaggtgtgcaggatctctttaacagtagcaaggctgatctgtctggcatgtcaggagccagagatatttttatatcaaaaattgtccacaagtcatttgtggaagtgaatgaagagggaacagaggcggcagctgccacagcaggcatcgcaactttctgcatgttgatgcccgaagaaaatttcactgccgaccatccattccttttctttattcggcataattcctcaggtagcatcctattcttggggagattttcttccccttagaagaaagagactgtagcaatacaaaaatcaagcttagtgctttattacctgagtttttaatagagccaatatgtcttatatctttaccaataaaaccactgtccagaaacaagtctttcattttctttgtaagtttggctctgttggctgtttacacccatgaattttggcatgggtatctatttttcttttttacattgaaaaaaatccagtggttgcttttgaatgcatcaagtaaagaagaagaaaagaatacatccgatgcgtagattcttgaccatgtagtaatctataaaattgctatatcctcctgatagccatgggaaaacatgataagatggtcatttattttgcagttagaattttggaagccacaaaatagacagacaccctgactgttgaagggaggtttaaaaacagatattcaattgaaatgtaagagagcaccccaattgagagcccaggttacgaagacaagcttgcctcgcctgacttttctgtcccttgttctgcaggattagtattctgttacagacctctagtttttagactcttcaattaaagggccaatggttataacctg

SEQ ID NO: 452206 - DNA, 2228 bp, Homo sapiens
cgctcacttctgcttgcacttaggcgacctcgggagctcggactcctacgcagtcaccgggaagggccgccgccccgcccgcggctgctggcccgggtgacacttccgcctgctataagagcagcggccctcggtgcctccttcctgacctcgcacccagctcggagcccggagcgtgcctcggcggcctgtcggttttcaccatggagcagctgagctcagcaaacacccgcttcgccttggacctgttcctggcgttgagtgagaacaatccggctggaaacatcttcatctctcccttcagcatttcatctgctatggccatggtttttctggggaccagaggtaacacggcagcacagctgtccaagactttccatttcaacacggttgaagaggttcattcaagattccagagtctgaatgctgatatcaacaaacgtggagcgtcttatattctgaaacttgctaatagattatatggagagaaaacttacaatttccttcctgagttcttggtttcgactcagaaaacatatggtgctgacctggccagtgtggattttcagcatgcctctgaagatgcaaggaagaccataaaccagtgggtcaaaggacagacagaaggaaaaattccggaactgttggcttcgggcatggttgataacatgaccaaacttgtgctagtaaatgccatctatttcaagggaaactggaaggataaattcatgaaagaagccacgacgaatgcaccattcagattgaataagaaagacagaaaaactgtgaaaatgatgtatcagaagaaaaaatttgcatatggctacatcgaggaccttaagtgccgtgtgctggaactgccttaccaaggcgaggagctcagcatggtcatcctgctgccggatgacattgaggacgagtccacgggcctgaagaagattgaggaacagttgactttggaaaagttgcatgagtggactaaacctgagaatctcgatttcattgaagttaatgtcagcttgcccaggttcaaactggaagagagttacactctcaactccgacctcgcccgcctaggtgtgcaggatctctttaacagtagcaaggctgatctgtctggcatgtcaggagccagagatatttttatatcaaaaattgtccacaagtcatttgtggaagtgaatgaagagggaacagaggcggcagctgccacagcaggcatcgcaactttctgcatgttgatgcccgaagaaaatttcactgccgaccatccattccttttctttattcggcataattcctcaggtagcatcctattcttggggagattttcttccccttagaagaaagagactgtagcaatacaaaaatcaagcttagtgctttattacctgagtttttaatagagccaatatgtcttatatctttaccaataaaaccactgtccagaaacaagtctttcattttctttgtaagtttggctctgttggctgtttacacccatgaattttggcatgggtatctatttttcttttttacattgaaaaaaatccagtggttgcttttgaatgcatcaagtaaagaagaagaaaagaatacatccgatgcgtagattcttgaccatgtagtaatctataaaattgctatatcctcctgatagccatgggaaaacatgataagatggtcatttattttgcagttagaattttggaagccacaaaatagacagacaccctgactgttgaagggaggtttaaaaacagatattcaattgaaatgtaagagagcaccccaattgagagcccaggttacgaagacaagcttgcctcgcctgacttttctgtcccttgttctgcaggattagtattctgttacagacctctagtttttagactcttcaattaaagggccaatggttataacctgaaaaaaaaaaaaaaaaaaaaaaaaaaaaattttgttgggccgccctgggcccctggaaaaatttttctatagaccccttcgcgtggggcgcgcgccgggccgcaagtgggctaggcgtgaacctggccccaagactgggtccctaaagaaaacccggccccaggaaaagctgcggggattctcccccccaaataaaagagcccgcgggggaaaccggagcgcttcggaaccactccgagatgtcccgcggaaggcccatgaagggctctacaacacgggtgtccaggggaccgaattaatac

SEQ ID NO: 452207 - DNA, 2186 bp, Homo sapiens
cgctcacttctgcttgcacttaggcgacctcgggagctcggactcctacgcagtcaccgggaagggccgccgccccgcccgcggctgctggcccgggtgacacttccgcctgctataagagcagcggccctcggtgcctccttcctgacctcgcacccagctcggagcccggagcgtgcctcggcggcctgtcggagctgtttgtgacggtttccaggcagcccagggccaggccgcggctcctatctgcagctgcagggagagagaggaggaaccccgtgcgattctagagacgatttcacaacaaggagaaatcagctttgtgcttacatgccgagcagccagcacagttcttctttgcctgtcctcgggggaaatcagggctctgagagtggagatcgagatgggctagtgggtggcggatgggacgctgcacggccagaccctggactgtgttttcaccatggagcagctgagctcagcaaacacccgcttcgccttggacctgttcctggcgttgagtgagaacaatccggctggaaacatcttcatctctcccttcagcatttcatctgctatggccatggtttttctggggaccagaggtaacacggcagcacagctgtccaagactttccatttcaacacggttgaagaggttcattcaagattccagagtctgaatgctgatatcaacaaacgtggagcgtcttatattctgaaacttgctaatagattatatggagagaaaacttacaatttccttcctgagttcttggtttcgactcagaaaacatatggtgctgacctggccagtgtggattttcagcatgcctctgaagatgcaaggaagaccataaaccagtgggtcaaaggacagacagaaggaaaaattccggaactgttggcttcgggcatggttgataacatgaccaaacttgtgctagtaaatgccatctatttcaagggaaactggaaggataaattcatgaaagaagccacgacgaatgcaccattcagattgaataagaaagacagaaaaactgtgaaaatgatgtatcagaagaaaaaatttgcatatggctacatcgaggaccttaagtgccgtgtgctggaactgccttaccaaggcgaggagctcagcatggtcatcctgctgccggatgacattgaggacgagtccacgggcctgaagaagattgaggaacagttgactttggaaaagttgcatgagtggactaaacctgagaatctcgatttcattgaagttaatgtcagcttgcccaggttcaaactggaagagagttacactctcaactccgacctcgcccgcctaggtgtgcaggatctctttaacagtagcaaggctgatctgtctggcatgtcaggagccagagatatttttatatcaaaaattgtccacaagtcatttgtggaagtgaatgaagagggaacagaggcggcagctgccacagcaggcatcgcaactttctgcatgttgatgcccgaagaaaatttcactgccgaccatccattccttttctttattcggcataattcctcaggtagcatcctattcttggggagattttcttccccttagaagaaagagactgtagcaatacaaaaatcaagcttagtgctttattacctgagtttttaatagagccaatatgtcttatatctttaccaataaaaccactgtccagaaacaagtctttcattttctttgtaagtttggctctgttggctgtttacacccatgaattttggcatgggtatctatttttcttttttacattgaaaaaaatccagtggttgcttttgaatgcatcaagtaaagaagaagaaaagaatacatccgatgcgtagattcttgaccatgtagtaatctataaaattgctatatcctcctgatagccatgggaaaacatgataagatggtcatttattttgcagttagaattttggaagccacaaaatagacagacaccctgactgttgaagggaggtttaaaaacagatattcaattgaaatgtaagagagcaccccaattgagagcccaggttacgaagacaagcttgcctcgcctgacttttctgtcccttgttctgcaggattagtattctgttacagacctctagtttttagactcttcaattaaagggccaatggttataacctg

SEQ ID NO: 452208 - DNA, 1817 bp, Homo sapiens
ccccccccccccccacctacgcagtacagcccggggtactcggccgaggcagctcggagccggagcgtgcctcggcggcctgtcggttttcaccatggagcagctgagctcagcaaacacccgcttcgccttggacctgttcctggcgttgagtgagaacaatccggctggaaacatcttcatctctcccttcagcatttcatctgctatggccatggtttttctggggaccagaggtaacacggcagcacagctgtccaagactttccatttcaacacggttgaagaggttcattcaagattccagagtctgaatgctgatatcaacaaacgtggagcgtcttatattctgaaacttgctaatagattatatggagagaaaacttacaatttccttcctgagttcttggtttcgactcagaaaacatatggtgctgacctggccagtgtggattttcagcatgcctctgaagatgcaaggaagaccataaaccagtgggtcaaaggacagacagaaggaaaaattccggaactgttggcttcgggcatggttgataacatgaccaaacttgtgctagtaaatgccatctatttcaagggaaactggaaggataaattcatgaaagaagccacgacgaatgcaccattcagattgaataagaaagacagaaaaactgtgaaaatgatgtatcagaagaaaaaatttgcatatggctacatcgaggaccttaagtgccgtgtgctggaactgccttaccaaggcgaggagctcagcatggtcatcctgctgccggatgacattgaggacgagtccacgggcctgaagaagattgaggaacagttgactttggaaaagttgcatgagtggactaaacctgagaatctcgatttcattgaagttaatgtcagcttgcccaggttcaaactggaagagagttacactctcaactccgacctcgcccgcctaggtgtgcaggatctctttaacagtagcaaggctgatctgtctggcatgtcaggagccagagatatttttatatcaaaaattgtccacaagtcatttgtggaagtgaatgaagagggaacagaggcggcagctgccacagcaggcatcgcaactttctgcatgttgatgcccgaagaaaatttcactgccgaccatccattccttttctttattcggcataattcctcaggtagcatcctattcttggggagattttcttccccttagaagaaagagactgtagcaatacaaaaatcaagcttagtgctttattacctgagtttttaatagagccaatatgtcttatatctttaccaataaaaccactgtccagaaacaagtctttcattttctttgtaagtttggctctgttggctgtttacacccatgaattttggcatgggtatctatttttcttttttacattgaaaaaaatccagtggttgcttttgaatgcatcaagtaaagaagaagaaaagaatacatccgatgcgtagattcttgaccatgtagtaatctataaaattgctatatcctcctgatagccatgggaaaacatgataagatggtcatttattttgcagttagaattttggaagccacaaaatagacagacaccctgactgttgaagggaggtttaaaaacagatattcaattgaaatgtaagagagcaccccaattgagagcccaggttacgaagacaagcttgcctcgcctgacttttctgtcccttgttctgcaggattagtattctgttacagacctctagtttttagactcttcaattaaagggccaatggttataacctg

SEQ ID NO: 452209 - DNA, 1900 bp, Homo sapiens
cgctcacttctgcttgcacttaggcgacctcgggagctcggactcctacgcagtcaccgggaagggccgccgccccgcccgcggctgctggcccgggtgacacttccgcctgctataagagcagcggccctcggtgcctccttcctgacctcgcacccagctcggagcccggagcgtgcctcggcggcctgtcggttttcaccatggagcagctgagctcagcaaacacccgcttcgccttggacctgttcctggcgttgagtgagaacaatccggctggaaacatcttcatctctcccttcagcatttcatctgctatggccatggtttttctggggaccagagactttccatttcaacacggttgaagaggttcattcaagattccagagtctgaatgctgatatcaacaaacgtggagcgtcttatattctgaaacttgctaatagattatatggagagaaaacttacaatttccttcctgagttcttggtttcgactcagaaaacatatggtgctgacctggccagtgtggattttcagcatgcctctgaagatgcaaggaagaccataaaccagtgggtcaaaggacagacagaaggaaaaattccggaactgttggcttcgggcatggttgataacatgaccaaacttgtgctagtaaatgccatctatttcaagggaaactggaaggataaattcatgaaagaagccacgacgaatgcaccattcagattgaataagaaagacagaaaaactgtgaaaatgatgtatcagaagaaaaaatttgcatatggctacatcgaggaccttaagtgccgtgtgctggaactgccttaccaaggcgaggagctcagcatggtcatcctgctgccggatgacattgaggacgagtccacgggcctgaagaagattgaggaacagttgactttggaaaagttgcatgagtggactaaacctgagaatctcgatttcattgaagttaatgtcagcttgcccaggttcaaactggaagagagttacactctcaactccgacctcgcccgcctaggtgtgcaggatctctttaacagtagcaaggctgatctgtctggcatgtcaggagccagagatatttttatatcaaaaattgtccacaagtcatttgtggaagtgaatgaagagggaacagaggcggcagctgccacagcaggcatcgcaactttctgcatgttgatgcccgaagaaaatttcactgccgaccatccattccttttctttattcggcataattcctcaggtagcatcctattcttggggagattttcttccccttagaagaaagagactgtagcaatacaaaaatcaagcttagtgctttattacctgagtttttaatagagccaatatgtcttatatctttaccaataaaaccactgtccagaaacaagtctttcattttctttgtaagtttggctctgttggctgtttacacccatgaattttggcatgggtatctatttttcttttttacattgaaaaaaatccagtggttgcttttgaatgcatcaagtaaagaagaagaaaagaatacatccgatgcgtagattcttgaccatgtagtaatctataaaattgctatatcctcctgatagccatgggaaaacatgataagatggtcatttattttgcagttagaattttggaagccacaaaatagacagacaccctgactgttgaagggaggtttaaaaacagatattcaattgaaatgtaagagagcaccccaattgagagcccaggttacgaagacaagcttgcctcgcctgacttttctgtcccttgttctgcaggattagtattctgttacagacctctagtttttagactcttcaattaaagggccaatggttataacctg

SEQ ID NO: 452210 - DNA, 1872 bp, Homo sapiens
cgctcacttctgcttgcacttaggcgacctcgggagctcggactcctacgcagtcaccgggaagggccgccgccccgcccgcggctgctggcccgggtgacacttccgcctgctataagagcagcggccctcggtgcctccttcctgacctcgcacccagctcggagcccggagcgtgcctcggcggcctgtcggttttcaccatggagcagctgagctcagcaaacacccgcttcgccttggacctgttcctggcgttgagtgagaacaatccggctggaaacatcttcatctctcccttcagcatttcatctgctatggccatggtttttctggggaccagaggtaacacggcagcacagctgtccaagactttccatttcaacacggttgaagaggttcattcaagattccagagtctgaatgctgatatcaacaaacgtggagcgtcttatattctgaaacttgctaatagattatatggagagaaaacttacaatttccttcctgagttcttggtttcgactcagaaaacatatggtgctgacctggccagtgtggattttcagcatgcctctgaagatgcaaggaagaccataaaccagtgggtcaaaggacagacagaaggaaaaattccggaactgttggcttcgggcatggttgataacatgaccaaacttgtgctagtaaatgccatctatttcaagggaaactggaaggataaattcatgaaagaagccacgacgaatgcaccattcagattgaataagaaagacagaaaaactgtgaaaatgatgtatcagaagaattaccaaggcgaggagctcagcatggtcatcctgctgccggatgacattgaggacgagtccacgggcctgaagaagattgaggaacagttgactttggaaaagttgcatgagtggactaaacctgagaatctcgatttcattgaagttaatgtcagcttgcccaggttcaaactggaagagagttacactctcaactccgacctcgcccgcctaggtgtgcaggatctctttaacagtagcaaggctgatctgtctggcatgtcaggagccagagatatttttatatcaaaaattgtccacaagtcatttgtggaagtgaatgaagagggaacagaggcggcagctgccacagcaggcatcgcaactttctgcatgttgatgcccgaagaaaatttcactgccgaccatccattccttttctttattcggcataattcctcaggtagcatcctattcttggggagattttcttccccttagaagaaagagactgtagcaatacaaaaatcaagcttagtgctttattacctgagtttttaatagagccaatatgtcttatatctttaccaataaaaccactgtccagaaacaagtctttcattttctttgtaagtttggctctgttggctgtttacacccatgaattttggcatgggtatctatttttcttttttacattgaaaaaaatccagtggttgcttttgaatgcatcaagtaaagaagaagaaaagaatacatccgatgcgtagattcttgaccatgtagtaatctataaaattgctatatcctcctgatagccatgggaaaacatgataagatggtcatttattttgcagttagaattttggaagccacaaaatagacagacaccctgactgttgaagggaggtttaaaaacagatattcaattgaaatgtaagagagcaccccaattgagagcccaggttacgaagacaagcttgcctcgcctgacttttctgtcccttgttctgcaggattagtattctgttacagacctctagtttttagactcttcaattaaagggccaatggttataacctg

SEQ ID NO: 452211 - DNA, 1333 bp, Homo sapiens
cgctcacttctgcttgcacttaggcgacctcgggagctcggactcctacgcagtcaccgggaagggccgccgccccgcccgcggctgctggcccgggtgacacttccgcctgctataagagcagcggccctcggtgcctccttcctgacctcgcacccagctcggagcccggagcgtgcctcggcggcctgtcggttttcaccatggagcagctgagctcagcaaacacccgcttcgccttggacctgttcctggcgttgagtgagaacaatccggctggaaacatcttcatctctcccttcagcatttcatctgctatggccatggtttttctggggaccagaggtaacacggcagcacagctgtccaagactttccatttcaacacggttgaagaggttcattcaagattccagagtctgaatgctgatatcaacaaacgtggagcgtcttatattctgaaacttgctaatagattatatggagagaaaacttacaatttccttcctgagttcttggtttcgactcagaaaacatatggtgctgacctggccagtgtggattttcagcatgcctctgaagatgcaaggaagaccataaaccagtgggtcaaaggacagacagaaggaaaaattccggaactgttggcttcgggcatggttgataacatgaccaaacttgtgctagtaaatgccatctatttcaagggaaactggaaggataaattcatgaaagaagccacgacgaatgcaccattcagattgaataagaaagacagaaaaactgtgaaaatgatgtatcagaagaaaaaattgtgatgtgctccagtcgtcatggtgaacttaagtgctatagaaaacctcacccaaagcaacagaaagtagaaatgctgaataaaaccaaaccagacaataaatatacataagaaatacccaaaggatgagaagaaattcctcaggtaccagaaacagggcagaactcaaagccactgttgtaaagtctgagtaacaaatgtggcctcaaagcatgaagaggtgcttaaaacaggagctccctgatgaggccaaagcactacctatccaaaaaagaaagtgaaaattcacagttcccacaagcaatatataaaagtaacctttccccatcactgccaacagtagttgtatccagttaattttatcccaataaagtagatgagaaaggatcttgtactaactctacaaatttgcatttacttcagtatcatttttatgtcttttattgattggataaacactgccattgaattaacttcatttattttacccatattacgatttgcttactatccttgaat

SEQ ID NO: 452212 - DNA, 852 bp, Homo sapiens
gactagttctagctcgcgatctagaactagtggctgatctgtctggcatgtcaggagccagagatatttttatatcaaaaattgtccacaagtcatttgtggaagtgaatgaagagggaacagaggcggcagctgccacagcaggcatcgcaactttctgcatgttgatgcccgaagaaaatttcactgccgaccatccattccttttctttattcggcataattcctcaggtagcatcctattcttggggagattttcttccccttagaagaaagagactgtagcaatacaaaaatcaagcttagtgctttattacctgagtttttaatagagccaatatgtcttatatctttaccaataaaaccactgtccagaaacaagtctttcattttctttgtaagtttggctctgttggctgtttacacccatgaattttggcatgggtatctatttttcttttttacattgaaaaaaatccagtggttgcttttgaatgcatcaagtaaagaagaagaaaagaatacatccgatgcgtagattcttgaccatgtagtaatctataaaattgctatatcctcctgatagccatgggaaaacatgataagatggtcatttattttgcagttagaattttggaagccacaaaatagacagacaccctgactgttgaagggaggtttaaaaacagatattcaattgaaatgtaagagagcaccccaattgagagcccaggttacgaagacaagcttgcctcgcctgacttttctgtcccttgttctgcaggattagtattctgttacagacctctagtttttagactcttcaattaaagggccaatggttataacctg

SEQ ID NO: 452213 - DNA, 732 bp, Homo sapiens
atatttccttttccttttttttaataggagttcttggtttcgactcagaaaacatatggtgctgacctggccagtgtggattttcagcatgcctctgaagatgcaaggaagaccataaaccagtgggtcaaaggacagacagaaggtgagagcctgggcagaatggaatcattatgcgctggtcatgtcattcgtttcctcagtccgccttccctacctgcagttattccctccccagctcccacagtcctggcgcacatcgtggttacagtcagaggacgctgccggtgcgtgaagtctgcactgcacgttgctggacagctctcacatgttcgaagttcaccagagtggaaacttaaacatgatttaactcaagcagctaaatccttttttctcatcagctccccaaaacttttaaagttgcatttcaaagttaaaaccaacattggcaggcgcggtggctcatgcctgtaatcccagcactttgggagcccaaggcgggcggatcatttgaggtcaggagttcaagaccagcttggccaacatgatgaaaccctgtctctactaaaaatacaaaaaatttagccaggtgtggtagcacacacctgtaatcccagctactctggaggctgaggcaggagaatctctcgaacacaggaggtaaaggttacagtgagccgagatcatgccactgtactccagcctaggcaacagagcgagactccgtcgtaa

SEQ ID NO: 452214 - DNA, 653 bp, Homo sapiens
ataggcttaacaaacatacatgatgattacttggtgtttttctccctacagtccaaaatgcagcacgctggctaatattggaagaaccaacatctataagaataaaaaagattattatgatatgtatgagccagaaggagtgaaaattttcagatgtccatctcctatctactttgcaaacattggtttctttaggcggaaacttatcgatgctgtaaggtttggggttatttaatttttttccttgtaatcttactgaattctgggaatgtcattgttctgtaaggtcattgttgagactgggttgtgtcacatatgttgaggtggggttgtgtcagtattttttgtcccacgtcccagaacacgatgaaactaccttatggggagtttgttaataggttgggaaataagcctcttcagatgacatctaatatagaagaatccttttctcaaattctgatgtagagtaaaagaaatttaccaagttttgggctgctagcttttagtagatgtcatcctacagattttctttgggcatcaacttcagaaacaatgaaggagcactttaatatttgaccacatcctctaagagattcagtataacagttgtaaatgaatagttaatactgaataacaatacatactgagtgtcc

SEQ ID NO: 452215 - DNA, 383 bp, Homo sapiens
tctagcaggatccctgcacacgcgaataccacacagagtatgtgtcaggtaggaaccaaatttatgattgttatattcaaactggttttctgttccttgaaaatggtgttttttctgatcaaagcctatttaggagttattatgttcttgagtttattccatgtgtgtgaatattttgaatgaatccactaataagatatgcatgtatgtctggagcgctagcaatgtagaataaatatttaagtagactttaacaagtaaatggttgtaggcatcattaagtcttaaatagccttttcaaagatattagtgttcttgttttaattattcagataattcctttaattctccactcaaatctgactttatagatagattgtctg

SEQ ID NO: 452216 - DNA, 2315 bp, Homo sapiens
acagagcctgtagacctgagtggatggacactgcctcttagaactagaacttagaactttatcttgaaaatgtaccactgttgcagaagctcctcacagagtatgtgtcaggcatttttaacctgctaaaggcaagaagaagtgttcaccacatagttgcaaaggtcttcaacttgccacagccaacagaaaaatcaaaatgattgaaccctttgggaatcagtatattgtggccaggccagtgtattctacaaatgcttttgaggaaaatcataaaaagacaggaagacatcataagacatttctggatcatctcaaagtgtgttgtagctgttccccacaaaaggccaagagaattgtcctctctttgttccccatagcatcttggttgccagcataccggcttaaagaatggttgctcagtgatattgtttctggtatcagcacagggattgtggccgtactacaaggtttagcatttgctctgctggtcgacattcccccagtctatgggttgtatgcatcctttttcccagccataatctaccttttcttcggcacttccagacacatatccgtgggtccgtttccgattctgagtatgatggtgggactagcagtttcaggagcagtttcaaaagcagtcccagatcgcaatgcaactactttgggattgcctaacaactcgaataattcttcactactggatgacgagagggtgagggtggcggcggcggcatcagtcacagtgctttctggaatcatccagttggcttttgggattctgcggattggatttgtagtgatatacctgtctgagtccctcatcagtggcttcactactgctgctgctgttcatgttttggtttcccaactcaaattcatttttcagttgacagtcccgtcacacactgatccagtttcaattttcaaagtactatactctgtattctcacaaatagagaagactaatattgcagacctggtgacagctctgattgtccttttggttgtatccattgttaaagaaataaatcagcgcttcaaagacaaacttccagtgcccattccaatcgaattcattatgaccgtgattgcagcaggtgtatcctacggctgtgactttaaaaacaggtttaaagtggctgtggttggggacatgaatcctggatttcagccccctattacacctgacgtggagactttccaaaacaccgtaggagattgcttcggcatcgcaatggttgcatttgcagtggccttttcagttgccagcgtctattccctcaaatacgattatccacttgatggcaatcaggagttaatagccttgggactgggtaacatagtctgtggagtattcagaggatttgctgggagtactgccctctccagatcagcagttcaggagagcacaggaggcaaaacacagattgctgggcttattggtgccatcatcgtgctgattgtcgttctagccattggatttctcctggcgcctctacaaaagtccgtcctggcagctttagcattgggaaacttaaagggaatgctgatgcagtttgctgaaataggcagattgtggcgaaaggacaaatatgattgtttaatttggatcatgaccttcatcttcaccattgtcctgggactcgggttaggcctggcagctagtgtggcatttcaactgctaaccatcgtgttcaggacccaatttccaaaatgcagcacgctggctaatattggaagaaccaacatctataagaataaaaaagattattatgatatgtatgagccagaaggagtgaaaattttcagatgtccatctcctatctactttgcaaacattggtttctttaggcggaaacttatcgatgctgtaaggtttggggttatttaatttttttccttgtaatcttactgaattctgggaatgtcattgttctgtaaggtcattgttgagactgggttgtgtcacatatgttgaggtggggttgtgtcagtattttttgtcccacgtcccagaacacgatgaaactaccttatggggagtttgttaataggttgggaaataagcctcttcagatgacatctaatatagaagaatccttttctcaaattctgatgtagagtaaaagaaatttaccaagttttgggctgctagcttttagtagatgtcatcctacagattttctttgggcatcaacttcagaaacaatgaaggagcactttaatatttgaccacatcctctaagagattcagtataacagttgtaaatgaatagttaatactgaataacaatacatactgagtgtcc

SEQ ID NO: 452217 - DNA, 2880 bp, Homo sapiens
acagagcctgtagacctgagtggatggacactgcctcttagaactagaacttagaactttatcttgaaaatgtaccactgttgcagaagctcctcacagagtatgtgtcaggcatttttaacctgctaaaggcaagaagaagtgttcaccacatagttgcaaaggtcttcaacttgccacagccaacagaaaaatcaaaatgattgaaccctttgggaatcagtatattgtggccaggccagtgtattctacaaatgcttttgaggaaaatcataaaaagacaggaagacatcataagacatttctggatcatctcaaagtgtgttgtagctgttccccacaaaaggccaagagaattgtcctctctttgttccccatagcatcttggttgccagcataccggcttaaagaatggttgctcagtgatattgtttctggtatcagcacagggattgtggccgtactacaaggtttagcatttgctctgctggtcgacattcccccagtctatgggttgtatgcatcctttttcccagccataatctaccttttcttcggcacttccagacacatatccgtgggtccgtttccgattctgagtatgatggtgggactagcagtttcaggagcagtttcaaaagcagtcccagatcgcaatgcaactactttgggattgcctaacaactcgaataattcttcactactggatgacgagagggtgagggtggcggcggcggcatcagtcacagtgctttctggaatcatccagttggcttttgggattctgcggattggatttgtagtgatatacctgtctgagtccctcatcagtggcttcactactgctgctgctgttcatgttttggtttcccaactcaaattcatttttcagttgacagtcccgtcacacactgatccagtttcaattttcaaagtactatactctgtattctcacaaatagagaagactaatattgcagacctggtgacagctctgattgtccttttggttgtatccattgttaaagaaataaatcagcgcttcaaagacaaacttccagtgcccattccaatcgaattcattatgaccgtgattgcagcaggtgtatcctacggctgtgactttaaaaacaggtttaaagtggctgtggttggggacatgaatcctggatttcagccccctattacacctgacgtggagactttccaaaacaccgtaggagattgcttcggcatcgcaatggttgcatttgcagtggccttttcagttgccagcgtctattccctcaaatacgattatccacttgatggcaatcaggagttaatagccttgggactgggtaacatagtctgtggagtattcagaggatttgctgggagtactgccctctccagatcagcagttcaggagagcacaggaggcaaaacacagattgctgggcttattggtgccatcatcgtgctgattgtcgttctagccattggatttctcctggcgcctctacaaaagtccgtcctggcagctttagcattgggaaacttaaagggaatgctgatgcagtttgctgaaataggcagattgtggcgaaaggacaaatatgattgtttaatttggatcatgaccttcatcttcaccattgtcctgggactcgggttaggcctggcagctagtgtggcatttcaactgctaaccatcgtgttcaggacccaatttccaaaatgcagcacgctggctaatattggaagaaccaacatctataagaataaaaaagattattatgatatgtatgagccagaaggagtgaaaattttcagatgtccatctcctatctactttgcaaacattggtttctttaggcggaaacttatcgatgctgttggctttagtccacttcgaattctacgcaagcgcaacaaagctttgaggaaaatccgaaaactgcagaagcaaggcttgctacaagtgacaccaaaaggatttatatgtactgttgacaccataaaagattctgacgaagagctggacaacaatcagatagaagtactggaccagccaatcaataccacagacctgcctttccacattgactggaatgatgatcttcctctcaacattgaggtccccaaaatcagcctccacagcctcattctcgacttttcagcagtgtcctttcttgatgtttcttcagtgaggggccttaaatcgattttgcaagaatttatcaggatcaaggtagatgtgtatatcgttggaactgatgatgacttcattgagaagcttaaccggtatgaattttttgatggtgaagtgaaaagctcaatatttttcttaacaatccatgatgctgttttgcatattttgatgaagaaagattacagtacttcaaagtttaatcccagtcaggaaaaagatggaaaaattgattttaccataaatacaaatggaggattacgtaatcgggtatatgaggtgccagttgaaacaaaattctaatcaacatataattcagaaggatcttcatctgactatgacataaaaacaactttatacccagaaagttattgataagttcatacattgtacgaagagtatttttgacagaatatgtttcaaactttggaacaagatggttctagcatggcatatttttcacatatctagtatgaaattatataagtattctaaattttatatcttgtagctttatcaaagggtgaaaattattttgttcatacatatttttgtagcactgacagatttccatcctagtcactaccttcatgcataggtttagcagtatagtggcgccactgttttgaatctcataatttatacaggtcatattaatatatttccattaaaaaatcagttgtacagtg

SEQ ID NO: 452218 - DNA, 721 bp, Homo sapiens
acagagcctgtagacctgagtggatggacactgcctcttagaactagaacttagaactttatcttgaaaatgtaccactgttgcagaagctcctcacagagtatgtgtcaggcatttttaacctgctaaaggcaagaagaagtgttcaccacatagttgcaaaggtcttcaacttgccacagccaacagaaaaatcaaaatgattgaaccctttgggaatcagtatattgtggccaggccagtgtattctacaaatgcttttgaggaaaatcataaaaagacaggaagacatcataagacatttctggatcatctcaaagtgtgttgtagctgttccccacaaaaggccaagagaattgtcctctctttgttccccatagcatcttggttgccagcataccggcttaaagaatggttgctcagtgatattgtttctggtatcagcacagggattgtggccgtactacaaggtttagcatttgctctgctggtcgacattcccccagtctatgggttgtatgcatcctttttcccagccataatctaccttttcttcggcacttccagacacatatccgtgggtccgtttccgattctgagtatgatggtgggactagcagtttcaggagcagtttcaaaagcagtcccagatcgcaatgcaactcgaaagccccaagcggcaactcgaaagccccaagcggcatctcgaaagccccaagcg

SEQ ID NO: 452219 - DNA, 1121 bp, Homo sapiens
cgtcgcgccgccggctgctgccttcttcctcctcgggcgcccgcggcgatgttcaaccgcgccgtgagccggctgagcaggaagcggccgccgtcagacatccacgacagcgatggcagttccagcagcagccaccagagcctcaagagcacagccaaatgggcggcatccctggagaatctgctggaagacccagaaggcgtgaaaagatttagggaatttttaaaaaaggaattcagtgaagaaaatgttttgttttggctagcatgtgaagattttaagaaaatgcaagataagacgcagatgcaggaaaaggcaaaggagatctacatgacctttctgtccagcaaggcctcatcacaggtcaacgtggaggggcagtctcggctcaacgagaagatcctggaagaaccgcaccctctgatgttccagaaactccaggaccagatctttaatctcatgaagtacgacagctacagccgcttcttaaagtctgacttgtttttaaaacacaagcgaaccgaggaagaggaagaagatttgcctgatgctcaaactgcagctaaaagagcttccagaatttataacacatgagcccccaaaaagccgggactggcagctttaagaagcaaaggaatttcctctcaggaccgtgccgggtttatcattgctttgttatttgtaaggactgaaatgtacaaaacccttcaatgggatgtgtgttttattaactgcttcaccagtaaattttgcatgatggctaagctaacataaaaaaagaataataataacttggaagttttagtttacaaaacagagattccttcaacactggacacgtcgagcattttgtagcttaattaaacctcatgtaaggccacaaggtgaaacgtatcacactaccttttaccttgtaagtgtttgctctgcctctctggtgagtggacgcatgtccacaggtcacttggtaaattaactcaaacatgagttgatccggcaaacccaggctactgggggtatggcctgccagtcgccttttgggttaaatatttctcgagagcaagttcagtgctggaaaaagaaaatgaatcactgacagcctctaaagacttgggaagctt

SEQ ID NO: 452220 - DNA, 376 bp, Homo sapiens
aaagaggatgttgaggcttgttttttcttcggacccaagggtgctcgggagccctccagtctctgcctttctcacacaaggcgtctctgggaaggcagtggattgttggtctgcgtggaacttctcaggtggacaccagagcatggaacgtaaggaatcgcccccacccctttccatgtccgcagtttgcctgtcgccttggccctgggcggggcaggggctgggaagagtgtgctgtgaggacacagaggtgcacaggtgactgtggaagggccagtaggagcacttggctttctgtgagtcccgaaccctcgtgtgaaaacgccacgatgccctttctgagtggagccaaccctctgccaccagctttcctgct

SEQ ID NO: 452221 - DNA, 1108 bp, Homo sapiens
ctcactatagggctcgagcggccgcccgggcagtggattgttggtctgcgtggaacttctcaggtggacaccagagcatggaacacatccacgacagcgatggcagttccagcagcagccaccagagcctcaagagcacagccaaatgggcggcatccctggagaatctgctggaagacccagaaggcgtgaaaagatttagggaatttttaaaaaaggaattcagtgaagaaaatgttttgttttggctagcatgtgaagattttaagaaaatgcaagataagacgcagatgcaggaaaaggcaaaggagatctacatgacctttctgtccagcaaggcctcatcacaggtcaacgtggaggggcagtctcggctcaacgagaagatcctggaagaaccgcaccctctgatgttccagaaactccaggaccagatctttaatctcatgaagtacgacagctacagccgcttcttaaagtctgacttgtttttaaaacacaagcgaaccgaggaagaggaagaagatttgcctgatgctcaaactgcagctaaaagagcttccagaatttataacacatgagcccccaaaaagccgggactggcagctttaagaagcaaaggaatttcctctcaggaccgtgccgggtttatcattgctttgttatttgtaaggactgaaatgtacaaaacccttcaatgggatgtgtgttttattaactgcttcaccagtaaattttgcatgatggctaagctaacataaaaaaagaataataataacttggaagttttagtttacaaaacagagattccttcaacactggacacgtcgagcattttgtagcttaattaaacctcatgtaaggccacaaggtgaaacgtatcacactaccttttaccttgtaagtgtttgctctgcctctctggtgagtggacgcatgtccacaggtcacttggtaaattaactcaaacatgagttgatccggcaaacccaggctactgggggtatggcctgccagtcgccttttgggttaaatatttctcgagagcaagttcagtgctggaaaaagaaaatgaatcactgacagcctctaaagacttgggaagctt

SEQ ID NO: 452222 - DNA, 1173 bp, Homo sapiens
aaagaggatgttgaggcttgttttttcttcggacccaagggtgctcgggagccctccagtctctgcctttctcacacaaggcgtctctgggaaggcagtggattgttggtctgcgtggaacttctcaggtggacaccagagcatggaacacatccacgacagcgatggcagttccagcagcagccaccagagcctcaagagcacagccaaatgggcggcatccctggagaatctgctggaagacccagaaggcgtgaaaagatttagggaatttttaaaaaaggaattcagtgaagaaaatgttttgttttggctagcatgtgaagattttaagaaaatgcaagataagacgcagatgcaggaaaaggcaaaggagatctacatgacctttctgtccagcaaggcctcatcacaggtcaacgtggaggggcagtctcggctcaacgagaagatcctggaagaaccgcaccctctgatgttccagaaactccaggaccagatctttaatctcatgaagtacgacagctacagccgcttcttaaagtctgacttgtttttaaaacacaagcgaaccgaggaagaggaagaagatttgcctgatgctcaaactgcagctaaaagagcttccagaatttataacacatgagcccccaaaaagccgggactggcagctttaagaagcaaaggaatttcctctcaggaccgtgccgggtttatcattgctttgttatttgtaaggactgaaatgtacaaaacccttcaatgggatgtgtgttttattaactgcttcaccagtaaattttgcatgatggctaagctaacataaaaaaagaataataataacttggaagttttagtttacaaaacagagattccttcaacactggacacgtcgagcattttgtagcttaattaaacctcatgtaaggccacaaggtgaaacgtatcacactaccttttaccttgtaagtgtttgctctgcctctctggtgagtggacgcatgtccacaggtcacttggtaaattaactcaaacatgagttgatccggcaaacccaggctactgggggtatggcctgccagtcgccttttgggttaaatatttctcgagagcaagttcagtgctggaaaaagaaaatgaatcactgacagcctctaaagacttgggaagctt

SEQ ID NO: 452223 - DNA, 1080 bp, Homo sapiens
ttcttaaaatgacagtgtctgttggccacatatgcagtctgaactttgctttgcagacatccacgacagcgatggcagttccagcagcagccaccagagcctcaagagcacagccaaatgggcggcatccctggagaatctgctggaagacccagaaggcgtgaaaagatttagggaatttttaaaaaaggaattcagtgaagaaaatgttttgttttggctagcatgtgaagattttaagaaaatgcaagataagacgcagatgcaggaaaaggcaaaggagatctacatgacctttctgtccagcaaggcctcatcacaggtcaacgtggaggggcagtctcggctcaacgagaagatcctggaagaaccgcaccctctgatgttccagaaactccaggaccagatctttaatctcatgaagtacgacagctacagccgcttcttaaagtctgacttgtttttaaaacacaagcgaaccgaggaagaggaagaagatttgcctgatgctcaaactgcagctaaaagagcttccagaatttataacacatgagcccccaaaaagccgggactggcagctttaagaagcaaaggaatttcctctcaggaccgtgccgggtttatcattgctttgttatttgtaaggactgaaatgtacaaaacccttcaatgggatgtgtgttttattaactgcttcaccagtaaattttgcatgatggctaagctaacataaaaaaagaataataataacttggaagttttagtttacaaaacagagattccttcaacactggacacgtcgagcattttgtagcttaattaaacctcatgtaaggccacaaggtgaaacgtatcacactaccttttaccttgtaagtgtttgctctgcctctctggtgagtggacgcatgtccacaggtcacttggtaaattaactcaaacatgagttgatccggcaaacccaggctactgggggtatggcctgccagtcgccttttgggttaaatatttctcgagagcaagttcagtgctggaaaaagaaaatgaatcactgacagcctctaaagacttgggaagctt

SEQ ID NO: 452224 - DNA, 973 bp, Homo sapiens
cttggagccaaacagtcctaaggctcccggaagctctcagataagccatgccacctctcctgacctctgtgtcctcatggggaaagtggggctaacaggaaaatgccctttgctgcatgtccaggggattaaggaaatgggatccctccaagcagatgcaggaaaaggcaaaggagatctacatgacctttctgtccagcaaggcctcatcacaggtcaacgtggaggggcagtctcggctcaacgagaagatcctggaagaaccgcaccctctgatgttccagaaactccaggaccagatctttaatctcatgaagtacgacagctacagccgcttcttaaagtctgacttgtttttaaaacacaagcgaaccgaggaagaggaagaagatttgcctgatgctcaaactgcagctaaaagagcttccagaatttataacacatgagcccccaaaaagccgggactggcagctttaagaagcaaaggaatttcctctcaggaccgtgccgggtttatcattgctttgttatttgtaaggactgaaatgtacaaaacccttcaatgggatgtgtgttttattaactgcttcaccagtaaattttgcatgatggctaagctaacataaaaaaagaataataataacttggaagttttagtttacaaaacagagattccttcaacactggacacgtcgagcattttgtagcttaattaaacctcatgtaaggccacaaggtgaaacgtatcacactaccttttaccttgtaagtgtttgctctgcctctctggtgagtggacgcatgtccacaggtcacttggtaaattaactcaaacatgagttgatccggcaaacccaggctactgggggtatggcctgccagtcgccttttgggttaaatatttctcgagagcaagttcagtgctggaaaaagaaaatgaatcactgacagcctctaaagacttgggaagctt

SEQ ID NO: 452225 - DNA, 1042 bp, Homo sapiens
cgtcgcgccgccggctgctgccttcttcctcctcgggcgcccgcggcgatgttcaaccgcgccgtgagccggctgagcaggaagcggccgccgtcagacatccacgacagcgatggcagttccagcagcagccaccagagcctcaagagcacagccaaatgggcggcatccctggagaatctgctggaagacccagaaggcgtgaaaagatttagggaatttttaaaaaaggaattcagtgaagaaaatgttttgttttggctagcatgtgaagattttaagaaaatgcaagataagacgcagatgcaggaaaaggcaaaggagatctacatgacctttctgtccagcaaggcctcatcacaggtcaacgtggaggggcagtctcggctcaacgagaagatcctggaagaaccgcaccctctgatgttccagaaactccaggaccagatctttaatctcatgaagtacgacagctacagccgcttcttaaagtctgacttgtttttaaagaagaggaagaagatttgcctgatgctcaaactgcagctaaaagagcttccagaatttataacacatgagcccccaaaaagccgggactggaatttcctctcaggaccgtgccgggtttatcattgctttgttatttgtaaggactgaaatgtacaaaacccttcaatgggatgtagctaacataaaaaaagaataataataacttggaagttttagtttacaaaacagagattccttcaacactggacacgtcgagcattttgtagcttaattaaacctcatgtaaggccacaaggtgaaacgtatcacactaccttttaccttgtaagtgtttgctctgcctctctggtgagtggacgcatgtccacaggtcacttggtaaattaactcaaacatgagttgatccggcaaacccaggctactgggggtatggcctgccagtcgccttttgggttaaatatttctcgagagcaagttcagtgctggaaaaagaaaatgaatcactgacagcctctaaagacttgggaagctt

SEQ ID NO: 452226 - DNA, 721 bp, Homo sapiens
  misc_feature (36)..(37): n is a, c, g, or t
ggaggggggcgttggggcgaaagtttagttttggannggcctgggcgactatttcatctttggagtacgacagctacagccgcttcttaaagtctgacttgtttttaaaacacaagcgaaccgaggaagaggaagaagatttgcctgatgctcaaactgcagctaaaagagcttccagaatttataacacatgagcccccaaaaagccgggactggcagctttaagaagcaaaggaatttcctctcaggaccgtgccgggtttatcattgctttgttatttgtaaggactgaaatgtacaaaacccttcaatgggatgtgtgttttattaactgcttcaccagtaaattttgcatgatggctaagctaacataaaaaaagaataataataacttggaagttttagtttacaaaacagagattccttcaacactggacacgtcgagcattttgtagcttaattaaacctcatgtaaggccacaaggtgaaacgtatcacactaccttttaccttgtaagtgtttgctctgcctctctggtgagtggacgcatgtccacaggtcacttggtaaattaactcaaacatgagttgatccggcaaacccaggctactgggggtatggcctgccagtcgccttttgggttaaatatttctcgagagcaagttcagtgctggaaaaagaaaatgaatcactgacagcctctaaagacttgggaagctt

SEQ ID NO: 452227 - DNA, 1688 bp, Homo sapiens
cgtcgcgccgccggctgctgccttcttcctcctcgggcgcccgcggcgatgttcaaccgcgccgtgagccggctgagcaggaagcggccgccgtcagacatccacgacagcgatggcagttccagcagcagccaccagagcctcaagagcacagccaaatgggcggcatccctggagaatctgctggaagacccagaaggcgtgaaaagatttagggaatttttaaaaaaggaattcagtgaagaaaatgttttgttttggctagcatgtgaagattttaagaaaatgcaagataagacgcagatgcaggaaaaggcaaaggagatctacatgacctttctgtccagcaaggcctcatcacaggtcaacgtggaggggcagtctcggctcaacgagaagatcctggaagaaccgcaccctctgatgttccagaaactccaggaccagatctttaatctcatgaagtacgacagctacagccgcttcttaaagtctgacttgtttttaaaacacaagcgaaccgaggaagaggaagaagatttgcctgatgctcaaactgcagctaaaagagcttccagaatttataacacatgagcccccaaaaagccgggactggcagctttaagaagcaaaggaatttcctctcaggaccgtgccgggtttatcattgctttgttatttgtaaggactgaaatgtacaaaacccttcaatgggatgtgtgttttattaactgcttcaccagtaaattttgcatgatggctacgaactacactaacaaaaaaaagacaaacacaaaacaaaaacaaacggcgaaaaaacaacaaagaaacaacaacaacaaacaacaacacagtcgtgtgtggccgggcgcgcccgcgcgagccccacgagaagagcgctttgaagaaaacacactcgcgcggtgggagcggagagacggggcccacaagcggaggagcaagagcgaaaaacacgggcgacaaccacggttgtccacaaagagaaaaaccgcgggagagaaaccacaaacagagggggcgtaacccacaaaaaaaaaaaaacacgcgcgggggggaaaaacaacgaggtgaaagagaaaaaaacacacacaaacagacgaaaacaaaggaggacaaacagagcaggggctaacaaagaaggggaccaaaacaaggagccagaaaatataaaataacccccccggggtgaaaagcaagaagggaacaagacagaagggagagcaacagggggaggaagagagaggagaaagagagagcgaagaagacgcaaaaggaagggggaacaggaaaaaaggagcgggagagggaagtaacagagacaagagaaaaaaagacaagacacaagaaggcagaaaggaagagagggggaagggagacaaagaaagaacaagaggggggagagagaaagaagagagaaggagagaggggcgggacgagggcgggggaggagggaacgggaagggacgggagaaggagggagaggaaagaaaggaccgaaagggagcgagggagagaaagaaagaaaaagaaagaagggagaagggaggagagagaagaggaagaaaaaaaaggaaagaaaagaaagaagaggaggagagggcagagggaacagagaggagaagtaggcaaaagaaagagaaaaggcaaaggaaaaggcgggcagaggc

SEQ ID NO: 452228 - DNA, 820 bp, Homo sapiens
cgtcgcgccgccggctgctgccttcttcctcctcgggcgcccgcggcgatgttcaaccgcgccgtgagccggctgagcaggaagcggccgccgtcagacatccacgacagcgatggcagttccagcagcagccaccagagcctcaagagcacagccaaatgggcggcatccctggagaatctgctggaagacccagaaggcgtgaaaagatttagggaatttttaaaaaaggaattcagtgaagaaaatgttttgttttggctagcatgtgaagattttaagaaaatgcaagataagacgcagatgcaggaaaaggcaaaggagatctacatgacctttctgtccagcaaggcctcatcacaggtcaacgtggaggggcagtctcggctcaacgagaagatcctggaagaaccgcaccctctgatgttccagaaactccaggaccagatctttaatctcatgaagtacgacagctacagccgcttcttaaagtctgacttgtttttaaaacacaagcgaaccgaggaagaggaagaagatttgcctgatgctcaaactgcagctaaaagagcttccagaatttataacacatgagcccccaaaaagccgggactggcagctttaagaagcaaaggaatttcctctcaggaccgtgccgggtttatcattgctttgttatttgtaaggactgaaatgtacaaaacccttcaatgggatgtgtgttttattaactgcttcaccagtaaattttgcatgatggctaggattattattacctcgaaggttttgtcttgacggatttgagcgcttttgctgcggg

SEQ ID NO: 452229 - DNA, 1113 bp, Homo sapiens
aaagaggatgttgaggcttgttttttcttcggacccaagggtgctcgggagccctccagtctctgcctttctcacacaaggcgtctctgggaaggcagtggattgttggtctgcgtggaacttctcaggtggacaccagagcatggaacacatccacgacagcgatggcagttccagcagcagccaccagagcctcaagagcacagccaaatgggcggcatccctggagaatctgctggaagacccagaaggcgtgaaaagatttagggaatttttaaaaaaggaattcagtgaagaaaatgttttgttttggctagcatgtgaagattttaagaaaatgcaagataagacgcagatgcaggaaaaggcaaaggagatctacatgacctttctgtccagcaaggcctcatcacaggtcaacgtggaggggcagtctcggctcaacgagaagatcctggaagaaccgcaccctctgatgttccagaaactccaggaccagatctttaatctcatgaagtacgacagctacagccgcttcttaaagtctgacttgtttttaaaacacaagcgaaccgaggaagaggaagaagatttgcctgatgctcaaactgcagctaaaagagcttccagaatttataacacatgagcccccaaaaagccgggactggcagctttaagaagcaaaggaatttcctctcaggaccgtgccgggtgttttattaactgcttcaccagtaaattttgcatgatggctaagctaacataaaaaaagaataataataacttggaagttttagtttacaaaacagagattccttcaacactggacacgtcgagcattttgtagcttaattaaacctcatgtaaggccacaaggtgaaacgtatcacactaccttttaccttgtaagtgtttgctctgcctctctggtgagtggacgcatgtccacaggtcacttggtaaattaactcaaacatgagttgatccggcaaacccaggctactgggggtatggcctgccagtcgccttttgggttaaatatttctcgagagcaagttcagtgctggaaaaagaaaatgaatcactgacagcctctaaagacttgggaagctt

SEQ ID NO: 452230 - DNA, 627 bp, Homo sapiens
cgtcgcgccgccggctgctgccttcttcctcctcgggcgcccgcggcgatgttcaaccgcgccgtgagccggctgagcaggaagcggccgccgtcagacatccacgacagcgatggcagttccagcagcagccaccagagcctcaagagcacagccaaatgggcggcatccctggagaatctgctggaagacccagaaggcgtgaaaagatttagggaatttttaaaaaaggaattcagtgaagaaaatgttttgttttggctagcatgtgaagattttaagaaaatgcaagataagacgcagaagtgaagcgaagccgaaaaaggcagcagcgaaggataaatcttcagacaaaaaagtgcaaacaaaagggaaaaggggagcaaagggaaaacaggccgaagtggctaaccaagaaactaaagaagacttacctgcggaaaacggggaaacgaagactgaggagagtccagcctctgatgaagcaggagagaaagaagccaagtctgattaataaccatataccatgtcttatcagtggtccctgtctcccttcttgtacaatccagaggaatatttttatcaactattttgtaaatgcaagttttctagtagctctagaaacat

SEQ ID NO: 452231 - DNA, 1419 bp, Homo sapiens
gacaatgccatccttcatattcctccaaccaaagcaagcacagcacatgggagaagggcatttggcatctgctgcccccagggtcttcctcatccaccacttctggttcctttcatctggaaagaagacctcttccatcttccatgcagctagcagtcatcaggggagacaccctgcggggctttgattctacagatctttctcaaaggaagcttaggacccgtgggaatggcaaaacagttcgtccatcctctgtttatagaaatggaacagacatcatctataattatcatgggatagtttccttgaaactggaggatgacagtttcccaactcacaaaaggaaggccaaagtatccatcattagtcagccacaaaagacaatcaaagtggcagaactgcctcaagcagataaggtggaatccacaactgactcacacttccccagacaggaccagttgccctcatttccaaagaactgcactctggaattaaagggactcttccattttgaagaaggcatccagaagctgtatcagtgcaatgggatcgcctggaaagcctggagtccccaaaccaaggatgtggaagacaaatcctgtccagccgggtggcaccagcactcaggctactgtcacatcttgatcacagagcagaaaggcacctggaatgcggctgcccaagcttgcagggaacaatacctgggcaaccttgtaactgtattctccaggcagcacatgcggtggctctgggacattggtgggagaaagtccttttggataggtttgaacgaccaagtgcatgctggccactgggagtggatcggtggtgaacctgttgccttcaccaatgggagaagagggccctctccacgctccaagcttggaaagagctgtgttttggttcaaagacaagggaaatggcaaacaaaagactgtaggagagccaaacctcataattatgtgtgttccagaaaactctaaatataacagaccctacagggggccacctggagtttgtcacctatttattcacaggatctgtgaatattgctccatagaaaacaaattgttatgattgagtgggtatacctttgtgattctgtctagtgaaaatgggacatttttaatagtgccagaaagattgataaataaatattttttacaagataagatacaatttttgtatctcaataccttttaaaataaatgccagcagtattaaaaagtgtaaggtttgtttattccagaagaccctcacccttaccccattccaaatctcagggagcaccagtctcatagtccttggatttttttaaaaaaaatttttggtcccgttacctctaatgaatttattctgaaatatgtatcgtaggtgctcctaccactttagtctgagtgaagctaactctactagttc

SEQ ID NO: 452232 - DNA, 1222 bp, Homo sapiens
gacaatgccatccttcatattcctccaaccaaagcaagcacagcacatgggagaagggcatttggcatctgctgcccccagggtcttcctcatccaccacttctggttcctttcatctggaaagaagacctcttccatcttccatgcagctagcagtcatcaggggagacaccctgcggggctttgattctacagatctttctcaaaggaagcttaggacccgtgggaatggcaaaacagttcgtccatcctctgtttatagaaatggaacagacatcatctataattatcatgggatagtttccttgaaactggaggatgacagtttcccaactcacaaaaggaaggccaaagtatccatcattagtcagccacaaaagacaatcaaagtggcagaactgcctcaagcagataaggtggaatccacaactgactcacacttccccagacaggaccagttgccctcatttccaaagaactgcactctggaattaaagggactcttccattttgaagaaggcatccagaagctgtatcagtgcaatgggatcgcctggaaagcctggagtccccaaaccaaggatgtggaagacaaatcctgtccagccgggtggcaccagcactcaggctactgtcacatcttgatcacagagcagaaaggcacctggaatgcggctgcccaagcttgcagggaacaatacctgggcaaccttgtaactgtattctccaggcagcacatgcggtggctctgggacattggtgggagaaagtccttttggataggtttgaacgaccaagtgcatgctggccactgggagtggatcggtggtgaacctgttgccttcaccaatgggagaagagggccctctccacgctccaagcttggaaagagctgtgttttggttcaaagacaagggaaatggcaaacaaaagactgtaggagagccaaacctcataattatgtgtgttccagaaaactctaaatataacagaccctacagggggccacctggagtttgtcacctatttattcacaggatctgtgaatattgctccatagaaaacaaattgttatgattgagtgggtatacctttgtgattctgtctagtgaaaatgggacatttttaatagtgccagaaagattgataaataaatattttttacaagataagatacaatttttgtatctcaataccttttaaaataaatgccagcagtatt

SEQ ID NO: 452233 - DNA, 1451 bp, Homo sapiens
  misc_feature (62)..(62): n is a, c, g, or t
  misc_feature (67)..(67): n is a, c, g, or t
  misc_feature (88)..(88): n is a, c, g, or t
gcagggaacaatacctgggcaaccttgggcagccgcattccaggtgcctttctgctctgtgntcaanatgtgacagtagcctgagtgntggtgccacccggctggacaggattggtcttcctcatccaccacttctggttcctttcatctggaaagaagacctcttccatcttccatgcagctagcagtcatcaggggagacaccctgcggggctttgattctacagatctttctcaaaggaagcttaggacccgtgggaatggcaaaacagttcgtccatcctctgtttatagaaatggaacagacatcatctataattatcatgggatagtttccttgaaactggaggatgacagtttcccaactcacaaaaggaaggccaaagtatccatcattagtcagccacaaaagacaatcaaagtggcagaactgcctcaagcagataaggtggaatccacaactgactcacacttccccagacaggaccagttgccctcatttccaaagaactgcactctggaattaaagggactcttccattttgaagaaggcatccagaagctgtatcagtgcaatgggatcgcctggaaagcctggagtccccaaaccaaggatgtggaagacaaatcctgtccagccgggtggcaccagcactcaggctactgtcacatcttgatcacagagcagaaaggcacctggaatgcggctgcccaagcttgcagggaacaatacctgggcaaccttgtaactgtattctccaggcagcacatgcggtggctctgggacattggtgggagaaagtccttttggataggtttgaacgaccaagtgcatgctggccactgggagtggatcggtggtgaacctgttgccttcaccaatgggagaagagggccctctccacgctccaagcttggaaagagctgtgttttggttcaaagacaagggaaatggcaaacaaaagactgtaggagagccaaacctcataattatgtgtgttccagaaaactctaaatataacagaccctacagggggccacctggagtttgtcacctatttattcacaggatctgtgaatattgctccatagaaaacaaattgttatgattgagtgggtatacctttgtgattctgtctagtgaaaatgggacatttttaatagtgccagaaagattgataaataaatattttttacaagataagatacaatttttgtatctcaataccttttaaaataaatgccagcagtattaaaaagtgtaaggtttgtttattccagaagaccctcacccttaccccattccaaatctcagggagcaccagtctcatagtccttggatttttttaaaaaaaatttttggtcccgttacctctaatgaatttattctgaaatatgtatcgtaggtgctcctaccactttagtctgagtgaagctaactctactagttc

SEQ ID NO: 452234 - DNA, 4552 bp, Homo sapiens
ggctgatgacgactggtggccaatgcagatactaattaagtgccctaatcaaattgtgagacagatgtttcagcgtttgtgtatccatgtgattcagaggctgagacctgtgcatgctcatctctatttgcagccaggaatggaagatgggtcagatgatatggatacctcagtagaagatattggtggtcgttcatgtgtcactcgctttgtgagaaccctgttattaattatggaacatggtgtaaaacctcacagtaaacatcttacagagtattttgccttcctttacgaatttgcaaaaatgggtgaagaagagagccaatttttgctttcattgcaagctatatctacaatggtacatttttacatgggaacaaaaggacctgaaaatcctcaagttgaagtgttatcagaggaagaaggggaagaagaagaggaggaagaagatatcctctctctggcagaagaaaaatacaggccagctgcccttgaaaagatgatagctttagttgctcttttggttgaacagtctcgatcagaaaggcatttgacattatcacagactgacatggcagcattaacaggaggaaagggatttcccttcttgtttcaacatattcgtgatggcatcaatataagacaaacttgtaatctgattttcagcctgtgtcgatacaataatcgacttgcagaacatattgtatctatgcttttcacatcaatagcaaagttgactcctgaggcagccaatcctttctttaagttgttgactatgctaatggagtttgctggtggacctccaggaatgcctccctttgcatcttatattctgcagaggatatgggaggtgattgaatacaatccttctcagtgtctagattggttggcagtgcagacaccccgaaataaactggcacacagctgggtcttacagaatatggaaaactgggtcgagcggtttcttttggctcacaattatcctagagtgaggacttctgcagcttatcttctggtgtcccttataccaagcaattcattccgtcagatgttccggtcaacaaggtctttgcacatcccaacccgtgaccttccactcagtccagacacaacagtagtcctacatcaggtctacaacgtgctccttggtttgctctcaagagccaaactttatgttgatgctgctgttcatggcactacaaagctagtgccctattttagctttatgacttactgtttaatttccaaaactgagaagctgatgttttccacatatttcatggatttgtggaaccttttccagcctaaactttctgagccagcaatagctacaaatcacaataaacaggctttgctttcattttggtacaatgtctgtgctgactgtccagagaatatccgccttattgttcagaacccagtggtaaccaagaacattgccttcaattacatccttgctgaccatgatgatcaggatgtggtgctttttaaccgtgggatgctgccagcgtactatggcattctgaggctctgctgtgagcagtctcctgcattcacacgacaactggcttctcaccagaacatccagtgggcctttaagaatcttacaccacatgccagccaataccctggagcagtagaagaactgtttaacctgatgcagctgtttatagctcagaggccagatatgagagaagaagaattagaagatattaaacagttcaagaaaacaaccataagttgttacttacgttgcttagatggccgctcctgctggactactttaataagtgccttcagaatactattagaatctgatgaagacagacttcttgttgtatttaatcgaggattgattctaatgacagagtctttcaacactttgcacatgatgtatcacgaagctacagcttgccatgtgactggagatttagtagaacttctgtcaatatttctttcggttttgaagtctacacgcccttatcttcagagaaaagatgtgaaacaagcattaatccagtggcaggagcgaattgaatttgcccataaactgttaactcttcttaattcctatagtcctccagaacttagaaatgcctgtatagatgtcctcaaggaacttgtacttttgagtccccatgattttcttcatactctggttccctttctacaacacaaccattgtacttaccatcacagtaatataccaatgtctcttggaccttatttcccttgtcgagaaaatatcaagctaataggagggaaaagcaatattcggcctccgcgccctgaactcaatatgtgcctcttgcccacaatggtggaaaccagtaagggcaaagatgacgtttatgatcgtatgctgctagactacttcttttcttatcatcagttcatccatctattatgccgagttgcaatcaactgtgaaaaatttactgaaacattagttaagctgagtgtcctagttgcctatgaaggtttgccacttcatcttgcactgttccccaaactttggactgagctatgccagactcagtctgctatgtcaaaaaactgcatcaagcttttgtgtgaagatcctgttttcgcagaatatattaaatgtatcctaatggatgaaagaacttttttaaacaacaacattgtctacacgttcatgacacatttccttctaaaggttcaaagtcaagtgttttctgaagcaaactgtgccaatttgatcagcactcttattacaaacttgataagccagtatcagaacctacagtctgatttctccaaccgagttgaaatttccaaagcaagtgcttctttaaatggggacctgagggcactcgctttgctcctgtcagtacacactcccaaacagttaaacccagctctaattccaactctgcaagagcttttaagcaaatgcaggacttgtctgcaacagagaaactcactccaagagcaagaagccaaagaaagaaaaactaaagatgatgaaggagcaactcccattaaaaggcggcgtgttagcagtgatgaggagcacactgtagacagctgcatcagtgacatgaaaacagaaaccagggaggtcctgaccccaacgagcacttctgacaatgagaccagagactcctcaattattgatccaggaactgagcaagatcttccttcccctgaaaatagttctgttaaagaataccgaatggaagttccatcttcgttttcagaagacatgtcaaatatcaggtcacagcatgcagaagaacagtccaacaatggtagatatgacgattgtaaagaatttaaagacctccactgttccaaggattctaccctagctgaggaagaatctgagttcccttctacttctatctctgcagttctgtctgacttagctgacttgagaagctgtgatggccaagctttgccctcccaggaccctgaggttgctttatctctcagttgtggccattccagaggactctttagtcatatgcagcaacatgacattttagataccctgtgtaggaccattgaatctacaatccatgtcgtcacaaggatatctggcaaaggaaaccaagctgcttcttgacattaggtgtagcatgtctacttttaagtccctcacccccaacccccatgctgtttgtataagttttgcttatttgtttttgtgcttcagtttgtccagtgctctctgcttgaatggcaagatagatttataggcttaattcttggtcaggcagaactccagatgaaaaaaacttgcatcttcagtatacttcctaaagggcaatcagataatggatatgttttatgtaattaagagttcactttagtggctttcatttaatatggctgtctgggaagaacagggttgcctagccctgtacaatgtaatttaaacttacagcatttttactgtgtatgatatggtgtcctctgtgccagttttgtaccttatagaggcagattgcctccgatcgctgtggttcttattatcaaaattaagtttacttgtatacggaacaaccacaagaaatttgattctgtaaagaatcctctttagctgtggcctggcagtatataaatggtgctttatttaacagaatacctgtggaggaaataaagcacacttgatgtaaaaataattgttttatttttattgacatgactgattgattgattgctattctgtgcacttaattaaactgattgtgatgacttttcatttgtttacatacgttgcttcagtcttctcaggtgaaagtagtgagaaaaccgtgaaagaggggggaaacatttatccattatatgctgtttcactggaagtgttaccagcagtccacagaactaatgtgtccccacagacttctcaatcctctccacaccgaagtgcaaaaccacagcagggagatgtgcagggagatgtggagcaaaacacagccaatttgccctcacctcaacatgcttttgaatgcaatataccactgttttacgacctaagatctacacaccttaaaaaccctaaagtaaaataaaggaatagtgt

SEQ ID NO: 452235 - DNA, 2489 bp, Homo sapiens
tttttttttttacctttcccctcctccctcctgcagtctagccaccctatgaaaattatctaataggcagagtggtaccttaatccaagaaagatttggagccacttgcagtaactttttcttttcccagataaagttctaatactcaaaaaagaagagttgatttaagtcccatatccttcaggaatgaggtataggatataaataaattcaaagtaccacattctaagatatttcactaaacattggaatgaatttttcccctttatgtactttaaaatatagaaaatatgcagttatgactagaaatagctgtaatattgtacctgcagagttgagtatctcactagtataatttataattataacctattctgatttcttttcaaatattaggtgtcctagttgcctatgaaggtttgccacttcatcttgcactgttccccaaactttggactgagctatgccagactcagtctgctatgtcaaaaaactgcatcaagcttttgtgtgaagatcctgttttcgcagaatatattaaatgtatcctaatggatgaaagaacttttttaaacaacaacattgtctacacgttcatgacacatttccttctaaaggttcaaagtcaagtgttttctgaagcaaactgtgccaatttgatcagcactcttattacaaacttgataagccagtatcagaacctacagtctgatttctccaaccgagttgaaatttccaaagcaagtgcttctttaaatggggacctgagggcactcgctttgctcctgtcagtacacactcccaaacagttaaacccagctctaattccaactctgcaagagcttttaagcaaatgcaggacttgtctgcaacagagaaactcactccaagagcaagaagccaaagaaagaaaaactaaagatgatgaaggagcaactcccattaaaaggcggcgtgttagcagtgatgaggagcacactgtagacagctgcatcagtgacatgaaaacagaaaccagggaggtcctgaccccaacgagcacttctgacaatgagaccagagactcctcaattattgatccaggaactgagcaagatcttccttcccctgaaaatagttctgttaaagaataccgaatggaagttccatcttcgttttcagaagacatgtcaaatatcaggtcacagcatgcagaagaacagtccaacaatggtagatatgacgattgtaaagaatttaaagacctccactgttccaaggattctaccctagctgaggaagaatctgagttcccttctacttctatctctgcagttctgtctgacttagctgacttgagaagctgtgatggccaagctttgccctcccaggaccctgaggttgctttatctctcagttgtggccattccagaggactctttagtcatatgcagcaacatgacattttagataccctgtgtaggaccattgaatctacaatccatgtcgtcacaaggatatctggcaaaggaaaccaagctgcttcttgacattaggtgtagcatgtctacttttaagtccctcacccccaacccccatgctgtttgtataagttttgcttatttgtttttgtgcttcagtttgtccagtgctctctgcttgaatggcaagatagatttataggcttaattcttggtcaggcagaactccagatgaaaaaaacttgcatcttcagtatacttcctaaagggcaatcagataatggatatgttttatgtaattaagagttcactttagtggctttcatttaatatggctgtctgggaagaacagggttgcctagccctgtacaatgtaatttaaacttacagcatttttactgtgtatgatatggtgtcctctgtgccagttttgtaccttatagaggcagattgcctccgatcgctgtggttcttattatcaaaattaagtttacttgtatacggaacaaccacaagaaatttgattctgtaaagaatcctctttagctgtggcctggcagtatataaatggtgctttatttaacagaatacctgtggaggaaataaagcacacttgatgtaaaaataattgttttatttttattgacatgactgattgattgattgctattctgtgcacttaattaaactgattgtgatgacttttcatttgtttacatacgttgcttcagtcttctcaggtgaaagtagtgagaaaaccgtgaaagaggggggaaacatttatccattatatgctgtttcactggaagtgttaccagcagtccacagaactaatgtgtccccacagacttctcaatcctctccacaccgaagtgcaaaaccacagcagggagatgtgcagggagatgtggagcaaaacacagccaatttgccctcacctcaacatgcttttgaatgcaatataccactgttttacgacctaagatctacacaccttaaaaaccctaaagtaaaataaaggaatagtgt

SEQ ID NO: 452236 - DNA, 490 bp, Homo sapiens
ttttacctttcccctcctccctcctgcagtctagccaccctatgaaaattatctaataggcagagtggtaccttaatccaagaaagatttggagccacttgcagtaactttttcttttcccagataaagttctaatactcaaaaaagaagagttgatttaagtcccatatccttcaggaatgaggtataggatataaataaattcaaagtaccacattctaagatatttcactaaacattggaatgaatttttcccctttatgtactttaaaatatagaaaatatgcagttatgactagaaatagctgtaatattgtacctgcagagttgagtatctcactagtataatttataattataacctattctgatttcttttcaaatattaggtgtcctagttgcctatgaaggtttgccacttcatcttgcactgttccccaaactttggactgagctatgccagactcaggtaaagaaaatgagttttaga

SEQ ID NO: 452237 - DNA, 4143 bp, Homo sapiens
ggctgatgacgactggtggccaatgcagatactaattaagtgccctaatcaaattgtgagacagatgtttcagcgtttgtgtatccatgtgattcagaggctgagacctgtgcatgctcatctctatttgcagccaggaatggaagatgggtcagatgatatggatacctcagtagaagatattggtggtcgttcatgtgtcactcgctttgtgagaaccctgttattaattatggaacatggtgtaaaacctcacagtaaacatcttacagagtattttgccttcctttacgaatttgcaaaaatgggtgaagaagagagccaatttttgctttcattgcaagctatatctacaatggtacatttttacatgggaacaaaaggacctgaaaatcctcaagttgaagtgttatcagaggaagaaggggaagaagaagaggaggaagaagatatcctctctctggcagaagaaaaatacaggccagctgcccttgaaaagatgatagctttagttgctcttttggttgaacagtctcgatcagaaaggcatttgacattatcacagactgacatggcagcattaacaggaggaaagggatttcccttcttgtttcaacatattcgtgatggcatcaatataagacaaacttgtaatctgattttcagcctgtgtcgatacaataatcgacttgcagaacatattgtatctatgcttttcacatcaatagcaaagttgactcctgaggcagccaatcctttctttaagttgttgactatgctaatggagtttgctggtggacctccaggaatgcctccctttgcatcttatattctgcagaggatatgggaggtgattgaatacaatccttctcagtgtctagattggttggcagtgcagacaccccgaaataaactggcacacagctgggtcttacagaatatggaaaactgggtcgagcggtttcttttggctcacaattatcctagagtgaggacttctgcagcttatcttctggtgtcccttataccaagcaattcattccgtcagatgttccggtcaacaaggtctttgcacatcccaacccgtgaccttccactcagtccagacacaacagtagtcctacatcaggtctacaacgtgctccttggtttgctctcaagagccaaactttatgttgatgctgctgttcatggcactacaaagctagtgccctattttagctttatgacttactgtttaatttccaaaactgagaagctgatgttttccacatatttcatggatttgtggaaccttttccagcctaaactttctgagccagcaatagctacaaatcacaataaacaggctttgctttcattttggtacaatgtctgtgctgactgtccagagaatatccgccttattgttcagaacccagtggtaaccaagaacattgccttcaattacatccttgctgaccatgatgatcaggatgtggtgctttttaaccgtgggatgctgccagcgtactatggcattctgaggctctgctgtgagcagtctcctgcattcacacgacaactggcttctcaccagaacatccagtgggcctttaagaatcttacaccacatgccagccaataccctggagcagtagaagaactgtttaacctgatgcagctgtttatagctcagaggccagatatgagagaagaagaattagaagatattaaacagttcaagaaaacaaccataagttgttacttacgttgcttagatggccgctcctgctggactactttaataagtgccttcagaatactattagaatctgatgaagacagacttcttgttgtatttaatcgaggattgattctaatgacagagtctttcaacactttgcacatgatgtatcacgaagctacagcttgccatgtgactggagatttagtagaacttctgtcaatatttctttcggttttgaagtctacacgcccttatcttcagagaaaagatgtgaaacaagcattaatccagtggcaggagcgaattgaatttgcccataaactgttaactcttcttaattcctatagtcctccagaacttagaaatgcctgtatagatgtcctcaaggaacttgtacttttgagtccccatgattttcttcatactctggttccctttctacaacacaaccattgtacttaccatcacagtaatataccaatgtctcttggaccttatttcccttgtcgagaaaatatcaagctaataggagggaaaagcaatattcggcctccgcgccctgaactcaatatgtgcctcttgcccacaatggtggaaaccagtaagggcaaagatgacgtttatgatcgtatgctgctagactacttcttttcttatcatcagttcatccatctattatgccgagttgcaatcaactgtgaaaaatttactgaaacattagttaagctgagtgtcctagttgcctatgaaggtttgccacttcatcttgcactgttccccaaactttggactgagctatgccagactcagtctgctatgtcaaaaaactgcatcaagcttttgtgtgaagatcctgttttcgcagaatatattaaatgtatcctaatggatgaaagaacttttttaaacaacaacattgtctacacgttcatgacacatttccttctaaaggttcaaagtcaagtgttttctgaagcaaactgtgccaatttgatcagcactcttattacaaacttgataagccagtatcagaacctacagtctgatttctccaaccgagttgaaatttccaaagcaagtgcttctttaaatggggacctgagggcactcgctttgctcctgtcagtacacactcccaaacagttaaacccagctctaattccaactctgcaagagcttttaagcaaatgcaggacttgtctgcaacagagaaactcactccaagagcaagaagccaaagaaagaaaaactaaagatgatgaaggagcaactcccattaaaaggcggcgtgttagcagtgatgaggagcacactgtagacagctgcatcagtgacatgaaaacagaaaccagggaggtcctgaccccaacgagcacttctgacaatgagaccagagactcctcaattattgatccaggaactgagcaagatcttccttcccctgaaaatagttctgttaaagaataccgaatggaagttccatcttcgttttcagaagacatgtcaaatatcaggtcacagcatgcagaagaacagtccaacaatggtagatatgacgattgtaaagaatttaaagacctccactgttccaaggattctaccctagctgaggaagaatctgagttcccttctacttctatctctgcagttctgtctgacttagctgacttgagaagctgtgatggccaagctttgccctcccaggaccctgaggttgctttatctctcagttgtggccattccagaggactctttagtcatatgcagcaacatgacattttagataccctgtgtaggaccattgaatctacaatccatgtcgtcacaaggatatctggcaaaggaaaccaagctgcttcttgacattaggtgtagcatgtctacttttaagtccctcacccccaacccccatgctgtttgtataagttttgcttatttgtttttgtgcttcagtttgtccagtgctctctgcttgaatggcaagatagatttataggcttaattcttggtcaggcagaactccagatgaaaaaaacttgcatcttcagtatacttcctaaagggcaatcagataatggatatgttttatgtaattaagagttcactttagtggctttcatttaatatggctgtctgggaagaacagggttgcctagccctgtacaatgtaatttaaacttacagcatttttactgtgtatgatatggtgtcctctgtgccagttttgtaccttatagaggcagattgcctccgatcgctgtggttcttattatcaaaattaagtttacttgtatacggaacaaccacaagaaatttgattctgtaaagaatcctctttagctgtggcctggcagtatataaatggtgctttatttaacagaatacctgtggaggaaataaagcacacttgatgt

SEQ ID NO: 452238 - DNA, 1778 bp, Homo sapiens
gaaagaatggattcctgggaaaataaacatctgcaattaactgtaaacaactgcatcaaagtgttggctttagaatttgaaatgttcctatctgggtttttgtaggacctgagggcactcgctttgctcctgtcagtacacactcccaaacagttaaacccagctctaattccaactctgcaagagcttttaagcaaatgcaggacttgtctgcaacagagaaactcactccaagagcaagaagccaaagaaagaaaaactaaagatgatgaaggagcaactcccattaaaaggcggcgtgttagcagtgatgaggagcacactgtagacagctgcatcagtgacatgaaaacagaaaccagggaggtcctgaccccaacgagcacttctgacaatgagaccagagactcctcaattattgatccaggaactgagcaagatcttccttcccctgcatgtcaaatatcaggtcacagcatgcagaagaacagtccaacaatggtagatatgacgattgtaaagaatttaaagacctccactgttccaaggattctaccctagctgaggaagaatctgagttcccttctacttctatctctgcagttctgtctgacttagctgacttgagaagctgtgatggccaagctttgccctcccaggaccctgaggttgctttatctctcagttgtggccattccagaggactctttagtcatatgcagcaacatgacattttagataccctgtgtaggaccattgaatctacaatccatgtcgtcacaaggatatctggcaaaggaaaccaagctgcttcttgacattaggtgtagcatgtctacttttaagtccctcacccccaacccccatgctgtttgtataagttttgcttatttgtttttgtgcttcagtttgtccagtgctctctgcttgaatggcaagatagatttataggcttaattcttggtcaggcagaactccagatgaaaaaaacttgcatcttcagtatacttcctaaagggcaatcagataatggatatgttttatgtaattaagagttcactttagtggctttcatttaatatggctgtctgggaagaacagggttgcctagccctgtacaatgtaatttaaacttacagcatttttactgtgtatgatatggtgtcctctgtgccagttttgtaccttatagaggcagattgcctccgatcgctgtggttcttattatcaaaattaagtttacttgtatacggaacaaccacaagaaatttgattctgtaaagaatcctctttagctgtggcctggcagtatataaatggtgctttatttaacagaatacctgtggaggaaataaagcacacttgatgtaaaaataattgttttatttttattgacatgactgattgattgattgctattctgtgcacttaattaaactgattgtgatgacttttcatttgtttacatacgttgcttcagtcttctcaggtgaaagtagtgagaaaaccgtgaaagaggggggaaacatttatccattatatgctgtttcactggaagtgttaccagcagtccacagaactaatgtgtccccacagacttctcaatcctctccacaccgaagtgcaaaaccacagcagggagatgtgcagggagatgtggagcaaaacacagccaatttgccctcacctcaacatgcttttgaatgcaatataccactgttttacgacctaagatctacacaccttaaaaaccctaaagtaaaataaaggaatagtgt

SEQ ID NO: 452239 - DNA, 5238 bp, Homo sapiens
caacaatttacaacgtctttgtttctgctatgcagtgccctcctgctagagatggcaaaaatgtggggagggcttcagagcattctaagcctggtatttctggctggaatttttaaatctcactacaatcctgacaagagaccacgaccttaatctcccacggcatgactggttagtcttgatcgtaagccatataatcaacacccaaatgtgcataacacatctaaataatgtcaaaactacactatataccacgcaggggaccagaaatcaatctttacctcaaaaggataagcttccaggatgcaataacatccccttccacccttttctacaccctaaaacagtaatattcacggtaacagcaaagcggaaatcagcttttcctgaacatgtactgaattctagtcacattcacacacgttaattcatttaattccagccacaaggtaggcagcctctgttaacattttacaattgtgagaacgcagagatctgggactggctcaaggtgacacactgcagcaaggagtcagaatttgaatccgaagcagtgtccttccccctcgcaacagctgcggcgttacaaacacaggtcagccacggagaaattaatgacccacagccatccttgcagctctgcgccataactggggagacaagctggttcccgtgactcttcagtctgttttcacccaagtgcatgactgcgggagcaaagcgaccacgtgagcatcccccccccacccccccgcttcccccaggcgagggacagtgccaggccaaggacaagtcacaggtgcaacaacgtgccagaactggatccggagccccagggcgcaagatctcccgcagcgtcacccggcagagggacgggtgtggccaccgggcgcggcagctcctgcgtgcgctgaaagtgcggctggaggcgcggacggctttccggagccccgagagaggagctaggaatgactttggtcgcagcctctgtaaccccgcatgacggcctctagggggacagcgaggtccccctcgatctctggctgtaatcagccggcggggccagacggtgccgagactccagggcgaggccgcagggagggggctgtcccgccccacgtggaccggctccccgctgggggcgtggccgccgaagcgggccgggccaatgagcgccaccgtcgggctcacccggctgggcacgccgggccgaggagggctgcgtcatgccgggggcggggcttcggggccggcgcgaggcgcggcggggtcacgcgggtcgctgcgcgggctataagtaggggccggcggggtgctccgctggagtgatggctgccggcgctctctgcgtggttcttcttctcggccgctgaaacccccgcggctgcttcctgggaaggtcgtgagtcccgctgagctgtccccggtgccgccgacccgggccgtgtgcccgtggctccagccgctgccgcctcgatctcctcgtctcccgctccgccctcccttttccctggatgaacttgcgtcctttctcttctccgccatggaattctgctccgtgcttttagccctcctgagccaaagaaaccccagacaacagatgcccatacgcagcgtatagcagtaactccccagctcggtttctgtgccgtagtttacagtatttaattttatataatatatattatttattatagcatttttgatacctcatattctgtttacacatcttgaaaggcgctcagtagttctcttactaaacaaccactactccagagaatggcaacgctgattaccagtactacagctgctaccgccgcttctggtcctttggtggactacctatggatgctcatcctgggcttcattattgcatttgtcttggcattctccgtgggagccaatgatgtagcaaattcttttggtacagctgtgggctcaggtgtagtgaccctgaagcaagcctgcatcctagctagcatctttgaaacagtgggctctgtcttactgggggccaaagtgagcgaaaccatccggaagggcttgattgacgtggagatgtacaactcgactcaagggctactgatggccggctcagtcagtgctatgtttggttctgctgtgtggcaactcgtggcttcgtttttgaagctccctatttctggaacccattgtattgttggtgcaactattggtttctccctcgtggcaaaggggcaggagggtgtcaagtggtctgaactgataaaaattgtgatgtcttggttcgtgtccccactgctttctggaattatgtctggaattttattcttcctggttcgtgcattcatcctccataaggcagatccagttcctaatggtttgcgagctttgccagttttctatgcctgcacagttggaataaacctcttttccatcatgtatactggagcaccgttgctgggctttgacaaacttcctctgtggggtaccatcctcatctcggtgggatgtgcagttttctgtgcccttatcgtctggttctttgtatgtcccaggatgaagagaaaaattgaacgagaaataaagtgtagtccttctgaaagccccttaatggaaaaaaagaatagcttgaaagaagaccatgaagaaacaaagttgtctgttggtgatattgaaaacaagcatcctgtttctgaggtagggcctgccactgtgcccctccaggctgtggtggaggagagaacagtctcattcaaacttggagatttggaggaagctccagagagagagaggcttcccagcgtggacttgaaagaggaaaccagcatagatagcaccgtgaatggtgcagtgcagttgcctaatgggaaccttgtccagttcagtcaagccgtcagcaaccaaataaactccagtggccactaccagtatcacaccgtgcataaggattccggcctgtacaaagagctactccataaattacatcttgccaaggtgggagattgcatgggagactccggtgacaaacccttaaggcgcaataatagctatacttcctataccatggcaatatgtggcatgcctctggattcattccgtgccaaagaaggtgaacagaagggcgaagaaatggagaagctgacatggcctaatgcagactccaagaagcgaattcgaatggacagttacaccagttactgcaatgctgtgtctgaccttcactcagcatctgagatagacatgagtgtcaaggcagagatgggtctaggtgacagaaaaggaagtaatggctctctagaagaatggtatgaccaggataagcctgaagtctctctcctcttccagttcctgcagatccttacagcctgctttgggtcattcgcccatggtggcaatgacgtaagcaatgccattgggcctctggttgctttatatttggtttatgacacaggagatgtttcttcaaaagtggcaacaccaatatggcttctactctatggtggtgttggtatctgtgttggtctgtgggtttggggaagaagagttatccagaccatggggaaggatctgacaccgatcacaccctctagtggcttcagtattgaactggcatctgccctcactgtggtgattgcatcaaatattggccttcccatcagtacaacacattgtaaagtgggctctgttgtgtctgttggctggctccggtccaagaaggctgttgactggcgtctctttcgtaacatttttatggcctggtttgtcacagtccccatttctggagttatcagtgctgccatcatggcaatcttcagatatgtcatcctcagaatgtgaagctgtttgagattaaaatttgtgtcaatgtttgggaccatcttaggtattcctgctcccctgaagaatgattacagtgttaacagaagactgacaagagtctttttatttgggagccagaggagggaagtgttacttgtgctataactgcttttgtgctaaatatgaattgtctcaaaattagctgtgtaaaatagcccgggttccactggctcctgctgaggtcccctttccttctgggctgtgaattcctgtacatatttctctactttttgtatcaggcttcaattccattatgttttaatgttgtctctgaagatgacttgtgatttttttttcttttttttaaaccatgaagagccgtttgacagagcatgctctgcgttgttggtttcaccagcttctgccctcacatgcacagggatttaacaacaaaaatataactacaacttcccttgtagtctcttatataagtagagtccttggtactctgccctcctgtcagtagtggcaggatctattggcatattcgggagcttcttagagggatgaggttctttgaacacagtgaaaatttaaattagtaacttttttgcaagcagtttattgactgttattgctaagaagaagtaagaaagaaaaagcctgttggcaatcttggttatttctttaagatttctggcagtgtgggatggatgaatgaagtggaatgtgaactttgggcaagttaaatgggacagccttccatgttcatttgtctacctcttaactgaataaaaaagcctacagtttttagaaaaaaaaaaaaaaaaaaaaaaaaaaaaaaaaaaaaaaaacacgaacagaaagaacaagaaaaacaaaagaagcggaaggacgcaccagcaagaagacgacccacgcagaggggacgcaacaggcttcgcacggcaccgagcacaggctgtggtggtgacaacaagaggaccctccacaaagcgagggacgcaacatgcaacacaagaccagagcgagccgagtgtgcaaacaacacccacagcgcatagactaacaccgcccagacgggactaccatgttggagaggacaaccctcaactatgagaggggaccaccagggaccacaatccaccaccgaactagcatcgggagcaacaaaaaaagaaatcacacatggaagagcacagacacaactgcgggtcagcgcgcacaacggacacgcgcgtagctgacccacatatcggcacaacctggatgcaaaacagaagggagcacgacagcaccacaacaaacaacgagaagcgaggaggagaagagaaggacgcgccgcgagccaagatgacccaacggcgggagcgacgccgcggcgaagagacacgaagcgcacagagagcagcgaagaaacagaaacgagccatccca

SEQ ID NO: 452240 - DNA, 4493 bp, Homo sapiens
caacaatttacaacgtctttgtttctgctatgcagtgccctcctgctagagatggcaaaaatgtggggagggcttcagagcattctaagcctggtatttctggctggaatttttaaatctcactacaatcctgacaagagaccacgaccttaatctcccacggcatgactggttagtcttgatcgtaagccatataatcaacacccaaatgtgcataacacatctaaataatgtcaaaactacactatataccacgcaggggaccagaaatcaatctttacctcaaaaggataagcttccaggatgcaataacatccccttccacccttttctacaccctaaaacagtaatattcacggtaacagcaaagcggaaatcagcttttcctgaacatgtactgaattctagtcacattcacacacgttaattcatttaattccagccacaaggtaggcagcctctgttaacattttacaattgtgagaacgcagagatctgggactggctcaaggtgacacactgcagcaaggagtcagaatttgaatccgaagcagtgtccttccccctcgcaacagctgcggcgttacaaacacaggtcagccacggagaaattaatgacccacagccatccttgcagctctgcgccataactggggagacaagctggttcccgtgactcttcagtctgttttcacccaagtgcatgactgcgggagcaaagcgaccacgtgagcatcccccccccacccccccgcttcccccaggcgagggacagtgccaggccaaggacaagtcacaggtgcaacaacgtgccagaactggatccggagccccagggcgcaagatctcccgcagcgtcacccggcagagggacgggtgtggccaccgggcgcggcagctcctgcgtgcgctgaaagtgcggctggaggcgcggacggctttccggagccccgagagaggagctaggaatgactttggtcgcagcctctgtaaccccgcatgacggcctctagggggacagcgaggtccccctcgatctctggctgtaatcagccggcggggccagacggtgccgagactccagggcgaggccgcagggagggggctgtcccgccccacgtggaccggctccccgctgggggcgtggccgccgaagcgggccgggccaatgagcgccaccgtcgggctcacccggctgggcacgccgggccgaggagggctgcgtcatgccgggggcggggcttcggggccggcgcgaggcgcggcggggtcacgcgggtcgctgcgcgggctataagtaggggccggcggggtgctccgctggagtgatggctgccggcgctctctgcgtggttcttcttctcggccgctgaaacccccgcggctgcttcctgggaaggtcgtgagtcccgctgagctgtccccggtgccgccgacccgggccgtgtgcccgtggctccagccgctgccgcctcgatctcctcgtctcccgctccgccctcccttttccctggatgaacttgcgtcctttctcttctccgccatggaattctgctccgtgcttttagccctcctgagccaaagaaaccccagacaacagatgcccatacgcagcgtatagcagtaactccccagctcggtttctgtgccgtagtttacagtatttaattttatataatatatattatttattatagcatttttgatacctcatattctgtttacacatcttgaaaggcgctcagtagttctcttactaaacaaccactactccagagaatggcaacgctgattaccagtactacagctgctaccgccgcttctggtcctttggtggactacctatggatgctcatcctgggcttcattattgcatttgtcttggcattctccgtgggagccaatgatgtagcaaattcttttggtacagctgtgggctcaggtgtagtgaccctgaagcaagcctgcatcctagctagcatctttgaaacagtgggctctgtcttactgggggccaaagtgagcgaaaccatccggaagggcttgattgacgtggagatgtacaactcgactcaagggctactgatggccggctcagtcagtgctatgtttggttctgctgtgtggcaactcgtggcttcgtttttgaagctccctatttctggaacccattgtattgttggtgcaactattggtttctccctcgtggcaaaggggcaggagggtgtcaagtggtctgaactgataaaaattgtgatgtcttggttcgtgtccccactgctttctggaattatgtctggaattttattcttcctggttcgtgcattcatcctccataaggcagatccagttcctaatggtttgcgagctttgccagttttctatgcctgcacagttggaataaacctcttttccatcatgtatactggagcaccgttgctgggctttgacaaacttcctctgtggggtaccatcctcatctcggtgggatgtgcagttttctgtgcccttatcgtctggttctttgtatgtcccaggatgaagagaaaaattgaacggcctgccactgtgcccctccaggctgtggtggaggagagaacagtctcattcaaacttggagatttggaggaagctccagagagagagaggcttcccagcgtggacttgaaagaggaaaccagcatagatagcaccgtgaatggtgcagtgcagttgcctaatgggaaccttgtccagttcagtcaagccgtcagcaaccaaataaactccagtggccactaccagtatcacaccgtgcataaggattccggcctgtacaaagagctactccataaattacatcttgccaaggtgggagattgcatgggagactccggtgacaaacccttaaggcgcaataatagctatacttcctataccatggcaatatgtggcatgcctctggattcattccgtgccaaagaaggtgaacagaagggcgaagaaatggagaagctgacatggcctaatgcagactccaagaagcgaattcgaatggacagttacaccagttactgcaatgctgtgtctgaccttcactcagcatctgagatagacatgagtgtcaaggcagagatgggtctaggtgacagaaaaggaagtaatggctctctagaagaatggtatgaccaggataagcctgaagtctctctcctcttccagttcctgcagatccttacagcctgctttgggtcattcgcccatggtggcaatgacgtaagcaatgccattgggcctctggttgctttatatttggtttatgacacaggagatgtttcttcaaaagtggcaacaccaatatggcttctactctatggtggtgttggtatctgtgttggtctgtgggtttggggaagaagagttatccagaccatggggaaggatctgacaccgatcacaccctctagtggcttcagtattgaactggcatctgccctcactgtggtgattgcatcaaatattggccttcccatcagtacaacacattgtaaagtgggctctgttgtgtctgttggctggctccggtccaagaaggctgttgactggcgtctctttcgtaacatttttatggcctggtttgtcacagtccccatttctggagttatcagtgctgccatcatggcaatcttcagatatgtcatcctcagaatgtgaagctgtttgagattaaaatttgtgtcaatgtttgggaccatcttaggtattcctgctcccctgaagaatgattacagtgttaacagaagactgacaagagtctttttatttgggagccagaggagggaagtgttacttgtgctataactgcttttgtgctaaatatgaattgtctcaaaattagctgtgtaaaatagcccgggttccactggctcctgctgaggtcccctttccttctgggctgtgaattcctgtacatatttctctactttttgtatcaggcttcaattccattatgttttaatgttgtctctgaagatgacttgtgatttttttttcttttttttaaaccatgaagagccgtttgacagagcatgctctgcgttgttggtttcaccagcttctgccctcacatgcacagggatttaacaacaaaaatataactacaacttcccttgtagtctcttatataagtagagtccttggtactctgccctcctgtcagtagtggcaggatctattggcatattcgggagcttcttagagggatgaggttctttgaacacagtgaaaatttaaattagtaacttttttgcaagcagtttattgactgttattgctaagaagaagtaagaaagaaaaagcctgttggcaatcttggttatttctttaagatttctggcagtgtgggatggatgaatgaagtggaatgtgaactttgggcaagttaaatgggacagccttccatgttcatttgtctacctcttaactgaataaaaaagcctacagtttttagaaaa

SEQ ID NO: 452241 - DNA, 4565 bp, Homo sapiens
caacaatttacaacgtctttgtttctgctatgcagtgccctcctgctagagatggcaaaaatgtggggagggcttcagagcattctaagcctggtatttctggctggaatttttaaatctcactacaatcctgacaagagaccacgaccttaatctcccacggcatgactggttagtcttgatcgtaagccatataatcaacacccaaatgtgcataacacatctaaataatgtcaaaactacactatataccacgcaggggaccagaaatcaatctttacctcaaaaggataagcttccaggatgcaataacatccccttccacccttttctacaccctaaaacagtaatattcacggtaacagcaaagcggaaatcagcttttcctgaacatgtactgaattctagtcacattcacacacgttaattcatttaattccagccacaaggtaggcagcctctgttaacattttacaattgtgagaacgcagagatctgggactggctcaaggtgacacactgcagcaaggagtcagaatttgaatccgaagcagtgtccttccccctcgcaacagctgcggcgttacaaacacaggtcagccacggagaaattaatgacccacagccatccttgcagctctgcgccataactggggagacaagctggttcccgtgactcttcagtctgttttcacccaagtgcatgactgcgggagcaaagcgaccacgtgagcatcccccccccacccccccgcttcccccaggcgagggacagtgccaggccaaggacaagtcacaggtgcaacaacgtgccagaactggatccggagccccagggcgcaagatctcccgcagcgtcacccggcagagggacgggtgtggccaccgggcgcggcagctcctgcgtgcgctgaaagtgcggctggaggcgcggacggctttccggagccccgagagaggagctaggaatgactttggtcgcagcctctgtaaccccgcatgacggcctctagggggacagcgaggtccccctcgatctctggctgtaatcagccggcggggccagacggtgccgagactccagggcgaggccgcagggagggggctgtcccgccccacgtggaccggctccccgctgggggcgtggccgccgaagcgggccgggccaatgagcgccaccgtcgggctcacccggctgggcacgccgggccgaggagggctgcgtcatgccgggggcggggcttcggggccggcgcgaggcgcggcggggtcacgcgggtcgctgcgcgggctataagtaggggccggcggggtgctccgctggagtgatggctgccggcgctctctgcgtggttcttcttctcggccgctgaaacccccgcggctgcttcctgggaaggtcgtgagtcccgctgagctgtccccggtgccgccgacccgggccgtgtgcccgtggctccagccgctgccgcctcgatctcctcgtctcccgctccgccctcccttttccctggatgaacttgcgtcctttctcttctccgccatggaattctgctccgtgcttttagccctcctgagccaaagaaaccccagacaacagatgcccatacgcagcgtatagcagtaactccccagctcggtttctgtgccgtagtttacagtatttaattttatataatatatattatttattatagcatttttgatacctcatattctgtttacacatcttgaaaggcgctcagtagttctcttactaaacaaccactactccagagaatggcaacgctgattaccagtactacagctgctaccgccgcttctggtcctttggtggactacctatggatgctcatcctgggcttcattattgcatttgtcttggcattctccgtgggagccaatgatgtagcaaattcttttggtacagctgtgggctcaggtgtagtgaccctgaagcaagcctgcatcctagctagcatctttgaaacagtgggctctgtcttactgggggccaaagtgagcgaaaccatccggaagggcttgattgacgtggagatgtacaactcgactcaagggctactgatggccggctcagtcagtgctatgtttggttctgctgtgtggcaactcgtggcttcgtttttgaagctccctatttctggaacccattgtattgttggtgcaactattggtttctccctcgtggcaaaggggcaggagggtgtcaagtggtctgaactgataaaaattgtgatgtcttggttcgtgtccccactgctttctggaattatgtctggaattttattcttcctggttcgtgcattcatcctccataaggcagatccagttcctaatggtttgcgagctttgccagttttctatgcctgcacagttggaataaacctcttttccatcatgtatactggagcaccgttgctgggctttgacaaacttcctctgtggggtaccatcctcatctcggtgggatgtgcagttttctgtgcccttatcgtctggttctttgtatgtcccaggatgaagagaaaaattgaacgagaaataaagtgtagtccttctgaaagccccttaatggaaaaaaagaatagcttgaaagaagaccatgaagaaacaaagttgtctgttggtgatattgaaaacaagcatcctgtttctgaggtagggcctgccactgtgcccctccaggctgtggtggaggagagaacagtctcattcaaacttggagatttggaggaagctccagagagagagaggcttcccagcgtggacttgaaagaggaaaccagcatagatagcaccgtgaatggtgcagtgcagttgcctaatgggaaccttgtccagttcagtcaagccgtcagcaaccaaataaactccagtggccactaccagtatcacaccgtgcataaggattccggcctgtacaaagagctactccataaattacatcttgccaaggtgggagattgcatgggagactccggtgacaaacccttaaggcgcaataatagctatacttcctataccatggcaatatgtggcatgcctctggattcattccgtgccaaagaaggtgaacagaagggcgaagaaatggagaagctgacatggcctaatgcagactccaagaagcgaattcgaatggacagttacaccagttactgcaatgctgtgtctgaccttcactcagcatctgagatagacatgagtgtcaaggcagagatgggtctaggtgacagaaaaggaagtaatggctctctagaagaatggtatgaccaggataagcctgaagtctctctcctcttccagttcctgcagatccttacagcctgctttgggtcattcgcccatggtggcaatgacgtaagcaatgccattgggcctctggttgctttatatttggtttatgacacaggagatgtttcttcaaaagtggcaacaccaatatggcttctactctatggtggtgttggtatctgtgttggtctgtgggtttggggaagaagagttatccagaccatggggaaggatctgacaccgatcacaccctctagtggcttcagtattgaactggcatctgccctcactgtggtgattgcatcaaatattggccttcccatcagtacaacacattgtaaagtgggctctgttgtgtctgttggctggctccggtccaagaaggctgttgactggcgtctctttcgtaacatttttatggcctggtttgtcacagtccccatttctggagttatcagtgctgccatcatggcaatcttcagatatgtcatcctcagaatgtgaagctgtttgagattaaaatttgtgtcaatgtttgggaccatcttaggtattcctgctcccctgaagaatgattacagtgttaacagaagactgacaagagtctttttatttgggagccagaggagggaagtgttacttgtgctataactgcttttgtgctaaatatgaattgtctcaaaattagctgtgttgaattcctgtacatatttctctactttttgtatcaggcttcaattccattatgttttaatgttgtctctgaagatgacttgtgatttttttttcttttttttaaaccatgaagagccgtttgacagagcatgctctgcgttgttggtttcaccagcttctgccctcacatgcacagggatttaacaacaaaaatataactacaacttcccttgtagtctcttatataagtagagtccttggtactctgccctcctgtcagtagtggcaggatctattggcatattcgggagcttcttagagggatgaggttctttgaacacagtgaaaatttaaattagtaacttttttgcaagcagtttattgactgttattgctaagaagaagtaagaaagaaaaagcctgttggcaatcttggttatttctttaagatttctggcagtgtgggatggatgaatgaagtggaatgtgaactttgggcaagttaaatgggacagccttccatgttcatttgtctacctcttaactgaataaaaaagcctacagtttttagaaaa

SEQ ID NO: 452242 - DNA, 2205 bp, Homo sapiens
agatgcaccattttatctcctagtgctgggctttgacaaacttcctctgtggggtaccatcctcatctcggtgggatgtgcagttttctgtgcccttatcgtctggttctttgtatgtcccaggatgaagagaaaaattgaacgagaaataaagtgtagtccttctgaaagccccttaatggaaaaaaagaatagcttgaaagaagaccatgaagaaacaaagttgtctgttggtgatattgaaaacaagcatcctgtttctgaggtagggcctgccactgtgcccctccaggctgtggtggaggagagaacagtctcattcaaacttggagatttggaggaagctccagagagagagaggcttcccagcgtggacttgaaagaggaaaccagcatagatagcaccgtgaatggtgcagtgcagttgcctaatgggaaccttgtccagttcagtcaagccgtcagcaaccaaataaactccagtggccactaccagtatcacaccgtgcataaggattccggcctgtacaaagagctactccataaattacatcttgccaaggtgggagattgcatgggagactccggtgacaaacccttaaggcgcaataatagctatacttcctataccatggcaatatgtggcatgcctctggattcattccgtgccaaagaaggtgaacagaagggcgaagaaatggagaagctgacatggcctaatgcagactccaagaagcgaattcgaatggacagttacaccagttactgcaatgctgtgtctgaccttcactcagcatctgagatagacatgagtgtcaaggcagagatgggtctaggtgacagaaaaggaagtaatggctctctagaagaatggtatgaccaggataagcctgaagtctctctcctcttccagttcctgcagatccttacagcctgctttgggtcattcgcccatggtggcaatgacgtaagcaatgccattgggcctctggttgctttatatttggtttatgacacaggagatgtttcttcaaaagtggcaacaccaatatggcttctactctatggtggtgttggtatctgtgttggtctgtgggtttggggaagaagagttatccagaccatggggaaggatctgacaccgatcacaccctctagtggcttcagtattgaactggcatctgccctcactgtggtgattgcatcaaatattggccttcccatcagtacaacacattgtaaagtgggctctgttgtgtctgttggctggctccggtccaagaaggctgttgactggcgtctctttcgtaacatttttatggcctggtttgtcacagtccccatttctggagttatcagtgctgccatcatggcaatcttcagatatgtcatcctcagaatgtgaagctgtttgagattaaaatttgtgtcaatgtttgggaccatcttaggtattcctgctcccctgaagaatgattacagtgttaacagaagactgacaagagtctttttatttgggagccagaggagggaagtgttacttgtgctataactgcttttgtgctaaatatgaattgtctcaaaattagctgtgtaaaatagcccgggttccactggctcctgctgaggtcccctttccttctgggctgtgaattcctgtacatatttctctactttttgtatcaggcttcaattccattatgttttaatgttgtctctgaagatgacttgtgatttttttttcttttttttaaaccatgaagagccgtttgacagagcatgctctgcgttgttggtttcaccagcttctgccctcacatgcacagggatttaacaacaaaaatataactacaacttcccttgtagtctcttatataagtagagtccttggtactctgccctcctgtcagtagtggcaggatctattggcatattcgggagcttcttagagggatgaggttctttgaacacagtgaaaatttaaattagtaacttttttgcaagcagtttattgactgttattgctaagaagaagtaagaaagaaaaagcctgttggcaatcttggttatttctttaagatttctggcagtgtgggatggatgaatgaagtggaatgtgaactttgggcaagttaaatgggacagccttccatgttcatttgtctacctcttaactgaataaaaaagcctacagtttttagaaaa

SEQ ID NO: 452243 - DNA, 2584 bp, Homo sapiens
gtaaacgacggtcagatgttgtccgtcttcgttgccctacacttgtatgctagtgtcgcaaattgctggacttgtatagtactgaaatttgagagaatcctcttttgaaaagaatagaattgggtacagttcagatttttagtttcagcttatcagccccatggttgagctactttcccctacagaatgagtcagcagggagctaagaagggttcttatatctgtaaagggttgtaaaaataaaaacaaaacaacaatgtgctacagaagcccgtaaaacctaaaatatttacagaaaaattttgggacccctgacatagggtgttctgcattgctggttgttcccaagtgagagttgctggcaaatgataaagcaggcaggaaaaatgttcctgaatgttaattgaagttcacatacattcttgttttgagatgagttttttgggggtggaggaaaggagacgtggaacaaagtagtatggccacaaccaaaccaaaaaagaccccccttttttttcctaggagaaataaagtgtagtccttctgaaagccccttaatggaaaaaaagaatagcttgaaagaagaccatgaagaaacaaagttgtctgttggtgatattgaaaacaagcatcctgtttctgaggtagggcctgccactgtgcccctccaggctgtggtggaggagagaacagtctcattcaaacttggagatttggaggaagctccagagagagagaggcttcccagcgtggacttgaaagaggaaaccagcatagatagcaccgtgaatggtgcagtgcagttgcctaatgggaaccttgtccagttcagtcaagccgtcagcaaccaaataaactccagtggccactaccagtatcacaccgtgcataaggattccggcctgtacaaagagctactccataaattacatcttgccaaggtgggagattgcatgggagactccggtgacaaacccttaaggcgcaataatagctatacttcctataccatggcaatatgtggcatgcctctggattcattccgtgccaaagaaggtgaacagaagggcgaagaaatggagaagctgacatggcctaatgcagactccaagaagcgaattcgaatggacagttacaccagttactgcaatgctgtgtctgaccttcactcagcatctgagatagacatgagtgtcaaggcagagatgggtctaggtgacagaaaaggaagtaatggctctctagaagaatggtatgaccaggataagcctgaagtctctctcctcttccagttcctgcagatccttacagcctgctttgggtcattcgcccatggtggcaatgacgtaagcaatgccattgggcctctggttgctttatatttggtttatgacacaggagatgtttcttcaaaagtggcaacaccaatatggcttctactctatggtggtgttggtatctgtgttggtctgtgggtttggggaagaagagttatccagaccatggggaaggatctgacaccgatcacaccctctagtggcttcagtattgaactggcatctgccctcactgtggtgattgcatcaaatattggccttcccatcagtacaacacattgtaaagtgggctctgttgtgtctgttggctggctccggtccaagaaggctgttgactggcgtctctttcgtaacatttttatggcctggtttgtcacagtccccatttctggagttatcagtgctgccatcatggcaatcttcagatatgtcatcctcagaatgtgaagctgtttgagattaaaatttgtgtcaatgtttgggaccatcttaggtattcctgctcccctgaagaatgattacagtgttaacagaagactgacaagagtctttttatttgggagccagaggagggaagtgttacttgtgctataactgcttttgtgctaaatatgaattgtctcaaaattagctgtgtaaaatagcccgggttccactggctcctgctgaggtcccctttccttctgggctgtgaattcctgtacatatttctctactttttgtatcaggcttcaattccattatgttttaatgttgtctctgaagatgacttgtgatttttttttcttttttttaaaccatgaagagccgtttgacagagcatgctctgcgttgttggtttcaccagcttctgccctcacatgcacagggatttaacaacaaaaatataactacaacttcccttgtagtctcttatataagtagagtccttggtactctgccctcctgtcagtagtggcaggatctattggcatattcgggagcttcttagagggatgaggttctttgaacacagtgaaaatttaaattagtaacttttttgcaagcagtttattgactgttattgctaagaagaagtaagaaagaaaaagcctgttggcaatcttggttatttctttaagatttctggcagtgtgggatggatgaatgaagtggaatgtgaactttgggcaagttaaatgggacagccttccatgttcatttgtctacctcttaactgaataaaaaagcctacagtttttagaaaa

SEQ ID NO: 452244 - DNA, 4313 bp, Homo sapiens
caacaatttacaacgtctttgtttctgctatgcagtgccctcctgctagagatggcaaaaatgtggggagggcttcagagcattctaagcctggtatttctggctggaatttttaaatctcactacaatcctgacaagagaccacgaccttaatctcccacggcatgactggttagtcttgatcgtaagccatataatcaacacccaaatgtgcataacacatctaaataatgtcaaaactacactatataccacgcaggggaccagaaatcaatctttacctcaaaaggataagcttccaggatgcaataacatccccttccacccttttctacaccctaaaacagtaatattcacggtaacagcaaagcggaaatcagcttttcctgaacatgtactgaattctagtcacattcacacacgttaattcatttaattccagccacaaggtaggcagcctctgttaacattttacaattgtgagaacgcagagatctgggactggctcaaggtgacacactgcagcaaggagtcagaatttgaatccgaagcagtgtccttccccctcgcaacagctgcggcgttacaaacacaggtcagccacggagaaattaatgacccacagccatccttgcagctctgcgccataactggggagacaagctggttcccgtgactcttcagtctgttttcacccaagtgcatgactgcgggagcaaagcgaccacgtgagcatcccccccccacccccccgcttcccccaggcgagggacagtgccaggccaaggacaagtcacaggtgcaacaacgtgccagaactggatccggagccccagggcgcaagatctcccgcagcgtcacccggcagagggacgggtgtggccaccgggcgcggcagctcctgcgtgcgctgaaagtgcggctggaggcgcggacggctttccggagccccgagagaggagctaggaatgactttggtcgcagcctctgtaaccccgcatgacggcctctagggggacagcgaggtccccctcgatctctggctgtaatcagccggcggggccagacggtgccgagactccagggcgaggccgcagggagggggctgtcccgccccacgtggaccggctccccgctgggggcgtggccgccgaagcgggccgggccaatgagcgccaccgtcgggctcacccggctgggcacgccgggccgaggagggctgcgtcatgccgggggcggggcttcggggccggcgcgaggcgcggcggggtcacgcgggtcgctgcgcgggctataagtaggggccggcggggtgctccgctggagtgatggctgccggcgctctctgcgtggttcttcttctcggccgctgaaacccccgcggctgcttcctgggaaggtcgtgagtcccgctgagctgtccccggtgccgccgacccgggccgtgtgcccgtggctccagccgctgccgcctcgatctcctcgtctcccgctccgccctcccttttccctggatgaacttgcgtcctttctcttctccgccatggaattctgctccgtgcttttagccctcctgagccaaagaaaccccagacaacagatgcccatacgcagcgtatagcagtaactccccagctcggtttctgtgccgtagtttacagtatttaattttatataatatatattatttattatagcatttttgatacctcatattctgtttacacatcttgaaaggcgctcagtagttctcttactaaacaaccactactccagagaatggcaacgctgattaccagtactacagctgctaccgccgcttctggtcctttggtggactacctatggatgctcatcctgggcttcattattgcatttgtcttggcattctccgtgggagccaatgatgtagcaaattcttttggtacagctgtgggctcaggtgtagtgaccctgaagcaagcctgcatcctagctagcatctttgaaacagtgggctctgtcttactgggggccaaagtgagcgaaaccatccggaagggcttgattgacgtggagatgtacaactcgactcaagggctactgatggccggctcagtcagtgctatgtttggttctgctgtgtggcaactcgtggcttcgtttttgaagctccctatttctggaacccattgtattgttggtgcaactattggtttctccctcgtggcaaaggggcaggagggtgtcaagtggtctgaactgataaaaattgtgatgtcttggttcgtgtccccactgctttctggaattatgtctggaattttattcttcctggttcgtgcattcatcctccataaggcagatccagttcctaatggtttgcgagctttgccagttttctatgcctgcacagttggaataaacctcttttccatcatgtatactggagcaccgttgctgggctttgacaaacttcctctgtggggtaccatcctcatctcggtgggatgtgcagttttctgtgcccttatcgtctggttctttgtatgtcccaggatgaagagaaaaattgaacgagaaataaagtgtagtccttctgaaagccccttaatggaaaaaaagaatagcttgaaagaagaccatgaagaaacaaagttgtctgttggtgatattgaaaacaagcatcctgtttctgaggtagggcctgccactgtgcccctccaggctgtggtggaggagagaacagtctcattcaaacttggagatttggaggaagctccagagagagagaggcttcccagcgtggacttgaaagaggaaaccagcatagatagcaccgtgaatggtgcagtgcagttgcctaatgggaaccttgtccagttcagtcaagccgtcagcaaccaaataaactccagtggccactaccagtatcacaccgtgcataaggattccggcctgtacaaagagctactccataaattacatcttgccaaggtgggagattgcatgggagactccggtgacaaacccttaaggcgcaataatagctatacttcctataccatggcaatatgtggcatgcctctggattcattccgtgccaaagaaggtgaacagaagggcgaagaaatggagaagctgacatggcctaatgcagactccaagaagcgaattcgaatggacagttacaccagttactgcaatgctgtgtctgaccttcactcagcatctgagatagacatgagtgtcaaggcagagatgggtctaggtgacagaaaaggaagtaatggctctctagaagaatggtatgaccaggataagcctgaagtctctctcctcttccagttcctgcagatccttacagcctgctttgggtcattcgcccatggtggcaatgacgtaagcaatgccattgggcctctggttgctttatatttggtttatgacacaggagatgtttcttcaaaagtggcaacaccaatatggcttctactctatggtggtgttggtatctgtgttggtctgtgggtttggggaagaagagttatccagaccatggggaaggatctgacaccgatcacaccctctagtggcttcagtattgaactggcatctgccctcactgtggtgattgcatcaaatattggccttcccatcagtacaacacattgtaaagtgggctctgttgtgtctgttggctggctccggtccaagaaggctgttgactggcgtctctttcgtaacatttttatggcctggtttgtcacagtccccatttctggagttatcagtgctgccatcatggcaatcttcagatatgtcatcctcagaatgtgaagctgtttgagaaatgattacagtgttaacagaagactgacaagagtctttttatttgggagccagaggagggaagtgttacttgtgctataactgcttttgtgctaaatatgaattgtctcaaaattagctgtgtaaaatagcccgggttccactggctcctgctgaggtcccctttccttctgggctgtgaattcctgtacatatttctctactttttgtatcaggcttcaattccattatgttaatgtgcttgagatgcttggactttatctttttaacatgaagcgtcgcaacatcttggtgaggtcacagtctgctacatccagattacacatattactcacttctgagcctaatagagagctgacttgctctgagatgcagacatgctatcgactctaagtgtgcttgaccggagtactgactatgcgatatgtgttgtagaagtcagaaactggcactgatctagattgcgggatgtagatgagcat

SEQ ID NO: 452245 - DNA, 1068 bp, Homo sapiens
agaatccttttgtgtctgtagtggcttcagtattgaactggcatctgccctcactgtggtgattgcatcaaatattggccttcccatcagtacaacacattgtaaagtgggctctgttgtgtctgttggctggctccggtccaagaaggctgttgactggcgtctctttcgtaacatttttatggcctggtttgtcacagtccccatttctggagttatcagtgctgccatcatggcaatcttcagatatgtcatcctcagaatgtgaagctgtttgagattaaaatttgtgtcaatgtttgggaccatcttaggtattcctgctcccctgaagaatgattacagtgttaacagaagactgacaagagtctttttatttgggagccagaggagggaagtgttacttgtgctataactgcttttgtgctaaatatgaattgtctcaaaattagctgtgtaaaatagcccgggttccactggctcctgctgaggtcccctttccttctgggctgtgaattcctgtacatatttctctactttttgtatcaggcttcaattccattatgttttaatgttgtctctgaagatgacttgtgatttttttttcttttttttaaaccatgaagagccgtttgacagagcatgctctgcgttgttggtttcaccagcttctgccctcacatgcacagggatttaacaacaaaaatataactacaacttcccttgtagtctcttatataagtagagtccttggtactctgccctcctgtcagtagtggcaggatctattggcatattcgggagcttcttagagggatgaggttctttgaacacagtgaaaatttaaattagtaacttttttgcaagcagtttattgactgttattgctaagaagaagtaagaaagaaaaagcctgttggcaatcttggttatttctttaagatttctggcagtgtgggatggatgaatgaagtggaatgtgaactttgggcaagttaaatgggacagccttccatgttcatttgtctacctcttaactgaataaaaaagcctacagtttttagaaaa

SEQ ID NO: 452246 - DNA, 379 bp, Homo sapiens
actctggtctgcctgtgggatttacagccatgatgcacatctctttgttttatagaggtggaaattaaagttgtcgtctttagttccctgcattgagctgtgccactttgcttgaattggtggactgaaatttgagagaatcctcttttgaaaagaatagaattgggtacagttcagatttttagtttcagcttatcagccccatggttgagctactttcccctacagaatgagtcagcagggagctaagaagggttcttatatctgtaaagggttgtaaaaataaaaacaaaacaacaatgtgctacagaagcccgtaaaacctaaaatatttacagaaaaattttgggacccctgacatagggtgttctgcattgct

SEQ ID NO: 452247 - DNA, 525 bp, Homo sapiens
ggcaggaaaaatgttcctgaatgttaattgaagttcacatacattcttgttttgagatgagttttttgggggtggaggaaaggagacgtggaacaaagtagtatggccacaaccaaaccaaaaaagaccccccttttttttcctaggagaaataaagtgtagtccttctgaaagccccttaatggaaaaaaagaatagcttgaaagaagaccatgaagaaacaaagttgtctgttggtgatattgaaaacaagcatcctgtttctgaggtagggcctgccactgtgcccctccaggctgtggtggaggagagaacagtctcattcaaacttggagatttggaggaagctccagagagagagaggcttcccagcgtggacttgaaagaggaaaccagcatagatagcaccgtgaatggtgagttggaattcctggtttcacttttgttacctgcagtggtgaggaggcttattgttttggatttgatgctttttgtattgaatgtcaccttggtgatcttgactag

SEQ ID NO: 452248 - DNA, 4619 bp, Homo sapiens
caacaatttacaacgtctttgtttctgctatgcagtgccctcctgctagagatggcaaaaatgtggggagggcttcagagcattctaagcctggtatttctggctggaatttttaaatctcactacaatcctgacaagagaccacgaccttaatctcccacggcatgactggttagtcttgatcgtaagccatataatcaacacccaaatgtgcataacacatctaaataatgtcaaaactacactatataccacgcaggggaccagaaatcaatctttacctcaaaaggataagcttccaggatgcaataacatccccttccacccttttctacaccctaaaacagtaatattcacggtaacagcaaagcggaaatcagcttttcctgaacatgtactgaattctagtcacattcacacacgttaattcatttaattccagccacaaggtaggcagcctctgttaacattttacaattgtgagaacgcagagatctgggactggctcaaggtgacacactgcagcaaggagtcagaatttgaatccgaagcagtgtccttccccctcgcaacagctgcggcgttacaaacacaggtcagccacggagaaattaatgacccacagccatccttgcagctctgcgccataactggggagacaagctggttcccgtgactcttcagtctgttttcacccaagtgcatgactgcgggagcaaagcgaccacgtgagcatcccccccccacccccccgcttcccccaggcgagggacagtgccaggccaaggacaagtcacaggtgcaacaacgtgccagaactggatccggagccccagggcgcaagatctcccgcagcgtcacccggcagagggacgggtgtggccaccgggcgcggcagctcctgcgtgcgctgaaagtgcggctggaggcgcggacggctttccggagccccgagagaggagctaggaatgactttggtcgcagcctctgtaaccccgcatgacggcctctagggggacagcgaggtccccctcgatctctggctgtaatcagccggcggggccagacggtgccgagactccagggcgaggccgcagggagggggctgtcccgccccacgtggaccggctccccgctgggggcgtggccgccgaagcgggccgggccaatgagcgccaccgtcgggctcacccggctgggcacgccgggccgaggagggctgcgtcatgccgggggcggggcttcggggccggcgcgaggcgcggcggggtcacgcgggtcgctgcgcgggctataagtaggggccggcggggtgctccgctggagtgatggctgccggcgctctctgcgtggttcttcttctcggccgctgaaacccccgcggctgcttcctgggaaggtcgtgagtcccgctgagctgtccccggtgccgccgacccgggccgtgtgcccgtggctccagccgctgccgcctcgatctcctcgtctcccgctccgccctcccttttccctggatgaacttgcgtcctttctcttctccgccatggaattctgctccgtgcttttagccctcctgagccaaagaaaccccagacaacagatgcccatacgcagcgtatagcagtaactccccagctcggtttctgtgccgtagtttacagtatttaattttatataatatatattatttattatagcatttttgatacctcatattctgtttacacatcttgaaaggcgctcagtagttctcttactaaacaaccactactccagagaatggcaacgctgattaccagtactacagctgctaccgccgcttctggtcctttggtggactacctatggatgctcatcctgggcttcattattgcatttgtcttggcattctccgtgggagccaatgatgtagcaaattcttttggtacagctgtgggctcaggtgtagtgaccctgaagcaagcctgcatcctagctagcatctttgaaacagtgggctctgtcttactgggggccaaagtgagcgaaaccatccggaagggcttgattgacgtggagatgtacaactcgactcaagggctactgatggccggctcagtcagtgctatgtttggttctgctgtgtggcaactcgtggcttcgtttttgaagctccctatttctggaacccattgtattgttggtgcaactattggtttctccctcgtggcaaaggggcaggagggtgtcaagtggtctgaactgataaaaattgtgatgtcttggttcgtgtccccactgctttctggaattatgtctggaattttattcttcctggttcgtgcattcatcctccataaggcagatccagttcctaatggtttgcgagctttgccagttttctatgcctgcacagttggaataaacctcttttccatcatgtatactggagcaccgttgctgggctttgacaaacttcctctgtggggtaccatcctcatctcggtgggatgtgcagttttctgtgcccttatcgtctggttctttgtatgtcccaggatgaagagaaaaattgaacgagaaataaagtgtagtccttctgaaagccccttaatggaaaaaaagaatagcttgaaagaagaccatgaagaaacaaagttgtctgttggtgatattgaaaacaagcatcctgtttctgaggtagggcctgccactgtgcccctccaggctgtggtggaggagagaacagtctcattcaaacttggagatttggaggaagctccagagagagagaggcttcccagcgtggacttgaaagaggaaaccagcatagatagcaccgtgaatggtgcagtgcagttgcctaatgggaaccttgtccagttcagtcaagccgtcagcaaccaaataaactccagtggccactaccagtatcacaccgtgcataaggattccggcctgtacaaagagctactccataaattacatcttgccaaggtgggagattgcatgggagactccggtgacaaacccttaaggcgcaataatagctatacttcctataccatggcaatatgtggcatgcctctggattcattccgtgccaaagaaggtgaacagaagggcgaagaaatggagaagctgacatggcctaatgcagactccaagaagcgaattcgaatggacagttacaccagttactgcaatgctgtgtctgaccttcactcagcatctgagatagacatgagtgtcaaggcagagatgggtctaggtgacagaaaaggaagtaatggctctctagaagaatggtatgaccaggataagcctgaagtctctctcctcttccagttcctgcagatccttacagcctgctttgggtcattcgcccatggtggcaatgacgtaagcaatgccattgggcctctggttgctttatatttggtttatgacacaggagatgtttcttcaaaagtggcaacaccaatatggcttctactctatggtggtgttggtatctgtgttggtctgtgggtttggggaagaagagttatccagaccatggggaaggatctgacaccgatcacaccctctagtggcttcagtattgaactggcatctgccctcactgtggtgattgcatcaaatattggccttcccatcagtacaacacattgtaaagtgggctctgttgtgtctgttggctggctccggtccaagaaggctgttgactggcgtctctttcgtaacatttttatggcctggtttgtcacagtccccatttctggagttatcagtgctgccatcatggcaatcttcagatatgtcatcctcagaatgtgaagctgtttgagattaaaatttgtgtcaatgtttgggaccatcttaggtattcctgctcccctgaagaatgattacagtgttaacagaagactgacaagagtctttttatttgggagccagaggagggaagtgttacttgtgctataactgcttttgtgctaaatatgaattgtctcaaaattagctgtgtaaaatagcccgggttccactggctcctgctgaggtcccctttccttctgggctgtgaattcctgtacatatttctctactttttgtatcaggcttcaattccattatgttttaatgttgtctctgaagatgacttgtgatttttttttcttttttttaaaccatgaagagccgtttgacagagcatgctctgcgttgttggtttcaccagcttctgccctcacatgcacagggatttaacaacaaaaatataactacaacttcccttgtagtctcttatataagtagagtccttggtactctgccctcctgtcagtagtggcaggatctattggcatattcgggagcttcttagagggatgaggttctttgaacacagtgaaaatttaaattagtaacttttttgcaagcagtttattgactgttattgctaagaagaagtaagaaagaaaaagcctgttggcaatcttggttatttctttaagatttctggcagtgtgggatggatgaatgaagtggaatgtgaactttgggcaagttaaatgggacagccttccatgttcatttgtctacctcttaactgaataaaaaagcctacagtttttagaaaa

SEQ ID NO: 452249 - DNA, 3736 bp, Homo sapiens
agtgtattgattattgttggaagctgtagggttttactttctgtttttcctccccaagattttccactggaattgtgatcaagataacattaaaccttttaggctaaggtctttataaagtttttagccttcccatatatgtattcagatctttgctcccaatttttttttttttctgagatggagtcttactctgttgcccaggctggagtgaggtggcccagtctccactgactgcaacctctgtctcccaggttcaagtgattctcctgagtcagcctccagagtagctgggactacagatgcttgccaccacatccgggctaatttttttggtatttttagtagagacagggtttcaccgtattacccaggatggtctcgatctcctgacctcatgattgtcctgcctcggcctcccaaagtgctgggattacaggtgtgagccaccgcgcccagcctcctcccattctttcggtgtttgacttgggtgttctcctatagaattaatacatactaggtatggtagaattcttatttttagtcactggccttactgttccttaaacatttcaagtttttgccttagggcctttgcatttgctgatatctctgtctggaacattcagcgcccaaataatcaggtggtttgccccttctgtacccatagttaatgtacacagcttgctagcttactacatttatgtcatgcttattccttgaccctccccacccaaatggtgcccccccttccatcactctcctcttacccttctttatttctcttcacagcatttgtcagtactttacattattccatactagaaggtgagtgtcagttctattagaacaggaacttggtcttattccctcctatatttcggtgcccagaatagcacttggcacacagtcttttgagtgagtggatgaccttgtgcacaatcagttattatcattgaacttcggtaaagcattaattgtggcatctttgtcagatgtttagataagatggttggcgtacgcatagtctgcatgttgtatttttagtctttgaagatatgaagtcaggtaagcaacatcctaacatagtctatttcttgacatctcttacaaacgtagagtatagcctatcctcaggtgtgtgctgaagtttatattagggcttttgggtaccttagaatgtgggtattgcaatctttattcaggatgttatcagtcactggtacagttagtcttgttattaaaagaaaaaagaaaaaaaaacaggtagaagttggaattagccttcgtaggaagaattccagatgcaaatgcaggaaaaactctgttgtccttggaaactactctggagagagttattggcactataattcccaaacctaccctgttaaaagattctgtggaaatgggttaacctttataccttttaagatattgatcttaatgatgttttacaggcagatccagttcctaatggtttgcgagctttgccagttttctatgcctgcacagttggaataaacctcttttccatcatgtatactggagcaccgttgctgggctttgacaaacttcctctgtggggtaccatcctcatctcggtgggatgtgcagttttctgtgcccttatcgtctggttctttgtatgtcccaggatgaagagaaaaattgaacgagaaataaagtgtagtccttctgaaagccccttaatggaaaaaaagaatagcttgaaagaagaccatgaagaaacaaagttgtctgttggtgatattgaaaacaagcatcctgtttctgaggtagggcctgccactgtgcccctccaggctgtggtggaggagagaacagtctcattcaaacttggagatttggaggaagctccagagagagagaggcttcccagcgtggacttgaaagaggaaaccagcatagatagcaccgtgaatggtgcagtgcagttgcctaatgggaaccttgtccagttcagtcaagccgtcagcaaccaaataaactccagtggccactaccagtatcacaccgtgcataaggattccggcctgtacaaagagctactccataaattacatcttgccaaggtgggagattgcatgggagactccggtgacaaacccttaaggcgcaataatagctatacttcctataccatggcaatatgtggcatgcctctggattcattccgtgccaaagaaggtgaacagaagggcgaagaaatggagaagctgacatggcctaatgcagactccaagaagcgaattcgaatggacagttacaccagttactgcaatgctgtgtctgaccttcactcagcatctgagatagacatgagtgtcaaggcagagatgggtctaggtgacagaaaaggaagtaatggctctctagaagaatggtatgaccaggataagcctgaagtctctctcctcttccagttcctgcagatccttacagcctgctttgggtcattcgcccatggtggcaatgacgtaagcaatgccattgggcctctggttgctttatatttggtttatgacacaggagatgtttcttcaaaagtggcaacaccaatatggcttctactctatggtggtgttggtatctgtgttggtctgtgggtttggggaagaagagttatccagaccatggggaaggatctgacaccgatcacaccctctagtggcttcagtattgaactggcatctgccctcactgtggtgattgcatcaaatattggccttcccatcagtacaacacattgtaaagtgggctctgttgtgtctgttggctggctccggtccaagaaggctgttgactggcgtctctttcgtaacatttttatggcctggtttgtcacagtccccatttctggagttatcagtgctgccatcatggcaatcttcagatatgtcatcctcagaatgtgaagctgtttgagattaaaatttgtgtcaatgtttgggaccatcttaggtattcctgctcccctgaagaatgattacagtgttaacagaagactgacaagagtctttttatttgggagccagaggagggaagtgttacttgtgctataactgcttttgtgctaaatatgaattgtctcaaaattagctgtgtaaaatagcccgggttccactggctcctgctgaggtcccctttccttctgggctgtgaattcctgtacatatttctctactttttgtatcaggcttcaattccattatgttttaatgttgtctctgaagatgacttgtgatttttttttcttttttttaaaccatgaagagccgtttgacagagcatgctctgcgttgttggtttcaccagcttctgccctcacatgcacagggatttaacaacaaaaatataactacaacttcccttgtagtctcttatataagtagagtccttggtactctgccctcctgtcagtagtggcaggatctattggcatattcgggagcttcttagagggatgaggttctttgaacacagtgaaaatttaaattagtaacttttttgcaagcagtttattgactgttattgctaagaagaagtaagaaagaaaaagcctgttggcaatcttggttatttctttaagatttctggcagtgtgggatggatgaatgaagtggaatgtgaactttgggcaagttaaatgggacagccttccatgttcatttgtctacctcttaactgaataaaaaagcctacagtttttagaaaa

SEQ ID NO: 452250 - DNA, 2395 bp, Homo sapiens
gatattttttcttaatgtgttctattccagtgatgtcttggttcgtgtccccactgctttctggaattatgtctggaattttattcttcctggttcgtgcattcatcctccataaggcagatccagttcctaatggtttgcgagctttgccagttttctatgcctgcacagttggaataaacctcttttccatcatgtatactggagcaccgttgctgggctttgacaaacttcctctgtggggtaccatcctcatctcggtgggatgtgcagttttctgtgcccttatcgtctggttctttgtatgtcccaggatgaagagaaaaattgaacgagaaataaagtgtagtccttctgaaagccccttaatggaaaaaaagaatagcttgaaagaagaccatgaagaaacaaagttgtctgttggtgatattgaaaacaagcatcctgtttctgaggtagggcctgccactgtgcccctccaggctgtggtggaggagagaacagtctcattcaaacttggagatttggaggaagctccagagagagagaggcttcccagcgtggacttgaaagaggaaaccagcatagatagcaccgtgaatggtgcagtgcagttgcctaatgggaaccttgtccagttcagtcaagccgtcagcaaccaaataaactccagtggccactaccagtatcacaccgtgcataaggattccggcctgtacaaagagctactccataaattacatcttgccaaggtgggagattgcatgggagactccggtgacaaacccttaaggcgcaataatagctatacttcctataccatggcaatatgtggcatgcctctggattcattccgtgccaaagaaggtgaacagaagggcgaagaaatggagaagctgacatggcctaatgcagactccaagaagcgaattcgaatggacagttacaccagttactgcaatgctgtgtctgaccttcactcagcatctgagatagacatgagtgtcaaggcagagatgggtctaggtgacagaaaaggaagtaatggctctctagaagaatggtatgaccaggataagcctgaagtctctctcctcttccagttcctgcagatccttacagcctgctttgggtcattcgcccatggtggcaatgacgtaagcaatgccattgggcctctggttgctttatatttggtttatgacacaggagatgtttcttcaaaagtggcaacaccaatatggcttctactctatggtggtgttggtatctgtgttggtctgtgggtttggggaagaagagttatccagaccatggggaaggatctgacaccgatcacaccctctagtggcttcagtattgaactggcatctgccctcactgtggtgattgcatcaaatattggccttcccatcagtacaacacattgtaaagtgggctctgttgtgtctgttggctggctccggtccaagaaggctgttgactggcgtctctttcgtaacatttttatggcctggtttgtcacagtccccatttctggagttatcagtgctgccatcatggcaatcttcagatatgtcatcctcagaatgtgaagctgtttgagattaaaatttgtgtcaatgtttgggaccatcttaggtattcctgctcccctgaagaatgattacagtgttaacagaagactgacaagagtctttttatttgggagccagaggagggaagtgttacttgtgctataactgcttttgtgctaaatatgaattgtctcaaaattagctgtgtaaaatagcccgggttccactggctcctgctgaggtcccctttccttctgggctgtgaattcctgtacatatttctctactttttgtatcaggcttcaattccattatgttttaatgttgtctctgaagatgacttgtgatttttttttcttttttttaaaccatgaagagccgtttgacagagcatgctctgcgttgttggtttcaccagcttctgccctcacatgcacagggatttaacaacaaaaatataactacaacttcccttgtagtctcttatataagtagagtccttggtactctgccctcctgtcagtagtggcaggatctattggcatattcgggagcttcttagagggatgaggttctttgaacacagtgaaaatttaaattagtaacttttttgcaagcagtttattgactgttattgctaagaagaagtaagaaagaaaaagcctgttggcaatcttggttatttctttaagatttctggcagtgtgggatggatgaatgaagtggaatgtgaactttgggcaagttaaatgggacagccttccatgttcatttgtctacctcttaactgaataaaaaagcctacagtttttagaaaa

SEQ ID NO: 452251 - DNA, 4565 bp, Homo sapiens
caacaatttacaacgtctttgtttctgctatgcagtgccctcctgctagagatggcaaaaatgtggggagggcttcagagcattctaagcctggtatttctggctggaatttttaaatctcactacaatcctgacaagagaccacgaccttaatctcccacggcatgactggttagtcttgatcgtaagccatataatcaacacccaaatgtgcataacacatctaaataatgtcaaaactacactatataccacgcaggggaccagaaatcaatctttacctcaaaaggataagcttccaggatgcaataacatccccttccacccttttctacaccctaaaacagtaatattcacggtaacagcaaagcggaaatcagcttttcctgaacatgtactgaattctagtcacattcacacacgttaattcatttaattccagccacaaggtaggcagcctctgttaacattttacaattgtgagaacgcagagatctgggactggctcaaggtgacacactgcagcaaggagtcagaatttgaatccgaagcagtgtccttccccctcgcaacagctgcggcgttacaaacacaggtcagccacggagaaattaatgacccacagccatccttgcagctctgcgccataactggggagacaagctggttcccgtgactcttcagtctgttttcacccaagtgcatgactgcgggagcaaagcgaccacgtgagcatcccccccccacccccccgcttcccccaggcgagggacagtgccaggccaaggacaagtcacaggtgcaacaacgtgccagaactggatccggagccccagggcgcaagatctcccgcagcgtcacccggcagagggacgggtgtggccaccgggcgcggcagctcctgcgtgcgctgaaagtgcggctggaggcgcggacggctttccggagccccgagagaggagctaggaatgactttggtcgcagcctctgtaaccccgcatgacggcctctagggggacagcgaggtccccctcgatctctggctgtaatcagccggcggggccagacggtgccgagactccagggcgaggccgcagggagggggctgtcccgccccacgtggaccggctccccgctgggggcgtggccgccgaagcgggccgggccaatgagcgccaccgtcgggctcacccggctgggcacgccgggccgaggagggctgcgtcatgccgggggcggggcttcggggccggcgcgaggcgcggcggggtcacgcgggtcgctgcgcgggctataagtaggggccggcggggtgctccgctggagtgatggctgccggcgctctctgcgtggttcttcttctcggccgctgaaacccccgcggctgcttcctgggaaggtcgtgagtcccgctgagctgtccccggtgccgccgacccgggccgtgtgcccgtggctccagccgctgccgcctcgatctcctcgtctcccgctccgccctcccttttccctggatgaacttgcgtcctttctcttctccgccatggaattctgctccgtgcttttagccctcctgagccaaagaaaccccagacaacagatgcccatacgcagcgtatagcagtaactccccagctcggtttctgtgccgtagtttacagtatttaattttatataatatatattatttattatagcatttttgatacctcatattctgtttacacatcttgaaaggcgctcagtagttctcttactaaacaaccactactccagagaatggcaacgctgattaccagtactacagctgctaccgccgcttctggtcctttggtggactacctatggatgctcatcctgggcttcattattgcatttgtcttggcattctccgtgggagccaatgatgtagcaaattcttttggtacagctgtgggctcaggtgtagtgaccctgaagcaagcctgcatcctagctagcatctttgaaacagtgggctctgtcttactgggggccaaagtgagcgaaaccatccggaagggcttgattgacgtggagatgtacaactcgactcaagggctactgatggccggctcagtcagtgctatgtttggttctgctgtgtggcaactcgtggcttcgtttttgaagctccctatttctggaacccattgtattgttggtgcaactattggtttctccctcgtggcaaaggggcaggagggtgtcaagtggtctgaactgataaaaattgtgatgtcttggttcgtgtccccactgctttctggaattatgtctggaattttattcttcctggttcgtgcattcatcctccataaggcagatccagttcctaatggtttgcgagctttgccagttttctatgcctgcacagttggaataaacctcttttccatcatgtatactggagcaccgttgctgggctttgacaaacttcctctgtggggtaccatcctcatctcggtgggatgtgcagttttctgtgcccttatcgtctggttctttgtatgtcccaggatgaagagaaaaattgaacgagaaataaagtgtagtccttctgaaagccccttaatggaaaaaaagaatagcttgaaagaagaccatgaagaaacaaagttgtctgttggtgatattgaaaacaagcatcctgtttctgaggtagggcctgccactgtgcccctccaggctgtggtggaggagagaacagtctcattcaaacttggagatttggaggaagctccagagagagagaggcttcccagcgtggacttgaaagaggaaaccagcatagatagcaccgtgaatggtgcagtgcagttgcctaatgggaaccttgtccagttcagtcaagccgtcagcaaccaaataaactccagtggccactaccagtatcacaccgtgcataaggattccggcctgtacaaagagctactccataaattacatcttgccaaggtgggagattgcatgggagactccggtgacaaacccttaaggcgcaataatagctatacttcctataccatggcaatatgtggcatgcctctggattcattccgtgccaaagaaggtgaacagaagggcgaagaaatggagaagctgacatggcctaatgcagactccaagaagcgaattcgaatggacagttacaccagttactgcaatgctgtgtctgaccttcactcagcatctgagatagacatgagtgtcaaggcagagatgggtctaggtgacagaaaaggaagtaatggctctctagaagaatggtatgaccaggataagcctgaagtctctctcctcttccagttcctgcagatccttacagcctgctttgggtcattcgcccatggtggcaatgacgtaagcaatgccattgggcctctggttgctttatatttggtttatgacacaggagatgtttcttcaaaagtggcaacaccaatatggcttctactctatggtggtgttggtatctgtgttggtctgtgggtttggggaagaagagttatccagaccatggggaaggatctgacaccgatcacaccctctagtggcttcagtattgaactggcatctgccctcactgtggtgattgcatcaaatattggccttcccatcagtacaacacattgtaaagtgggctctgttgtgtctgttggctggctccggtccaagaaggctgttgactggcgtctctttcgtaacatttttatggcctggtttgtcacagtccccatttctggagttatcagtgctgccatcatggcaatcttcagatatgtcatcctcagaatgtgaagctgtttgagattaaaatttgtgtcaatgtttgggaccatcttaggtattcctgctcccctgaagaatgattacagtgttaacagaagactgacaagagtctttttatttgggagccagaggagggaagtgttacttgtgctataactgcttttgtgctaaatatgaattgtctcaaaattagctgtgtaaaatagcccgggttccactggctcctgctgaggtcccctttccttctgggctgtgaattcctgtacatatttctctactttttgtatcaggcttcaattccattatgttttaatgttgtctctgaagatgacttgtgatttttttttcttttttttaaaccatgaagagccgtttgacagagcatgctctgcgttgttggtttcaccagcttctgccctcacatgcacagggatttaacaacaatctgccctcctgtcagtagtggcaggatctattggcatattcgggagcttcttagagggatgaggttctttgaacacagtgaaaatttaaattagtaacttttttgcaagcagtttattgactgttattgctaagaagaagtaagaaagaaaaagcctgttggcaatcttggttatttctttaagatttctggcagtgtgggatggatgaatgaagtggaatgtgaactttgggcaagttaaatgggacagccttccatgttcatttgtctacctcttaactgaataaaaaagcctacagtttttagaaaa

SEQ ID NO: 452252 - DNA, 1074 bp, Homo sapiens
ggccttgacaacgatcacaccgtctagtggtatccatgctgaactgtccctgtccctcactggggtgattgcattaaatattgggctttccatcaacacaacacatcacactgtgcgcatctacgaggggtatgccctcctccggtccaagaaggctgttgactggcgtctctttcgtaacatttttatggcctggtttgtcacagtccccatttctggagttatcagtgctgccatcatggcaatcttcagatatgtcatcctcagaatgtgaagctgtttgagattaaaatttgtgtcaatgtttgggaccatcttaggtattcctgctcccctgaagaatgattacagtgttaacagaagactgacaagagtctttttatttgggagccagaggagggaagtgttacttgtgctataactgcttttgtgctaaatatgaattgtctcaaaattagctgtgtaaaatagcccgggttccactggctcctgctgaggtcccctttccttctgggctgtgaattcctgtacatatttctctactttttgtatcaggcttcaattccattatgttttaatgttgtctctgaagatgacttgtgatttttttttcttttttttaaaccatgaagagccgtttgacagagcatgctctgcgttgttggtttcaccagcttctgccctcacatgcacagggatttaacaacaaaaatataactacaacttcccttgtagtctcttatataagtagagtccttggtactctgccctcctgtcagtagtggcaggatctattggcatattcgggagcttcttagagggatgaggttctttgaacacagtgaaaatttaaattagtaacttttttgcaagcagtttattgactgttattgctaagaagaagtaagaaagaaaaagcctgttggcaatcttggttatttctttaagatttctggcagtgtgggatggatgaatgaagtggaatgtgaactttgggcaagttaaatgggacagccttccatgttcatttgtctacctcttaactgaataaaaaagcctacagtttttagaaaa

SEQ ID NO: 452253 - DNA, 3204 bp, Homo sapiens
aaaacatacttgacaacatggctaatgtaacatactctaccacttggtctgaagcccagcagtatctgatggataatccaacttttgcagaagatgaggagttacaaagtaagaataatggctaagtaagagaaatagttttaaacagcgtcctccagcagcaaagaattattttcactttttatatgagataactaattgaattttatgcagttgtttatttctgaaaaagagttttatttatttccaaataggatatttctttctgattgagtttgtgattcatgacaaaatattttttcaaatttaaagtagctttatcaggtaatccttgaaatatttaaattataggtcacatttgaaattctgcttagccgtttgtatgtaacttggtaagaactaaatgaattaccgcattttactcaggttgttttcttgaggtaataacattatagattttgtaaaaagagaaaaaagtattagaattatcttaacattaggcttccctaagtactctttctgagttaaccaattgctttttaaattatagctttatcagctacccctctaaaaatcatgcttcagtagatttttttatagggtgtacagttctatactttgaaaagctcctggaataattatgatattgcaaacagattttatcataacacttttcattagttttgccatatgcacgtcctttgttttatcctatgacatgtttcagaattcttttattgagttctttgtgaaattttccttaaaactttcctatgcagatgatcacaaatcatatttgagtttaaatacaagtttgtttgtttgtttgtttagagacggggtcttgctgtgctgcccaggctagtcttgaactccggggctcaagcaatcctcccacctcagccttccaaagtgttgagattacaggcatgagccaccacaccctagcctaactacaagtatttttgacaggtgattttgaaattttgggggagctaatgcaagtaaactactttacttgttgacatttgacactctaaattttaactggcaaatactttagatatggacaaagaagatgcattaatttgctttgaagaacacattcgggctttagaaaaggaggaagaagaagaaaaacagaagagtttgctgagagaaaggagacgacagcgaaaaaatagggaatctttccagatatttttagatgaattacatgaacatggacaactgcattctatgtcatcttggatggaattgtatccaactattagttctgatattagattcactaatatgcttggtcagcctggatcaactgcacttgatcttttcaagttttatgttgaggatcttaaagcacgttatcatgacgagaagaagataataaaagacattctaaaggataaaggatttgtagttgaagtaaacactacttttgaagattttgtggcgataatcagttcaactaaaagatcaactacattagatgctggaaatatcaaattggctttcaatagtttactagaaaaggcagaagcccgtgaacgtgaaagagaaaaagaagaggctcggaagatgaaacgaaaagaatctgcatttaagagtatgttaaaacaagctgctcctccgatagaattggatgctgtctgggaagatatccgtgagagatttgtaaaagagccagcatttgaggacataactctagaatctgaaagaaaacgaatatttaaagattttatgcatgtgcttgagcatgaatgtcagcatcatcattcaaagaacaagaaacattctaagaaatctaaaaaacatcataggaaacgttcccgctctcgatcggggtcagattcagatgatgatgatagccattcaaagaaaaaaagacagcgatcagagtctcgttctgcttcagaacattcttctagtgcagagtctgagagaagttataaaaagtcaaaaaagcataagaagaaaagtaagaagaggagacataaatctgactctccagaatccgatgctgagcgagagaaggataaaaaagaaaaagatcgggaaagtgaaaaagacagaactagacaaagatcagaatcaaaacacaaatcgcctaagaaaaagactggaaaggattctggtaattgggatacttctggcagcgaactgagtgaaggggaattggaaaagcgcagaagaacccttttggagcaactggatgatgatcaataaattataccaaatatatgtttacagtatgatttaaagtctgattcagaccagggactctattttaagttcaactgaaataacactgggttttaattatatcacaggaaaaaaaaagtgcatttaagtattgttatcgtggactttataaaagcaaaggaaattgaaagtaacttttgattctgtatcaagaatcatattttcatacagtcataactgtctttctgtgaccctttcacagggcactgtaggatggattaaaggtggcaatttactgataactgcagatgtctctactttgttctaaaatctaagtcatgaggtgatttgatttactttatagaagctggattttgaagatctaatgaaaaattttttgataatatagtagtacaaaaaaagcaccagcaactgataaaaattgcttttttgtgcgctacccaactggttaaagccaatgtgatcttttatggtgaaactcctaagaaacaggtggttttgctggaaacttggtagacccttaattatagtggtgctaatgagcactactgtaatataaagccaccattattttttatcaaacatctgaatacattttacaaaggctattgtgagggcattattttgagcatctattttgaggtgatgtttaaaaaaactttaacatcaaatcaaattgtaaattaatttaaatatattgccttaaggacctactaaagaatgtgccaccagactttaagtgatagttgcaatatccttgtctaaaaaaaaaaaaaaaagttgacttaaacattttctttaacagttgtcttttttttctaaattcagtctttctcttgcttttttttccctgctattgaggaagtattttgccttccctactcactgagaagtattgacttcgtggtacacattctaaagcatttctgatttgaatatttttgtacatttttatcaattattaaaccttctcttctagtg

SEQ ID NO: 452254 - DNA, 2249 bp, Homo sapiens
aaaacatacttgacaacatggctaatgtaacatactctaccacttggtctgaagcccagcagtatctgatggataatccaacttttgcagaagatgaggagttacaaaatatggacaaagaagatgcattaatttgctttgaagaacacattcgggctttagaaaaggaggaagaagaagaaaaacagaagagtttgctgagagaaaggagacgacagcgaaaaaatagggaatctttccagatatttttagatgaattacatgaacatggacaactgcattctatgtcatcttggatggaattgtatccaactattagttctgatattagattcactaatatgcttggtcagcctggatcaactgcacttgatcttttcaagttttatgttgaggatcttaaagcacgttatcatgacgagaagaagataataaaagacattctaaaggataaaggatttgtagttgaagtaaacactacttttgaagattttgtggcgataatcagttcaactaaaagatcaactacattagatgctggaaatatcaaattggctttcaatagtttactagaaaaggcagaagcccgtgaacgtgaaagagaaaaagaagaggctcggaagatgaaacgaaaagaatctgcatttaagagtatgttaaaacaagctgctcctccgatagaattggatgctgtctgggaagatatccgtgagagatttgtaaaagagccagcatttgaggacataactctagaatctgaaagaaaacgaatatttaaagattttatgcatgtgcttgagcatgaatgtcagcatcatcattcaaagaacaagaaacattctaagaaatctaaaaaacatcataggaaacgttcccgctctcgatcggggtcagattcagatgatgatgatagccattcaaagaaaaaaagacagcgatcagagtctcgttctgcttcagaacattcttctagtgcagagtctgagagaagttataaaaagtcaaaaaagcataagaagaaaagtaagaagaggagacataaatctgactctccagaatccgatgctgagcgagagaaggataaaaaagaaaaagatcgggaaagtgaaaaagacagaactagacaaagatcagaatcaaaacacaaatcgcctaagaaaaagactggaaaggattctggtaattgggatacttctggcagcgaactgagtgaaggggaattggaaaagcgcagaagaacccttttggagcaactggatgatgatcaataaattataccaaatatatgtttacagtatgatttaaagtctgattcagaccagggactctattttaagttcaactgaaataacactgggttttaattatatcacaggaaaaaaaaagtgcatttaagtattgttatcgtggactttataaaagcaaaggaaattgaaagtaacttttgattctgtatcaagaatcatattttcatacagtcataactgtctttctgtgaccctttcacagggcactgtaggatggattaaaggtggcaatttactgataactgcagatgtctctactttgttctaaaatctaagtcatgaggtgatttgatttactttatagaagctggattttgaagatctaatgaaaaattttttgataatatagtagtacaaaaaaagcaccagcaactgataaaaattgcttttttgtgcgctacccaactggttaaagccaatgtgatcttttatggtgaaactcctaagaaacaggtggttttgctggaaacttggtagacccttaattatagtggtgctaatgagcactactgtaatataaagccaccattattttttatcaaacatctgaatacattttacaaaggctattgtgagggcattattttgagcatctattttgaggtgatgtttaaaaaaactttaacatcaaatcaaattgtaaattaatttaaatatattgccttaaggacctactaaagaatgtgccaccagactttaagtgatagttgcaatatccttgtctaaaaaaaaaaaaaaaagttgacttaaacattttctttaacagttgtcttttttttctaaattcagtctttctcttgcttttttttccctgctattgaggaagtattttgccttccctactcactgagaagtattgacttcgtggtacacattctaaagcatttctgatttgaatatttttgtacatttttatcaattattaaaccttctcttctagtg

SEQ ID NO: 452255 - DNA, 3494 bp, Homo sapiens
aaaacatacttgacaacatggctaatgtaacatactctaccacttggtctgaagcccagcagtatctgatggataatccaacttttgcagaagatgaggagttacaaagtaagaataatggctaagtaagagaaatagttttaaacagcgtcctccagcagcaaagaattattttcactttttatatgagataactaattgaattttatgcagttgtttatttctgaaaaagagttttatttatttccaaataggatatttctttctgattgagtttgtgattcatgacaaaatattttttcaaatttaaagtagctttatcaggtaatccttgaaatatttaaattataggtcacatttgaaattctgcttagccgtttgtatgtaacttggtaagaactaaatgaattaccgcattttactcaggttgttttcttgaggtaataacattatagattttgtaaaaagagaaaaaagtattagaattatcttaacattaggcttccctaagtactctttctgagttaaccaattgctttttaaattatagctttatcagctacccctctaaaaatcatgcttcagtagatttttttatagggtgtacagttctatactttgaaaagctcctggaataattatgatattgcaaacagattttatcataacacttttcattagttttgccatatgcacgtcctttgttttatcctatgacatgtttcagaattcttttattgagttctttgtgaaattttccttaaaactttcctatgcagatgatcacaaatcatatttgagtttaaatacaagtttgtttgtttgtttgtttagagacggggtcttgctgtgctgcccaggctagtcttgaactccggggctcaagcaatcctcccacctcagccttccaaagtgttgagattacaggcatgagccaccacaccctagcctaactacaagtatttttgacaggtgattttgaaattttgggggagctaatgcaagtaaactactttacttgttgacatttgacactctaaattttaactggcaaatactttagatatggacaaagaagatgcattaatttgctttgaagaacacattcgggctttagaaaaggaggaagaagaagaaaaacagaagagtttgctgagagaaaggagacgacagcgaaaaaatagggaatctttccagatatttttagatgaattacatgaacatggacaactgcattctatgtcatcttggatggaattgtatccaactattagttctgatattagattcactaatatgcttggtcagcctggatcaactgcacttgatcttttcaagttttatgttgaggatcttaaagcacgttatcatgacgagaagaagataataaaagacattctaaaggataaaggatttgtagttgaagtaaacactacttttgaagattttgtggcgataatcagttcaactaaaagatcaactacattagatgctggaaatatcaaattggctttcaatagtttactagaaaaggcagaagcccgtgaacgtgaaagagaaaaagaagaggctcggaagatgaaacgaaaagaatctgcatttaagagtatgttaaaacaagctgctcctccgatagaattggatgctgtctgggaagatatccgtgagagatttgtaaaagagccagcatttgaggacataactctagaatctgaaagaaaacgaatatttaaagattttatgcatgtgcttgagcatgaatgtcagcatcatcattcaaagaacaagaaacattctaagaaatctaaaaaacatcataggaaacgttcccgctctcgatcggggtcagattcagatgatgatgatagccattcaaagaaaaaaagacagcgatcagagtctcgttctgcttcagaacattcttctagtgcagagtctgagagaagttataaaaagtcaaaaaagcataagaagaaaagtaagaagaggagacataaatctgactctccagaatccgatgctgagcgagagaaggataaaaaagaaaaagatcgggaaagtgaaaaagacagaactagacaaagatcagaatcaaaacacaaatcgcctaagaaaaagactggaaaggattctggtaattgggatacttctggcagcgaactgagtgaaggggaattggaaaagcgcagaagaacccttttggagcaactggatgatgatcaataaattataccaaatatatgtttacagtatgatttaaagtctgattcagaccagggactctattttaagttcaactgaaataacactgggttttaattatatcacaggaaaaaaaaagtgcatttaagtattgttatcgtggactttataaaagcaaaggaaattgaaagtaacttttgattctgtatcaagaatcatattttcatacagtcataactgtctttctgtgaccctttcacagggcactgtaggatggattaaaggtggcaatttactgataactgcagatgtctctactttgttctaaaatctaagtcatgaggtgatttgatttactttatagaagctggattttgaagatctaatgaaaaattttttgataatatagtagtacaaaaaaagcaccagcaactgataaaaattgcttttttgtgcgctacccaactggttaaagccaatgtgatcttttatggtgaaactcctaagaaacaggtggttttgctggaaacttggtagacccttaattatagtggtgctaatgagcactactgtaatataaagccaccattattttttatcaaacatctgaatacattttacaaaggctattgtgagggcattattttgagcatctattttgaggtgatgtttaaaaaaactttaacatcaaatcaaattgtaaattaatttaaatatattgccttaaggacctactaaagaatgtgccaccagactttaagtgatagttgcaatatccttgtctaaaaaaaaaaaatctttctcttgcttttttttccctgctattgaggaagtattttgccttccctactcactgagaagtattgacttcgtggtacacattctaaagcatttctgatttgaatatttttgtacatttttatcaattattaaaccttctcttctagtgaaaaaaagtatttatttctacttaaactgctcagctctaaagaaattgtatgatcactttaaaggtactaaatccctgaaattttgcttcatcttacccacaccgctagtttactttccttttttaatatttaagaatattataaatcagtgcatttgaggtccctagatttgtttttcacctatgaattttttacagactattttagagaggctgtggtttgaagacagaatactctttacatgctaacttttgaaggttggtaatgtaatttatactattttccttcagtgcaggagattttttaagtaaataagtaaattttagcacctattcttcggta

SEQ ID NO: 452256 - DNA, 1694 bp, Homo sapiens
cagacctgttgaattacattctttttatttgaatttgtgcatatctaatgaataaccatttaagcactaacgttaaattttaaataattcctactcagcaatttcaagaaaataattttattaatacagctgtctgccttatgtgttaaagctaacagcagtatactatgtacatatataaaccaatattatattgagttggtgagaaatgtagtatctgtctgtatttacataatagatactacacatctattatgtggtagtaagtctcatgagtggtattttatccttcagaatattatccttcccaagggaaagctgtccccatgaatcttgggtaaattttactaaatccttgaggttaacaattcacattttatttcatctctctaagagcacataacctgttacacatggatgttcttaaatattacctatataagaatggtatcttcatcaaaatgctaacctgttattttctattcatacaggactctccagaatccgatgctgagcgagagaaggataaaaaagaaaaagatcgggaaagtgaaaaagacagaactagacaaagatcagaatcaaaacacaaatcgcctaagaaaaagactggaaaggattctggtaattgggatacttctggcagcgaactgagtgaaggggaattggaaaagcgcagaagaacccttttggagcaactggatgatgatcaataaattataccaaatatatgtttacagtatgatttaaagtctgattcagaccagggactctattttaagttcaactgaaataacactgggttttaattatatcacaggaaaaaaaaagtgcatttaagtattgttatcgtggactttataaaagcaaaggaaattgaaagtaacttttgattctgtatcaagaatcatattttcatacagtcataactgtctttctgtgaccctttcacagggcactgtaggatggattaaaggtggcaatttactgataactgcagatgtctctactttgttctaaaatctaagtcatgaggtgatttgatttactttatagaagctggattttgaagatctaatgaaaaattttttgataatatagtagtacaaaaaaagcaccagcaactgataaaaattgcttttttgtgcgctacccaactggttaaagccaatgtgatcttttatggtgaaactcctaagaaacaggtggttttgctggaaacttggtagacccttaattatagtggtgctaatgagcactactgtaatataaagccaccattattttttatcaaacatctgaatacattttacaaaggctattgtgagggcattattttgagcatctattttgaggtgatgtttaaaaaaactttaacatcaaatcaaattgtaaattaatttaaatatattgccttaaggacctactaaagaatgtgccaccagactttaagtgatagttgcaatatccttgtctaaaaaaaaaaaaaaaagttgacttaaacattttctttaacagttgtcttttttttctaaattcagtctttctcttgcttttttttccctgctattgaggaagtattttgccttccctactcactgagaagtattgacttcgtggtacacattctaaagcatttctgatttgaatatttttgtacatttttatcaattattaaaccttctcttctagtg

SEQ ID NO: 452257 - DNA, 1384 bp, Homo sapiens
gcaggagaattgcttgaacccaggaggcagaggttgcagagagccgagatcgtgccactgcactccagcctgggtgacaagaacaagactctgtctcaacaaaaaaattagcaaggaatgtattatctaggaaatgaatacctggcttccattaaatggaaatattgcttcatattcacacagtctttaaaccctgtgaaatgtgtttctttggaagagagtttatatagatattggattcttttttcaaaggctcagcccgtaaacctctgagtactgatgtcaactataattgtaatcaatgtcttttcagggtaattgggatacttctggcagcgaactgagtgaaggggaattggaaaagcgcagaagaacccttttggagcaactggatgatgatcaataaattataccaaatatatgtttacagtatgatttaaagtctgattcagaccagggactctattttaagttcaactgaaataacactgggttttaattatatcacaggaaaaaaaaagtgcatttaagtattgttatcgtggactttataaaagcaaaggaaattgaaagtaacttttgattctgtatcaagaatcatattttcatacagtcataactgtctttctgtgaccctttcacagggcactgtaggatggattaaaggtggcaatttactgataactgcagatgtctctactttgttctaaaatctaagtcatgaggtgatttgatttactttatagaagctggattttgaagatctaatgaaaaattttttgataatatagtagtacaaaaaaagcaccagcaactgataaaaattgcttttttgtgcgctacccaactggttaaagccaatgtgatcttttatggtgaaactcctaagaaacaggtggttttgctggaaacttggtagacccttaattatagtggtgctaatgagcactactgtaatataaagccaccattattttttatcaaacatctgaatacattttacaaaggctattgtgagggcattattttgagcatctattttgaggtgatgtttaaaaaaactttaacatcaaatcaaattgtaaattaatttaaatatattgccttaaggacctactaaagaatgtgccaccagactttaagtgatagttgcaatatccttgtctaaaaaaaaaaaaaaaagttgacttaaacattttctttaacagttgtcttttttttctaaattcagtctttctcttgcttttttttccctgctattgaggaagtattttgccttccctactcactgagaagtattgacttcgtggtacacattctaaagcatttctgatttgaatatttttgtacatttttatcaattattaaaccttctcttctagtg

SEQ ID NO: 452258 - DNA, 3033 bp, Homo sapiens
aaaacatacttgacaacatggctaatgtaacatactctaccacttggtctgaagcccagcagtatctgatggataatccaacttttgcagaagatgaggagttacaaagtaagaataatggctaagtaagagaaatagttttaaacagcgtcctccagcagcaaagaattattttcactttttatatgagataactaattgaattttatgcagttgtttatttctgaaaaagagttttatttatttccaaataggatatttctttctgattgagtttgtgattcatgacaaaatattttttcaaatttaaagtagctttatcaggtaatccttgaaatatttaaattataggtcacatttgaaattctgcttagccgtttgtatgtaacttggtaagaactaaatgaattaccgcattttactcaggttgttttcttgaggtaataacattatagattttgtaaaaagagaaaaaagtattagaattatcttaacattaggcttccctaagtactctttctgagttaaccaattgctttttaaattatagctttatcagctacccctctaaaaatcatgcttcagtagatttttttatagggtgtacagttctatactttgaaaagctcctggaataattatgatattgcaaacagattttatcataacacttttcattagttttgccatatgcacgtcctttgttttatcctatgacatgtttcagaattcttttattgagttctttgtgaaattttccttaaaactttcctatgcagatgatcacaaatcatatttgagtttaaatacaagtttgtttgtttgtttgtttagagacggggtcttgctgtgctgcccaggctagtcttgaactccggggctcaagcaatcctcccacctcagccttccaaagtgttgagattacaggcatgagccaccacaccctagcctaactacaagtatttttgacaggtgattttgaaattttgggggagctaatgcaagtaaactactttacttgttgacatttgacactctaaattttaactggcaaatactttagatatggacaaagaagatgcattaatttgctttgaagaacacattcgggctttagaaaaggaggaagaagaagaaaaacagaagagtttgctgagagaaaggagacgacagcgaaaaaatagggaatctttccagatatttttagatgaattacatgaacatggacaactgcattctatgtcatcttggatggaattgtatccaactattagttctgatattagattcactaatatgcttggtcagcctggatcaactgcacttgatcttttcaagttttatgttgaggatcttaaagcacgttatcatgacgagaagaagataataaaagacattctaaaggataaaggatttgtagttgaagtaaacactacttttgaagattttgtggcgataatcagttcaactaaaagatcaactacattagatgctggaaatatcaaattggctttcaatagtttactagaaaaggcagaagcccgtgaacgtgaaagagaaaaagaagaggctcggaagatgaaacgaaaagaatctgcatttaagagtatgttaaaacaagctgctcctccgatagaattggatgctgtctgggaagatatccgtgagagatttgtaaaagagccagcatttgaggacataactctagaatctgaaagaaaacgaatatttaaagattttatgcatgtgcttgagcatgaatgtcagcatcatcattcaaagaacaagaaacattctaagaaatctaaaaaacatcataggaaacgttcccgctctcgatcggggtcagattcagatgatgatgatagccattcaaagaaaaaaagacagcgatcagagtctcgttctgcttcagaacattcttctagtgcagagtctgagagaagttataaaaagtcaaaaaagcataagaagaaaagtaagaagaggagacataaatctgactctccagaatccgatgctgagcgagagaaggataaaaaagaaaaagatcgggaaagtgaaaaagacagaactagacaaagatcagaatcaaaacacaaatcgcctaagaaaaagactggaaaggattctgtaagtatttagaattgtttcatgcctgtattttcaaaatgcaaaaatgtattctgtggttaaaccatgatggtgttgaaagaataggcttttttccaggtgtgctaccattgaagaaaacagtgaaaattcagttaagtacatttcacacaatatcatagtttttggtcatgcatgatcctagattttattctcctaaatttgatattttttaaatatagcatttcataactatagccttattaactcactaagaaaggatatggtcactaagaagtgccactggacattttttacctaattttcaaattttttttttaagtgagagactaaatctgggattctacagatgtctacagttgtcactgttattaaatcctttgtttcaaaaggtagcaattccagtaacttttagaaatactgatttggggtggaggaagggcaaataaataggagaggagaatataagccaaagttagtatttcaataacagattacataattagtccttttcaaatatatgtatatatgaatgacagagcctaataatgcaaatgctgtgggtttagcaagggtaaatgcctatgaatcatcactggagagcataaactatgtaggtaaaaccctattagggatctctggatattctgattcgttggtatagggtgggtttttttttagagctgaaacaggtgagtctgagtcacatcgtaagtgaagagtgaatgtttcctttgtactttctagcagcttatggtgggttaaatgaaatccctggagtgaatgaaagaggacgatatgggaactatccacttttcaaaggttgtgtcttacggtgcagtattatttttgtttgttcagcctaaatcttgtcctgctcattagtcttgtgtatttatt

SEQ ID NO: 452259 - DNA, 755 bp, Homo sapiens
aaaacatacttgacaacatggctaatgtaacatactctaccacttggtctgaagcccagcagtatctgatggataatccaacttttgcagaagatgaggagttacaaaatatggacaaagaagatgcattaatttgctttgaagaacacattcgggctttagaaaaggaggaagaagaagaaaaacagaagagtttgctgagagaaaggagacgacagcgaaaaaatagggaatctttccagatatttttagatgaattacatgaacatggacaactgcattctatgtcatcttggatggaattgtatccaactattagttctgatattagattcactaatatgcttggtcagcctggatcaactgcacttgatcttttcaagttttatgttgaggatcttaaagcacgttatcatgacgagaagaagataataaaagacattctaaaggataaaggatttgtagttgaagtaaacactacttttgaagattttgtggcgataatcagttcaactaaaagatcaactacattagatgctggaaatatcaaattggctttcaatagtttactagaaaaggcagaagcccgtgaacgtgaaagagaaaaagaagaggctcggaagtatgtagtcggaagtatgtagtcggaagtatgtagtccggaagtatgtagtcaggaagtatgtgtcggaatatgtagtacgaagttgtatgggatcttaaatgactgaggtgagtgagggggtataaaaaaa

SEQ ID NO: 452260 - DNA, 3547 bp, Homo sapiens
aaaacatacttgacaacatggctaatgtaacatactctaccacttggtctgaagcccagcagtatctgatggataatccaacttttgcagaagatgaggagttacaaagtaagaataatggctaagtaagagaaatagttttaaacagcgtcctccagcagcaaagaattattttcactttttatatgagataactaattgaattttatgcagttgtttatttctgaaaaagagttttatttatttccaaataggatatttctttctgattgagtttgtgattcatgacaaaatattttttcaaatttaaagtagctttatcaggtaatccttgaaatatttaaattataggtcacatttgaaattctgcttagccgtttgtatgtaacttggtaagaactaaatgaattaccgcattttactcaggttgttttcttgaggtaataacattatagattttgtaaaaagagaaaaaagtattagaattatcttaacattaggcttccctaagtactctttctgagttaaccaattgctttttaaattatagctttatcagctacccctctaaaaatcatgcttcagtagatttttttatagggtgtacagttctatactttgaaaagctcctggaataattatgatattgcaaacagattttatcataacacttttcattagttttgccatatgcacgtcctttgttttatcctatgacatgtttcagaattcttttattgagttctttgtgaaattttccttaaaactttcctatgcagatgatcacaaatcatatttgagtttaaatacaagtttgtttgtttgtttgtttagagacggggtcttgctgtgctgcccaggctagtcttgaactccggggctcaagcaatcctcccacctcagccttccaaagtgttgagattacaggcatgagccaccacaccctagcctaactacaagtatttttgacaggtgattttgaaattttgggggagctaatgcaagtaaactactttacttgttgacatttgacactctaaattttaactggcaaatactttagatatggacaaagaagatgcattaatttgctttgaagaacacattcgggctttagaaaaggaggaagaagaagaaaaacagaagagtttgctgagagaaaggagacgacagcgaaaaaatagggaatctttccagatatttttagatgaattacatgaacatggacaactgcattctatgtcatcttggatggaattgtatccaactattagttctgatattagattcactaatatgcttggtcagcctggatcaactgcacttgatcttttcaagttttatgttgaggatcttaaagcacgttatcatgacgagaagaagataataaaagacattctaaaggataaaggatttgtagttgaagtaaacactacttttgaagattttgtggcgataatcagttcaactaaaagatcaactacattagatgctggaaatatcaaattggctttcaatagtttactagaaaaggcagaagcccgtgaacgtgaaagagaaaaagaagaggctcggaagatgaaacgaaaagaatctgcatttaagagtatgttaaaacaagctgctcctccgatagaattggatgctgtctgggaagatatccgtgagagatttgtaaaagagccagcatttgaggacataactctagaatctgaaagaaaacgaatatttaaagattttatgcatgtgcttgagcatgaatgtcagcatcatcattcaaagaacaagaaacattctaagaaatctaaaaaacatcataggaaacgttcccgctctcgatcggggtcagattcagatgatgatgatagccattcaaagaaaaaaagacagcgatcagagtctcgttctgcttcagaacattcttctagtgcagagtctgagagaagttataaaaagtcaaaaaagcataagaagaaaagtaagaagaggagacataaatctgactctccagaatccgatgctgagcgagagaaggataaaaaagaaaaagatcgggaaagtgaaaaagacagaactagacaaagatcagaatcaaaacacaaatcgcctaagaaaaagactggaaaggattctggtaattgggatacttctggcagcgaactgagtgaaggggaattggaaaagcgcagaagaacccttttggagcaactggatgatgatcaataaattataccaaatatatgtttacagtatgatttaaagtctgattcagaccagggactctattttaagttcaactgaaataacactgggttttaattatatcacaggaaaaaaaaagtgcatttaagtattgttatcgtggactttataaaagcaaaggaaattgaaagtaacttttgattctgtatcaagaatcatattttcatacagtcataactgtctttctgtgaccctttcacagggcactgtaggatggattaaaggtggcaatttactgataactgcagatgtctctactttgttctaaaatctaagtcatgaggtgatttgatttactttatagaagctggattttgaagatctaatgaaaaattttttgataatatagtagtacaaaaaaagcaccagcaactgataaaaattgcttttttgtgcgctacccaactggttaaagccaatgtgatcttttatggtgaaactcctaagaaacaggtggttttgctggaaacttggtagacccttaattatagtggtgctaatgagcactactgtaatataaagccaccattattttttatcaaacatctgaatacattttacaaaggctattgtgagggcattattttgagcatctattttgaggtgatgtttaaaaaaactttaacatcaaatcaaattgtaaattaatttaaatatattgccttaaggacctactaaagaatgtgccaccagactttaagtgatagttgcaatatccttgtctaaaaaaaaaaaaaaaagttgacttaaacattttctttaacagttgtcttttttttctaaattcagtctttctcttgcttttttttccctgctattgaggaagtattttgccttccctactcactgagaagtattgacttcgtggtacacattctaaagcatttctgatttgaatatttttgtacatttttatcaattattaaaccttctcttctagtgaaaaaaagtatttatttctacttaaactgctcagctctaaagaaattgtatgatcactttaaaggtactaaatccctgaaattttgcttcatcttacccacaccgctagtttactttccttttttaatatttaagaatattataaatcagtgcatttgaggtccctagatttgtttttcacctatgaattttttacagactattttagagaggctgtggtttgaagacagaatactctttacatgctaacttttgaaggttggtaatgtaatttatactattttccttcagtgcaggagattttttaagtaaataagtaaattttagcacctattcttcggta

SEQ ID NO: 452261 - DNA, 1798 bp, Homo sapiens
  misc_feature (30)..(30): n is a, c, g, or t
cattcttctagtgcagagtctgagagaagntataaaaagtcaaaaaagcataagatgaaaagtaagatatctaaaaaacatcataggaaacgttcccgctctcgatcggggtcagattcagatgatgatgatagcccgtgaacgtgaaagagaaaaagaagaggctcggaagatgaaacgaaaagaatctgcatttaagagtatgttaaaacaagctgctcctccgatagaattggatgctgtctgggaagatatccgtgagagatttgtaaaagagccagcatttgaggacataactctagaatctgaaagaaaacgaatatttaaagattttatgcatgtgcttgagcatgaatgtcagcatcatcattcaaagaacaagaaacattctaagaaatctaaaaaacatcataggaaacgttcccgctctcgatcggggtcagattcagatgatgatgatagccattcaaagaaaaaaagacagcgatcagagtctcgttctgcttcagaacattcttctagtgcagagtctgagagaagttataaaaagtcaaaaaagcataagaagaaaagtaagaagaggagacataaatctgactctccagaatccgatgctgagcgagagaaggataaaaaagaaaaagatcgggaaagtgaaaaagacagaactagacaaagatcagaatcaaaacacaaatcgcctaagaaaaagactggaaaggattctggtaattgggatacttctggcagcgaactgagtgaaggggaattggaaaagcgcagaagaacccttttggagcaactggatgatgatcaataaattataccaaatatatgtttacagtatgatttaaagtctgattcagaccagggactctattttaagttcaactgaaataacactgggttttaattatatcacaggaaaaaaaaagtgcatttaagtattgttatcgtggactttataaaagcaaaggaaattgaaagtaacttttgattctgtatcaagaatcatattttcatacagtcataactgtctttctgtgaccctttcacagggcactgtaggatggattaaaggtggcaatttactgataactgcagatgtctctactttgttctaaaatctaagtcatgaggtgatttgatttactttatagaagctggattttgaagatctaatgaaaaattttttgataatatagtagtacaaaaaaagcaccagcaactgataaaaattgcttttttgtgcgctacccaactggttaaagccaatgtgatcttttatggtgaaactcctaagaaacaggtggttttgctggaaacttggtagacccttaattatagtggtgctaatgagcactactgtaatataaagccaccattattttttatcaaacatctgaatacattttacaaaggctattgtgagggcattattttgagcatctattttgaggtgatgtttaaaaaaactttaacatcaaatcaaattgtaaattaatttaaatatattgccttaaggacctactaaagaatgtgccaccagactttaagtgatagttgcaatatccttgtctaaaaaaaaaaaaaaaagttgacttaaacattttctttaacagttgtcttttttttctaaattcagtctttctcttgcttttttttccctgctattgaggaagtattttgccttccctactcactgagaagtattgacttcgtggtacacattctaaagcatttctgatttgaatatttttgtacatttttatcaattattaaaccttctcttctagtg

SEQ ID NO: 452262 - DNA, 1190 bp, Homo sapiens
taatcacttggggaaaggaaggttcgtttctgagttagcaacaagtaaatgcagcactagtgggtgggattgaggtatgccctggtgcataaatagagactcagctgtgctggcacactcagaagcttggaccgcatcctagccgccgactcacacaaggcaggtgggtgaggaaatccagagttgccatggagaaaattccagtgtcagcattcttgctccttgtggccctctcctacactctggccagagataccacagtcaaacctggagccaaaaaggacacaaaggactctcgacccaaactgccccagaccctctccagaggttggggtgaccaactcatctggactcagacatatgaagaagctctatataaatccaagacaagcaacaaacccttgatgattattcatcacttggatgagtgcccacacagtcaagctttaaagaaagtgtttgctgaaaataaagaaatccagaaattggcagagcagtttgtcctcctcaatctggtttatgaaacaactgacaaacacctttctcctgatggccagtatgtccccaggattatgtttgttgacccatctctgacagttagagccgatatcactggaagatattcaaatcgtctctatgcttacgaacctgcagatacagctctgttgcttgacaacatgaagaaagctctcaagttgctgaagactgaattgtaaagaaaaaaaatctccaagcccttctgtctgtcaggccttgagacttgaaaccagaagaagtgtgagaagactggctagtgtggaagcatagtgaacacactgattaggttatggtttaatgttacaacaactattttttaagaaaaacaagttttagaaatttggtttcaagtgtacatgtgtgaaaacaatattgtatactaccatagtgagccatgattttctaaaaaaaaaaataaatgttttgggggtgttctgttttctccaacttggtctttcacagtggttcgtttaccaaataggattaaacacacacaaaatgctcaaggaagggacaagacaaaaccaaaactagttcaaatgatgaagaccaaagaccaagttatcatctcaccacaccacaggttctcactagatgactgtaagtagacacgagcttaatcaacagaagtatcaagccatgtgctttagcat

SEQ ID NO: 452263 - DNA, 910 bp, Homo sapiens
taatcacttggggaaaggaaggttcgtttctgagttagcaacaagtaaatgcagcactagtgggtgggattgaggtatgccctggtgcataaatagagactcagctgtgctggcacactcagaagcttggaccgcatcctagccgccgactcacacaaggcagagttgccatggagaaaattccagtgtcagcattcttgctccttgtggccctctcctacactctggccagagataccacagtcaaacctggagccaaaaaggacacaaaggactctcgacccaaactgccccagaccctctccagaggttggggtgaccaactcatctggactcagacatatgaagaagctctatataaatccaagacaagcaacaaacccttgatgattattcatcacttggatgagtgcccacacagtcaagctttaaagaaagtgtttgctgaaaataaagaaatccagaaattggcagagcagtttgtcctcctcaatctggtttatgaaacaactgacaaacacctttctcctgatggccagtatgtccccaggattatgtttgttgacccatctctgacagttagagccgatatcactggaagatattcaaatcgtctctatgcttacgaacctgcagatacagctctgtgtaagtgtgaccttcaattcggatgttgcccaagagttgaacacctctattgctgtagtgatgggactagaggctgcatggtgaggtgagagagagctaggcttagggacgcctcggactcagtttgaccctaactagccttgcatcttcaggcaaatcacactctttccatctcaggtttgtttgtttttaatctcaattgaagatgaattatttagattaggtatctttttctctaggaggattctatgaccacattacc

SEQ ID NO: 452264 - DNA, 1823 bp, Homo sapiens
taatcacttggggaaaggaaggttcgtttctgagttagcaacaagtaaatgcagcactagtgggtgggattgaggtatgccctggtgcataaatagagactcagctgtgctggcacactcagaagcttggaccgcatcctagccgccgactcacacaaggcaggtgggtgaggaaatccagagttgccatggagaaaattccagtgtcagcattcttgctccttgtggccctctcctacactctggccagagataccacagtcaaacctggagccaaaaaggacacaaaggactctcgacccaaactgccccagaccctctccagaggttggggtgaccaactcatctggactcagacatatgaagaagctctatataaatccaagacaagcaacaaacccttgatgattattcatcacttggatgagtgcccacacagtcaagctttaaagaaagtgtttgctgaaaataaagaaatccagaaattggcagagcagtttgtcctcctcaatctggtttatgaaacaactgacaaacacctttctcctgatggccagtatgtccccaggattatgtttgttgacccatctctgacagttagagccgatatcactggaagatattcaaatcgtctctatgcttacgaacctgcagatacagctctgttgcttgacaacatgaagaaagctctcaagttgctgaagactgaattgtaaagaaaaaaaatctccaagcccttctgtctgtcaggccttgagacttgaaaccagaagaagtgtgagaagactggctagtgtggaagcatagtgaacacactgattaggttatggtttaatgttacaacaactattttttaagaaaaacaagttttagaaatttggtttcaagtgtacatgtgtgaaaacaatattgtatactaccatagtgagccatgattttctaaaaaaaaaaataaatgttttgggggtgttctgttttctccaacttggtctttcacagtggttcgtttaccaaataggattaaacacacacaaaatgctcaaggaagggacaagacaaaaccaaaactagttcaaatgatgaagaccaaagaccaagttatcatctcaccacaccacaggttctcactagatgactgtaagtagacacgagcttaatcaacagaagtatcaagccatgtgctttagcataaaagaatatttagaaaaacatcccaagaaaatcacatcactacctagagtcaactctggccaggaactctaaggtacacactttcatttagtaattaaattttagtcagattttgcccaacctaatgctctcagggaaagcctctggcaagtagctttctccttcagaggtctaatttagtagaaaggtcatccaaagaacatctgcactcctgaacacaccctgaagaaatcctgggaattgaccttgtaatcgatttgtctgtcaaggtcctaaagtactggagtgaaataaattcagccaacatgtgactaattggaagaagagcaaagggtggtgacgtgttgatgaggcagatggagatcagaggttactagggtttaggaaacgtgaaaggctgtggcatcagggtaggggagcattctgcctaacagaaattagaattgtgtgttaatgtcttcactctatacttaatctcacattcattaatatatggaattcctctactgcccagcccctcctgatttctttggcccctggactatggtgctgtatataatgctttgcagtatctgttgcttgtcttgattaacttttttggataaaaccttttttgaacagaaaaaaaaaaa

SEQ ID NO: 452265 - DNA, 1555 bp, Homo sapiens
taatcacttggggaaaggaaggttcgtttctgagttagcaacaagtaaatgcagcactagtgggtgggattgaggtatgccctggtgcataaatagagactcagctgtgctggcacactcagaagcttggaccgcatcctagccgccgactcacacaaggcaggtgggtgaggaaatccagagttgccatggagaaaattccagtgtcagcattcttgctccttgtggccctctcctacactctggccagagataccacagtcaaacctggagccaaaaaggacacaaaggactctcgacccaaactgccccagaccctctccagaggttggggtgaccaactcatctggactcagacatatgaagaagctctatataaatccaagacaagcaacaaacccttgatgattattcatcacttggatgagtgcccacacagtcaagctttaaagaaagtgtttgctgaaaataaagaaatccagaaattggcagagcagtttgtcctcctcaatctggtttatgaaacaactgacaaacacctttctcctgatggccagtatgtccccaggattatgtttgttgacccatctctgacagttagagccgatatcactggaagatattcaaatcgtctctatgcttacgaacctgcagatacagctctgttgcttgacaacatgaagaaagctctcaagttgctgaagactgaattgtaaagaaaaaaaatctccaagcccttctgtctgtcaggccttgagacttgaaaccagaagaagtgtgagaagactggctagtgtggaagcatagtgaacacactgattaggttatggtttaatgttacaacaactattttttaagaaaaacaagttttagaaatttggtttcaagtgtacatgtgtgaaaacaatattgtatactaccatagtgagccatgattttctaaaaaaaaaaataaatgttttgggggtgttctgttttctccaacttggtctttcacagtggttcgtttaccaaataggattaaacacacacaaaatgctcaaggaagggacaagacaaaaccaaaactagttcaaatgatgaagaccaaagaccaagttatcatctcaccacaccacaggttctcactagatgactgtaagtagacacgagcttaatcaacagaagtatcaagccatgtgctttagcataaaagaatatttagaaaaacatcccaagaaaatcacatcactacctagagtcaactctggccaggaactctaaggtacacactttcatttagtaattaaattttagtcagattttgcccaacctaatgctctcagggaaagcctctggcaagtagctttctccttcagaggtctaatttagtagaaaggtcatccaaagaacatctgcactcctgaacacaccctgaagaaatcctgggaattgaccttgtaatcgatttgtctgtcaaggtcctaaagtactggagtgaaataaattcagccaacatgtgactaattggaagaagagcaaaggtcgaagaagagcagaaggtcgaccagataga

SEQ ID NO: 452266 - DNA, 1710 bp, Homo sapiens
tggcaggatgaggcgtgggtgaatcggacgaggcgactcacacaaggcaggtgggtgaggaaatccagagttgccatggagaaaattccagtgtcagcattcttgctccttgtggccctctcctacactctggccagagataccacagtcaaacctggagccaaaaaggacacaaaggactctcgacccaaactgccccagaccctctccagaggttggggtgaccaactcatctggactcagacatatgaagaagctctatataaatccaagacaagcaacaaacccttgatgattattcatcacttggatgagtgcccacacagtcaagctttaaagaaagtgtttgctgaaaataaagaaatccagaaattggcagagcagtttgtcctcctcaatctggtttatgaaacaactgacaaacacctttctcctgatggccagtatgtccccaggattatgtttgttgacccatctctgacagttagagccgatatcactggaagatattcaaatcgtctctatgcttacgaacctgcagatacagctctgttgcttgacaacatgaagaaagctctcaagttgctgaagactgaattgtaaagaaaaaaaatctccaagcccttctgtctgtcaggccttgagacttgaaaccagaagaagtgtgagaagactggctagtgtggaagcatagtgaacacactgattaggttatggtttaatgttacaacaactattttttaagaaaaacaagttttagaaatttggtttcaagtgtacatgtgtgaaaacaatattgtatactaccatagtgagccatgattttctaaaaaaaaaaataaatgttttgggggtgttctgttttctccaacttggtctttcacagtggttcgtttaccaaataggattaaacacacacaaaatgctcaaggaagggacaagacaaaaccaaaactagttcaaatgatgaagaccaaagaccaagttatcatctcaccacaccacaggttctcactagatgactgtaagtagacacgagcttaatcaacagaagtatcaagccatgtgctttagcataaaagaatatttagaaaaacatcccaagaaaatcacatcactacctagagtcaactctggccaggaactctaaggtacacactttcatttagtaattaaattttagtcagattttgcccaacctaatgctctcagggaaagcctctggcaagtagctttctccttcagaggtctaatttagtagaaaggtcatccaaagaacatctgcactcctgaacacaccctgaagaaatcctgggaattgaccttgtaatcgatttgtctgtcaaggtcctaaagtactggagtgaaataaattcagccaacatgtgactaattggaagaagagcaaagggtggtgacgtgttgatgaggcagatggagatcagaggttactagggtttaggaaacgtgaaaggctgtggcatcagggtaggggagcattctgcctaacagaaattagaattgtgtgttaatgtcttcactctatacttaatctcacattcattaatatatggaattcctctactgcccagcccctcctgatttctttggcccctggactatggtgctgtatataatgctttgcagtatctgttgcttgtcttgattaacttttttggataaaaccttttttgaacagaaaaaaaaaaa

SEQ ID NO: 452267 - DNA, 1541 bp, Homo sapiens
tagaggatccccgtcggatgcaagtgtcccagaccctctccagaggttggggtgaccaactcatctggactcagacatatgaagaagctctatataaatccaagacaagcaacaaacccttgatgattattcatcacttggatgagtgcccacacagtcaagctttaaagaaagtgtttgctgaaaataaagaaatccagaaattggcagagcagtttgtcctcctcaatctggtttatgaaacaactgacaaacacctttctcctgatggccagtatgtccccaggattatgtttgttgacccatctctgacagttagagccgatatcactggaagatattcaaatcgtctctatgcttacgaacctgcagatacagctctgttgcttgacaacatgaagaaagctctcaagttgctgaagactgaattgtaaagaaaaaaaatctccaagcccttctgtctgtcaggccttgagacttgaaaccagaagaagtgtgagaagactggctagtgtggaagcatagtgaacacactgattaggttatggtttaatgttacaacaactattttttaagaaaaacaagttttagaaatttggtttcaagtgtacatgtgtgaaaacaatattgtatactaccatagtgagccatgattttctaaaaaaaaaaataaatgttttgggggtgttctgttttctccaacttggtctttcacagtggttcgtttaccaaataggattaaacacacacaaaatgctcaaggaagggacaagacaaaaccaaaactagttcaaatgatgaagaccaaagaccaagttatcatctcaccacaccacaggttctcactagatgactgtaagtagacacgagcttaatcaacagaagtatcaagccatgtgctttagcataaaagaatatttagaaaaacatcccaagaaaatcacatcactacctagagtcaactctggccaggaactctaaggtacacactttcatttagtaattaaattttagtcagattttgcccaacctaatgctctcagggaaagcctctggcaagtagctttctccttcagaggtctaatttagtagaaaggtcatccaaagaacatctgcactcctgaacacaccctgaagaaatcctgggaattgaccttgtaatcgatttgtctgtcaaggtcctaaagtactggagtgaaataaattcagccaacatgtgactaattggaagaagagcaaagggtggtgacgtgttgatgaggcagatggagatcagaggttactagggtttaggaaacgtgaaaggctgtggcatcagggtaggggagcattctgcctaacagaaattagaattgtgtgttaatgtcttcactctatacttaatctcacattcattaatatatggaattcctctactgcccagcccctcctgatttctttggcccctggactatggtgctgtatataatgctttgcagtatctgttgcttgtcttgattaacttttttggataaaaccttttttgaacagaaaaaaaaaaa

SEQ ID NO: 452268 - DNA, 1526 bp, Homo sapiens
gatctgagcgatcccgtaattacttacccagttggggtgaccaactcatctggactcagacatatgaagaagctctatataaatccaagacaagcaacaaacccttgatgattattcatcacttggatgagtgcccacacagtcaagctttaaagaaagtgtttgctgaaaataaagaaatccagaaattggcagagcagtttgtcctcctcaatctggtttatgaaacaactgacaaacacctttctcctgatggccagtatgtccccaggattatgtttgttgacccatctctgacagttagagccgatatcactggaagatattcaaatcgtctctatgcttacgaacctgcagatacagctctgttgcttgacaacatgaagaaagctctcaagttgctgaagactgaattgtaaagaaaaaaaatctccaagcccttctgtctgtcaggccttgagacttgaaaccagaagaagtgtgagaagactggctagtgtggaagcatagtgaacacactgattaggttatggtttaatgttacaacaactattttttaagaaaaacaagttttagaaatttggtttcaagtgtacatgtgtgaaaacaatattgtatactaccatagtgagccatgattttctaaaaaaaaaaataaatgttttgggggtgttctgttttctccaacttggtctttcacagtggttcgtttaccaaataggattaaacacacacaaaatgctcaaggaagggacaagacaaaaccaaaactagttcaaatgatgaagaccaaagaccaagttatcatctcaccacaccacaggttctcactagatgactgtaagtagacacgagcttaatcaacagaagtatcaagccatgtgctttagcataaaagaatatttagaaaaacatcccaagaaaatcacatcactacctagagtcaactctggccaggaactctaaggtacacactttcatttagtaattaaattttagtcagattttgcccaacctaatgctctcagggaaagcctctggcaagtagctttctccttcagaggtctaatttagtagaaaggtcatccaaagaacatctgcactcctgaacacaccctgaagaaatcctgggaattgaccttgtaatcgatttgtctgtcaaggtcctaaagtactggagtgaaataaattcagccaacatgtgactaattggaagaagagcaaagggtggtgacgtgttgatgaggcagatggagatcagaggttactagggtttaggaaacgtgaaaggctgtggcatcagggtaggggagcattctgcctaacagaaattagaattgtgtgttaatgtcttcactctatacttaatctcacattcattaatatatggaattcctctactgcccagcccctcctgatttctttggcccctggactatggtgctgtatataatgctttgcagtatctgttgcttgtcttgattaacttttttggataaaaccttttttgaacagaaaaaaaaaaa

SEQ ID NO: 452269 - DNA, 1908 bp, Homo sapiens
taatcacttggggaaaggaaggttcgtttctgagttagcaacaagtaaatgcagcactagtgggtgggattgaggtatgccctggtgcataaatagagactcagctgtgctggcacactcagaagcttggaccgcatcctagccgccgactcacacaaggcaggtgggtgaggaaatccagagttgccatggagaaaattccagtgtcagcattcttgctccttgtggccctctcctacactctggccagagataccacagtcaaacctggagccaaaaaggacacaaaggactctcgacccaaactgccccagaccctctccagaggttggggtgaccaactcatctggactcagacatatgaagaagctctatataaatccaagacaagcaacaaacccttgatgattattcatcacttggatgagtgcccacacagtcaagctttaaagaaagtgtttgctgaaaataaagaaatccagaaattggcagagcagtttgtcctcctcaatctggtttatgaaacaactgacaaacacctttctcctgatggccagtatgtccccaggattatgtttgttgacccatctctgacagttagagccgatatcactggaagatattcaaatcgtctctatgcttacgaacctgcagatacagctctgtgtaagtgtgaccttcaattcggatgttgcccaagagttgaacacctctattgctgtagtgatgggactagaggctgcatggtgagtgcttgacaacatgaagaaagctctcaagttgctgaagactgaattgtaaagaaaaaaaatctccaagcccttctgtctgtcaggccttgagacttgaaaccagaagaagtgtgagaagactggctagtgtggaagcatagtgaacacactgattaggttatggtttaatgttacaacaactattttttaagaaaaacaagttttagaaatttggtttcaagtgtacatgtgtgaaaacaatattgtatactaccatagtgagccatgattttctaaaaaaaaaaataaatgttttgggggtgttctgttttctccaacttggtctttcacagtggttcgtttaccaaataggattaaacacacacaaaatgctcaaggaagggacaagacaaaaccaaaactagttcaaatgatgaagaccaaagaccaagttatcatctcaccacaccacaggttctcactagatgactgtaagtagacacgagcttaatcaacagaagtatcaagccatgtgctttagcataaaagaatatttagaaaaacatcccaagaaaatcacatcactacctagagtcaactctggccaggaactctaaggtacacactttcatttagtaattaaattttagtcagattttgcccaacctaatgctctcagggaaagcctctggcaagtagctttctccttcagaggtctaatttagtagaaaggtcatccaaagaacatctgcactcctgaacacaccctgaagaaatcctgggaattgaccttgtaatcgatttgtctgtcaaggtcctaaagtactggagtgaaataaattcagccaacatgtgactaattggaagaagagcaaagggtggtgacgtgttgatgaggcagatggagatcagaggttactagggtttaggaaacgtgaaaggctgtggcatcagggtaggggagcattctgcctaacagaaattagaattgtgtgttaatgtcttcactctatacttaatctcacattcattaatatatggaattcctctactgcccagcccctcctgatttctttggcccctggactatggtgctgtatataatgctttgcagtatctgttgcttgtcttgattaacttttttggataaaaccttttttgaacagaaaaaaaaaaa

SEQ ID NO: 452270 - DNA, 1366 bp, Homo sapiens
gagacagtgataatgaaagctaagcctcgggctaatttccccatagccgtggggtgacttccctggtcaccaaggcagtgcatgcatgttggggtttcctttaccttttctataagttgtacctgggttaggtctacctggccaggtagacctaactggaagatattcaaatcgtctctatgcttacgaacctgcagatacagctctgttgcttgacaacatgaagaaagctctcaagttgctgaagactgaattgtaaagaaaaaaaatctccaagcccttctgtctgtcaggccttgagacttgaaaccagaagaagtgtgagaagactggctagtgtggaagcatagtgaacacactgattaggttatggtttaatgttacaacaactattttttaagaaaaacaagttttagaaatttggtttcaagtgtacatgtgtgaaaacaatattgtatactaccatagtgagccatgattttctaaaaaaaaaaataaatgttttgggggtgttctgttttctccaacttggtctttcacagtggttcgtttaccaaataggattaaacacacacaaaatgctcaaggaagggacaagacaaaaccaaaactagttcaaatgatgaagaccaaagaccaagttatcatctcaccacaccacaggttctcactagatgactgtaagtagacacgagcttaatcaacagaagtatcaagccatgtgctttagcataaaagaatatttagaaaaacatcccaagaaaatcacatcactacctagagtcaactctggccaggaactctaaggtacacactttcatttagtaattaaattttagtcagattttgcccaacctaatgctctcagggaaagcctctggcaagtagctttctccttcagaggtctaatttagtagaaaggtcatccaaagaacatctgcactcctgaacacaccctgaagaaatcctgggaattgaccttgtaatcgatttgtctgtcaaggtcctaaagtactggagtgaaataaattcagccaacatgtgactaattggaagaagagcaaagggtggtgacgtgttgatgaggcagatggagatcagaggttactagggtttaggaaacgtgaaaggctgtggcatcagggtaggggagcattctgcctaacagaaattagaattgtgtgttaatgtcttcactctatacttaatctcacattcattaatatatggaattcctctactgcccagcccctcctgatttctttggcccctggactatggtgctgtatataatgctttgcagtatctgttgcttgtcttgattaacttttttggataaaaccttttttgaacagaaaaaaaaaaa

SEQ ID NO: 452271 - DNA, 1328 bp, Homo sapiens
tgcactgagtggagattgcaccactgcatgccagcctgagtgggagtgagaccttgtctcaaaaaaaaaagcatcccattaaataatgaattgagcatccaagtttggggtttattatatcgatataacgcacgatggtgtcttgactctcctgcttttatcccccattagtgcttgacaacatgaagaaagctctcaagttgctgaagactgaattgtaaagaaaaaaaatctccaagcccttctgtctgtcaggccttgagacttgaaaccagaagaagtgtgagaagactggctagtgtggaagcatagtgaacacactgattaggttatggtttaatgttacaacaactattttttaagaaaaacaagttttagaaatttggtttcaagtgtacatgtgtgaaaacaatattgtatactaccatagtgagccatgattttctaaaaaaaaaaataaatgttttgggggtgttctgttttctccaacttggtctttcacagtggttcgtttaccaaataggattaaacacacacaaaatgctcaaggaagggacaagacaaaaccaaaactagttcaaatgatgaagaccaaagaccaagttatcatctcaccacaccacaggttctcactagatgactgtaagtagacacgagcttaatcaacagaagtatcaagccatgtgctttagcataaaagaatatttagaaaaacatcccaagaaaatcacatcactacctagagtcaactctggccaggaactctaaggtacacactttcatttagtaattaaattttagtcagattttgcccaacctaatgctctcagggaaagcctctggcaagtagctttctccttcagaggtctaatttagtagaaaggtcatccaaagaacatctgcactcctgaacacaccctgaagaaatcctgggaattgaccttgtaatcgatttgtctgtcaaggtcctaaagtactggagtgaaataaattcagccaacatgtgactaattggaagaagagcaaagggtggtgacgtgttgatgaggcagatggagatcagaggttactagggtttaggaaacgtgaaaggctgtggcatcagggtaggggagcattctgcctaacagaaattagaattgtgtgttaatgtcttcactctatacttaatctcacattcattaatatatggaattcctctactgcccagcccctcctgatttctttggcccctggactatggtgctgtatataatgctttgcagtatctgttgcttgtcttgattaacttttttggataaaaccttttttgaacagaaaaaaaaaaa

SEQ ID NO: 452272 - DNA, 274 bp, Homo sapiens
gtaggagtcagcttcttgttggcttccaactgctacttaattggaaaagatttcctctctcttggtgcttaaacctggttctaacctggtgccaggttatttttggttgtgttccttctagacttatcactgtttataattatttctactttctccaggggtttttcttcttctttagtatagggtctattatcccagtctttaccattgcttttcaacagctttgggtctgaatttatacaagcttcaaatatactgattcatttcattctag

SEQ ID NO: 452273 - DNA, 450 bp, Homo sapiens
ccgcatcctagccgccgactcacacaaggcaggtgggtgaggaaatccaggtaaggctcctgacagcagctttagaagggtacttgctggagtgaattcgggcctctgattgctatataaagttgtaggcaatcaagcaacagagaactgcaagtttccaaaggcaatgaagtaggatacggaagggaaatcatggaatttccacaaaagtcttactggggcctttctttggctagagctggcacagtgtgacgttcccgagttagttcagagaaatgctttctcttttgcgaaacaaaatttccaagagtaggtgaatcctaggatttttcaagcctgggacagggtccagggattttcgtctcagtcaccatctaaagctttctttcccacgggctaaagcaaagccccataggcttctccactatgacacctcagctcggattgccc

SEQ ID NO: 452274 - DNA, 1192 bp, Homo sapiens
taatcacttggggaaaggaaggttcgtttctgagttagcaacaagtaaatgcagcactagtgggtgggattgaggtatgccctggtgcataaatagagactcagctgtgctggcacactcagaagcttggaccgcatcctagccgccgactcacacaaggcagagttgccatggagaaaattccagtgtcagcattcttgctccttgtggccctctcctacactctggccagagataccacagtcaaacctggagccaaaaaggacacaaaggactctcgacccaaactgccccagaccctctccagaggttggggtgaccaactcatctggactcagacatatgaagaagctctatataaatccaagacaagcaacaaacccttgatgattattcatcacttggatgagtgcccacacagtcaagctttaaagaaagtgtttgctgaaaataaagaaatccagaaattggcagagcagtttgtcctcctcaatctggtttatgaaacaactgacaaacacctttctcctgatggccagtatgtccccaggattatgtttgttgacccatctctgacagttagagccgatatcactggaagatattcaaatcgtctctatgcttacgaacctgcagatacagctctgttgcttgacaacatgaagaaagctctcaagttgctgaagactgaattgtaaagaaaaaaaatctccaagcccttctgtctgtcaggccttgagacttgaaaccagaagaagtgtgagaagactggctagtgtggaagcatagtgaacacactgattaggttatggtttaatgttacaacaactattttttaagaaaaacaagttttagaaatttggtttcaagtgtacatgtgtgaaaacaatattgtatactaccatagtgagccatgattttctaaaaaaaaaaataaatgttttggggggtggtcccgggttatttcctcccaaaaaaaagagcacaacaacacaacaacaacatcacaacagcaaaaacaacaagaagagaggacaaacaaagcaactagagacaaacaaggcacgacgaaaagcccacaccacgacaagggcaacgaacgcagaaaaaaaagacgagagacgggacaaacacgcgacaacagaacaaagtacagaagacaacacaacgagaaatacagaagctacccaca

SEQ ID NO: 452275 - DNA, 1659 bp, Homo sapiens
taatcacttggggaaaggaaggttcgtttctgagttagcaacaagtaaatgcagcactagtgggtgggattgaggtatgccctggtgcataaatagagactcagctgtgctggcacactcagaagcttggaccgcatcctagccgccgactcacacaaggcaggtgggtgaggaaatccagagttgccatggagaaaattccagtgtcagcattcttgctccttgtggccctctcctacactctggccagagataccacagtcaaacctggagccaaaaaggacacaaaggactctcgacccaaactgccccagaccctctccagaggttggggtgaccaactcatctggactcagacatatgaagaagctctatataaatccaagacaagcaacaaacccttgatgattattcatcacttggatgagtgcccacacagtcaagctttaaagaaagtgtttgctgaaaataaagaaatccagaaattggcagagcagtttgtcctcctcaatctggtttatgaaacaactgacaaacacctttctcctgatggccagtatgtccccaggattatgtttgttgacccatctctgacagttagagccgatatcactggaagatattcaaatcgtctctatgcttacgaacctgcagatacagctctgttgcttgacaacatgaagaaagctctcaagttgctgaagactgaattgtaaagaaaaaaaatctccaagcccttctgtctgtcaggccttgagacttgaaaccagaagaagtgtgagaagactggctagtgtggaagcatagtgaacacactgattaggttatggtttaatgttacaacaactattttttaagaaaaacaagttttagaaatttggtttcaagtgtacatgtgtgaaaacaatattgtatactaccatagtgagccatgattttctaaaaaaaaaaataaatgttttgggggtgttctgttttctccaacttggtctttcacagtggttcgtttaccaaataggattaaacacacacaaaatgctcaaggaagggacaagacaaaaccaaaactagttcaaatgatgaagaccaaagaccaagttatcatctcaccacaccacaggttctcactagatgactgtaagtagacacgagcttaatcaacagaagtatcaagccatgtgctttagcataaaagaatatttagaaaaacatcccaagaaaatcacatcactacctagagtcaactctggccaggaactctaaggtacacactttcatttagtaattaaattttagtcagattttgcccaacctaatgctctcagggaaagcctctggcaagtagctttctccttcagaggtctaatttagtagaaaggtcatccaaagaacatctgcactcctgaacacaccctgaagaaatcctgggaattgaccttgtaatcgatttgtctgtcaaggtcctaaagtactggagtgaaataaattcagccaacatgtgactaattggaagaagagcaaagggtggtgacgtgttgatgaggcagatggagatcagaggttactagggtttaggaaacgtgaaaggctgtggcatcagggtaggggagcattctgccgggagggagcattcagccgggaggagcattcagccgggag

SEQ ID NO: 452276 - DNA, 1805 bp, Homo sapiens
taatcacttggggaaaggaaggttcgtttctgagttagcaacaagtaaatgcagcactagtgggtgggattgaggtatgccctggtgcataaatagagactcagctgtgctggcacactcagaagcttggaccgcatcctagccgccgactcacacaaggcagagttgccatggagaaaattccagtgtcagcattcttgctccttgtggccctctcctacactctggccagagataccacagtcaaacctggagccaaaaaggacacaaaggactctcgacccaaactgccccagaccctctccagaggttggggtgaccaactcatctggactcagacatatgaagaagctctatataaatccaagacaagcaacaaacccttgatgattattcatcacttggatgagtgcccacacagtcaagctttaaagaaagtgtttgctgaaaataaagaaatccagaaattggcagagcagtttgtcctcctcaatctggtttatgaaacaactgacaaacacctttctcctgatggccagtatgtccccaggattatgtttgttgacccatctctgacagttagagccgatatcactggaagatattcaaatcgtctctatgcttacgaacctgcagatacagctctgttgcttgacaacatgaagaaagctctcaagttgctgaagactgaattgtaaagaaaaaaaatctccaagcccttctgtctgtcaggccttgagacttgaaaccagaagaagtgtgagaagactggctagtgtggaagcatagtgaacacactgattaggttatggtttaatgttacaacaactattttttaagaaaaacaagttttagaaatttggtttcaagtgtacatgtgtgaaaacaatattgtatactaccatagtgagccatgattttctaaaaaaaaaaataaatgttttgggggtgttctgttttctccaacttggtctttcacagtggttcgtttaccaaataggattaaacacacacaaaatgctcaaggaagggacaagacaaaaccaaaactagttcaaatgatgaagaccaaagaccaagttatcatctcaccacaccacaggttctcactagatgactgtaagtagacacgagcttaatcaacagaagtatcaagccatgtgctttagcataaaagaatatttagaaaaacatcccaagaaaatcacatcactacctagagtcaactctggccaggaactctaaggtacacactttcatttagtaattaaattttagtcagattttgcccaacctaatgctctcagggaaagcctctggcaagtagctttctccttcagaggtctaatttagtagaaaggtcatccaaagaacatctgcactcctgaacacaccctgaagaaatcctgggaattgaccttgtaatcgatttgtctgtcaaggtcctaaagtactggagtgaaataaattcagccaacatgtgactaattggaagaagagcaaagggtggtgacgtgttgatgaggcagatggagatcagaggttactagggtttaggaaacgtgaaaggctgtggcatcagggtaggggagcattctgcctaacagaaattagaattgtgtgttaatgtcttcactctatacttaatctcacattcattaatatatggaattcctctactgcccagcccctcctgatttctttggcccctggactatggtgctgtatataatgctttgcagtatctgttgcttgtcttgattaacttttttggataaaaccttttttgaacagaaaaaaaaaaa

SEQ ID NO: 452277 - DNA, 1911 bp, Homo sapiens
agattcacaaggccaacagacaacccaaagtcattaagccatgagagtggaatgaatctatgaaaactcaatgaagacagaacaagagaaaaatcttttcagccacgatgaattaggagaacaagatgtcaaattacactgatgctgagtcaagcttctcaaagcaagagataatcaggctgacctattgctgaggactatgagaaaaaagttattacagaatgagtcatatggaaaacacttgcaaacagaagaatattgagaacataagttgccatggagaaaattccagtgtcagcattcttgctccttgtggccctctcctacactctggccagagataccacagtcaaacctggagccaaaaaggacacaaaggactctcgacccaaactgccccagaccctctccagaggttggggtgaccaactcatctggactcagacatatgaagaagctctatataaatccaagacaagcaacaaacccttgatgattattcatcacttggatgagtgcccacacagtcaagctttaaagaaagtgtttgctgaaaataaagaaatccagaaattggcagagcagtttgtcctcctcaatctggtttatgaaacaactgacaaacacctttctcctgatggccagtatgtccccaggattatgtttgttgacccatctctgacagttagagccgatatcactggaagatattcaaatcgtctctatgcttacgaacctgcagatacagctctgttgcttgacaacatgaagaaagctctcaagttgctgaagactgaattgtaaagaaaaaaaatctccaagcccttctgtctgtcaggccttgagacttgaaaccagaagaagtgtgagaagactggctagtgtggaagcatagtgaacacactgattaggttatggtttaatgttacaacaactattttttaagaaaaacaagttttagaaatttggtttcaagtgtacatgtgtgaaaacaatattgtatactaccatagtgagccatgattttctaaaaaaaaaaataaatgttttgggggtgttctgttttctccaacttggtctttcacagtggttcgtttaccaaataggattaaacacacacaaaatgctcaaggaagggacaagacaaaaccaaaactagttcaaatgatgaagaccaaagaccaagttatcatctcaccacaccacaggttctcactagatgactgtaagtagacacgagcttaatcaacagaagtatcaagccatgtgctttagcataaaagaatatttagaaaaacatcccaagaaaatcacatcactacctagagtcaactctggccaggaactctaaggtacacactttcatttagtaattaaattttagtcagattttgcccaacctaatgctctcagggaaagcctctggcaagtagctttctccttcagaggtctaatttagtagaaaggtcatccaaagaacatctgcactcctgaacacaccctgaagaaatcctgggaattgaccttgtaatcgatttgtctgtcaaggtcctaaagtactggagtgaaataaattcagccaacatgtgactaattggaagaagagcaaagggtggtgacgtgttgatgaggcagatggagatcagaggttactagggtttaggaaacgtgaaaggctgtggcatcagggtaggggagcattctgcctaacagaaattagaattgtgtgttaatgtcttcactctatacttaatctcacattcattaatatatggaattcctctactgcccagcccctcctgatttctttggcccctggactatggtgctgtatataatgctttgcagtatctgttgcttgtcttgattaacttttttggataaaaccttttttgaacagaaaaaaaaaaa

SEQ ID NO: 452278 - DNA, 1210 bp, Homo sapiens
taatcacttggggaaaggaaggttcgtttctgagttagcaacaagtaaatgcagcactagtgggtgggattgaggtatgccctggtgcataaatagagactcagctgtgctggcacactcagaagcttggaccgcatcctagccgccgactcacacaaggcaggtgggtgaggaaatccagagttgccatggagaaaattccagtgtcagcattcttgctccttgtggccctctcctacactctggccagagataccacagtcaaacctggagccaaaaaggacacaaaggactctcgacccaaactgccccagaccctctccagaggttggggtgaccaactcatctggactcagacatatgaagaagctctatataaatccaagacaagcaacaaacccttgatgattattcatcacttggatgagtgcccacacagtcaagctttaaagaaagtgtttgctgaaaataaagaaatccagaaattggcagagcagtttgtcctcctcaatctggtttatgaaacaactgacaaacacctttctcctgatggccagtatgtccccaggattatgtttgttgacccatctctgacagttagagccgatatcactggaagatattcaaatcgtctctatgcttacgaacctgcagatacagctctgttgcttgacaacatgaagaaagctctcaagttgctgaagactgaattgtaaagaaaaaaaatctccaagcccttctgtctgtcaggccttgagacttgaaaccagaagaagtgtgagaagactggctagtgtggaagcatagtgaacacactgattaggttatggtttaatgttacaacaactattttttaagaaaaacaagttttagaaatttggtttcaagtgtacatgtgtgaaaacaatattgtatactaccatagtgagccatgattttctaaaaaaaaaaataaatgttttggggggtggtcccgggttatttcctcccaaaaaaaagagcacaacaacacaacaacaacatcacaacagcaaaaacaacaagaagagaggacaaacaaagcaactagagacaaacaaggcacgacgaaaagcccacaccacgacaagggcaacgaacgcagaaaaaaaagacgagagacgggacaaacacgcgacaacagaacaaagtacagaagacaacacaacgagaaatacagaagctacccaca

SEQ ID NO: 452279 - DNA, 716 bp, Homo sapiens
taatcacttggggaaaggaaggttcgtttctgagttagcaacaagtaaatgcagcactagtgggtgggattgaggtatgccctggtgcataaatagagactcagctgtgctggcacactcagaagcttggaccgcatcctagccgccgactcacacaaggcaggtgggtgaggaaatccagagttgccatggagaaaattccagtgtcagcattcttgctccttgtggccctctcctacactctggccagagataccacagtcaaacctggagccaaaaaggacacaaaggactctcgacccaaactgccccagaccctctccagaggttggggtgaccaactcatctggactcagacatatgaagaagctctatataaatccaagacaagcaacaaacccttgatgattattcatcacttggatgagtgcccacacagtcaagctttaaagaaagtgtttgctgaaaataaagaaatccagaaattggcagagcagtttgtcctcctcaatctggtttatgaaacaactgacaaacacctttctcctgatggccagtatgtccccaggattatgtttgttgacccatctctgacagttagagccgatatcactggaagatattcaaatcgtctctatgcttacgaacctgcagatacagctctgttgcttgacaacatgaagaaagctcagctctggcagagctctgccaagggg

SEQ ID NO: 452280 - DNA, 1859 bp, Homo sapiens
cctgcctgcacggcacaggagagcaaacttctacagacagaccaaggcttccatttgctgctgacacatggaactgaggtgaaattgtgctccatgattttacagatttcataacgtttaagagacgggactcaggtcatcaaaatgaaagccctcatctttgcagctgctggcctcctgcttctgttgcccactttttgtcagagtggcatggaaaatgatacaaacaacttggcaaagccaaccttacccattaagacctttcgtggagctcccccaaattcttttgaagagttccccttttctgccttggaaggctggacaggagccacgattactgtaaaaattaagtgccctgaagaaagtgcttcacatctccatgtgaaaaatgctaccatggggtacctgaccagctccttaagtactaaactgatacctgccatctacctcctggtgtttgtagttggtgtcccggccaatgctgtgaccctgtggatgcttttcttcaggaccagatccatctgtaccactgtattctacaccaacctggccattgcagattttcttttttgtgttacattgccctttaagatagcttatcatctcaatgggaacaactgggtatttggagaggtcctgtgccgggccaccacagtcatcttctatggcaacatgtactgctccattctgctccttgcctgcatcagcatcaaccgctacctggccatcgtccatcctttcacctaccggggcctgcccaagcacacctatgccttggtaacatgtggactggtgtgggcaacagttttcttatatatgctgccatttttcatactgaagcaggaatattatcttgttcagccagacatcaccacctgccatgatgttcacaacacttgcgagtcctcatctcccttccaactctattacttcatctccttggcattctttggattcttaattccatttgtgcttatcatctactgctatgcagccatcatccggacacttaatgcatacgatcatagatggttgtggtatgttaaggcgagtctcctcatccttgtgatttttaccatttgctttgctccaagcaatattattcttattattcaccatgctaactactactacaacaacactgatggcttatattttatatatctcatagctttgtgcctgggtagtcttaatagttgcttagatccattcctttattttctcatgtcaaaaaccagaaatcactccactgcttaccttacaaaatagtgaaatgatcttagagaacaaggacagccatcacagagaacgtctgttttcaagaacaacataagcatagtgcaaggagctccatttccgagctcctaagaaatatgcttcaaaggtcaaacattacaaaagcattagtagtttgtttgtttgtttttgagactgagtctcactttatcacccagactggcgtgcagtggcactatcttggctcattgcaacctctgcctcccaggtcagcctcccaagtagctgggattacaccaccatgcccagctactaaaaatacttgtatttttagtagagacggggtttcaccatgttgaccaggctggtcttgaactcctgacctcaagtgatcttccggcctcagcctcccaaagtgctggattacaggcgtgagccactgagccagccagcattagtaatttttaaaaacactttatcagtattttaaaaatgttaatgcaggagaaaagatatcacaactctatggaaaatgacatttccatttgccttattgctacttcaagctctttaaatcaccatcttccctatttctgcgagtggtattgccatccttgacattt

SEQ ID NO: 452281 - DNA, 911 bp, Homo sapiens
acccaggctggagtgcaatggcatgatctcggctcactgcaaactccacctcccaggttcaattgattcttctgcctcagcctcccacgtagctgtgactacaggtaaaaggtccaggagttgggctgcttggaatttccaaagggggtgagctctgcctttccatggcctctttcctgaagggcatcacggctgctgtcgtcatcaacggctctgtggccaatgttgggggaaccttacgctacaagggcgagaccctgccccctgtgggcgtcaacagaaatcgcatcaaggtgaccaaagatggctatgcagacattgtggatgtcctgaacagccctttggaaggacctgaccagaagagcttcattcctgtggaaagggcagagagcaccttcctgttcctggtaggtcaggatgaccacaactggaagagtgagttctatgctaatgaggcctgtaaacgcttgcaggcccatgggaggagaaagccccagatcatctgttacccagagacagggcactatattgagcctccttacttccccctgtgtcgggcttccctgcatgccttggtgggcagtcctattatctggggaggggagcccagggctcatgccatggctcaggtggatgcttggaaacaactccagactttcttccacaaacacttgggtggccacgaggggacaatcccatcaaaagtgtaaattttatttgatcatgtggcctctctgttgctaatctctcctggaaacatctgccacatttagtgtgtgtatgtgtattcattcttttgtttttaataactaaagttttttcccctcattattaaaatgaatttaccagtaaaaaaaaaaacaacgccaacaccgcagaaagaacaaggggggcaccggggacccttgagc

SEQ ID NO: 452282 - DNA, 2883 bp, Homo sapiens
tacttttcagaactgtattaagaactgtaacagtcactgcgagggtctgcggcttcattcttgatgtcagcgagaccaagaatccaccagaaggaaccaattccagacacagaattatttgccttcttacttcctgagagttctaggcacagaacatacttgaggtgttatacaaaggtaattagaactgacagggaattgtatgattaatgacgtgggacatgagagatttggaacgagataaaaaggcttaccttgaggacagccttattaggagcagaggcaaacacaggttttgtgggtttgaagcctacacatttatagctttctctaattacacaggtaggaaattataaaatcaggtacaagggcttggcaggggcctaaagcttaagtgatgaaaaaaaaaaaacaccacacctctggtgaaaccaatagcttacgaaaaagtagaaaaaagcgcgatgcatggggagctccggtagtcctttgaggtatttgagaggctgagtcaggaagatggcttgagcaccaggagttggaggtttgtaagtgcagtgatggtaaactgccgctgtactccagtctggcaatgtagtgagaccctgtctctcaaaaaaaaaaagtaacccttgcctgactgggacaataattgagaaaccagtaaaacaaaataataactattagccgggcgcggtggctcatgcctgtaaatcctagcattttgggaggctgaggcgggcggattacaaagtcaggagtttgagaaattactacctattaccccatttggctatttttacacttgtaaggaatgaagctcagaggtcacacagctagtaagaagccagcacccttcgatgtgggattgatgtggaggataggcatatacagagaacacaaaagcaaaacaccatggtgcagattttgaaagaaaagccctaagattagtaatgagtgtgaattattcaacaaagtgatcaaaactaactccagctctgcattcctcttcgccatcaggagtttggagcctggagactgctagctgcctggttctttaagaaccagccctggtccagcccattccgcaggccagcaagcttctgaaaagcaaacctaggaagtagctttccaacataaagtggaggtttcaacacaggagactttaagcaagttccagtgtgtctatatttggtctggctgatcggctggactctggccttccccgctcacgttagcagacagctctgccctagtgggcgcttagcctgcgacggcagcccgagaggatgtctaacaagcttctttctccccacccccattcagttgttctcaggtctgaattcaaaatggcctcatctcctgctgtccttcgagcgtcccggctgtaccaatggagcctgaagagttcggcgcagttcctggggtctccacagctgaggcaggttggtcagatcattagggttcctgctcggatggcggcgacgctgatcctggagcctgcgggccgctgctgctgggacgaaccggtgcgaatcgccgtgcgcggcctagccccggagcagccggtcacgctgcgcgcgtccctgcgcgacgagaagggcgcgcttttccaggcccacgcgcgctaccgcgccgacactcttggcgagctggacctggagcgcgcgcccgcgctgggcggcagcttcgcggggcttgagcccatggggctgctctgggccttggagcccgagaaacctttggtgcggctggtgaagcgcgacgtgcgaacgcccttggccgtggagctggaggtgctggatggccacgaccccgaccccgggcggctgctgtgccagacgcggcacgagcgctacttcctcccgcccggggtgcggcgcgagccggtgcgcgtgggccgggtgcgaggcacgctcttcctgccgccagaacctgggccctttcctgggattgtggacatgttcggaactggaggtggcctgctggagtatcgggctagtctgctggctgggaagggttttgctgtgatggctctggcttattataactatgaagacctccccaagaccatggagacgctccatctggagtactttgaagaagccatgaactacttgctcagtcatcccgaggtaaaaggtccaggagttgggctgcttggaatttccaaagggggtgagctctgcctttccatggcctctttcctgaagggcatcacggctgctgtcgtcatcaacggctctgtggccaatgttgggggaaccttacgctacaagggcgagaccctgccccctgtgggcgtcaacagaaatcgcatcaaggtgaccaaagatggctatgcagacattgtggatgtcctgaacagccctttggaaggacctgaccagaagagcttcattcctgtggaaagggcagagagcaccttcctgttcctggtaggtcaggatgaccacaactggaagagtgagttctatgctaatgaggcctgtaaacgcttgcaggcccatgggaggagaaagccccagatcatctgttacccagagacagggcactatattgagcctccttacttccccctgtgtcgggcttccctgcatgccttggtgggcagtcctattatctggggaggggagcccagggctcatgccatggctcaggtggatgcttggaaacaactccagactttcttccacaaacacttgggtggccacgaggggacaatcccatcaaaagtgtaaattttatttgatcatgtggcctctctgttgctaatctctcctggaaacatctgccacatttagtgtgtgtatgtgtattcattcttttgtttttaataactaaagttttttcccctcattattaaaatgaatttaccagtaa

SEQ ID NO: 452283 - DNA, 2410 bp, Homo sapiens
acggagtctcgctctgtcgcccaggctggagtgcagtggcgggatctcggctcactgcaagctccgcctcccgggttcacgccattctcctgcctcagcctcccaagtagctgggactacaggcgcccgccactacgcccggctaattttttttgtatttttagtagagacggggtttcaccgttttagccgggatggtctcgatctcctgacctcgtgatccgcccgcctcggcctcccaaagtgctgggattacaggcgtgagcgggcggattacaaagtcaggagtttgagaaattactacctattaccccatttggctatttttacacttgtaaggaatgaagctcagaggtcacacagctagtaagaagccagcacccttcgatgtgggattgatgtggaggataggcatatacagagaacacaaaagcaaaacaccatggtgcagattttgaaagaaaagccctaagattagtaatgagtgtgaattattcaacaaagtgatcaaaactaactccagctctgcattcctcttcgccatcaggagtttggagcctggagactgctagctgcctggttctttaagaaccagccctggtccagcccattccgcaggccagcaagcttctgaaaagcaaacctaggaagtagctttccaacataaagtggaggtttcaacacaggagactttaagcaagttccagtgtgtctatatttggtctggctgatcggctggactctggccttccccgctcacgttagcagacagctctgccctagtgggcgcttagcctgcgacggcagcccgagaggatgtctaacaagcttctttctccccacccccattcagttgttctcaggtctgaattcaaaatggcctcatctcctgctgtccttcgagcgtcccggctgtaccaatggagcctgaagagttcggcgcagttcctggggtctccacagctgaggcaggttggtcagatcattagggttcctgctcggatggcggcgacgctgatcctggagcctgcgggccgctgctgctgggacgaaccggtgcgaatcgccgtgcgcggcctagccccggagcagccggtcacgctgcgcgcgtccctgcgcgacgagaagggcgcgcttttccaggcccacgcgcgctaccgcgccgacactcttggcgagctggacctggagcgcgcgcccgcgctgggcggcagcttcgcggggcttgagcccatggggctgctctgggccttggagcccgagaaacctttggtgcggctggtgaagcgcgacgtgcgaacgcccttggccgtggagctggaggtgctggatggccacgaccccgaccccgggcggctgctgtgccagacgcggcacgagcgctacttcctcccgcccggggtgcggcgcgagccggtgcgcgtgggccgggtgcgaggcacgctcttcctgccgccagaacctgggccctttcctgggattgtggacatgttcggaactggaggtggcctgctggagtatcgggctagtctgctggctgggaagggttttgctgtgatggctctggcttattataactatgaagacctccccaagaccatggagacgctccatctggagtactttgaagaagccatgaactacttgctcagtcatcccgaggtaaaaggtccaggagttgggctgcttggaatttccaaagggggtgagctctgcctttccatggcctctttcctgaagggcatcacggctgctgtcgtcatcaacggctctgtggccaatgttgggggaaccttacgctacaagggcgagaccctgccccctgtgggcgtcaacagaaatcgcatcaaggtgaccaaagatggctatgcagacattgtggatgtcctgaacagccctttggaaggacctgaccagaagagcttcattcctgtggaaagggcagagagcaccttcctgttcctggtaggtcaggatgaccacaactggaagagtgagttctatgctaatgaggcctgtaaacgcttgcaggcccatgggaggagaaagccccagatcatctgttacccagagacagggcactatattgagcctccttacttccccctgtgtcgggcttccctgcatgccttggtgggcagtcctattatctggggaggggagcccagggctcatgccatggctcaggtggatgcttggaaacaactccagactttcttccacaaacacttgggtggccacgaggggacaatcccatcaaaagtgtaaattttatttgatcatgtggcctctctgttgctaatctctcctggaaacatctgccacatttagtgtgtgtatgtgtattcattcttttgtttttaataactaaagttttttcccctcattattaaaatgaatttaccagtaa

SEQ ID NO: 452284 - DNA, 1598 bp, Homo sapiens
  misc_feature (41)..(41): n is a, c, g, or t
catttgctacacattattgaaaacaccccttggggttttantatataagcagtgtcggtcgaaatcggactcatctcctgctgtccttcgagcgtcccggctgtaccaatggagcctgaagagttcggcgcagttcctggggtctccacagctgaggcaggttggtcagatcattagggttcctgctcggatggcggcgacgctgatcctggagcctgcgggccgctgctgctgggacgaaccggtgcgaatcgccgtgcgcggcctagccccggagcagccggtcacgctgcgcgcgtccctgcgcgacgagaagggcgcgcttttccaggcccacgcgcgctaccgcgccgacactcttggcgagctggacctggagcgcgcgcccgcgctgggcggcagcttcgcggggcttgagcccatggggctgctctgggccttggagcccgagaaacctttggtgcggctggtgaagcgcgacgtgcgaacgcccttggccgtggagctggaggtgctggatggccacgaccccgaccccgggcggctgctgtgccagacgcggcacgagcgctacttcctcccgcccggggtgcggcgcgagccggtgcgcgtgggccgggtgcgaggcacgctcttcctgccgccagaacctgggccctttcctgggattgtggacatgttcggaactggaggtggcctgctggagtatcgggctagtctgctggctgggaagggttttgctgtgatggctctggcttattataactatgaagacctccccaagaccatggagacgctccatctggagtactttgaagaagccatgaactacttgctcagtcatcccgaggtaaaaggtccaggagttgggctgcttggaatttccaaagggggtgagctctgcctttccatggcctctttcctgaagggcatcacggctgctgtcgtcatcaacggctctgtggccaatgttgggggaaccttacgctacaagggcgagaccctgccccctgtgggcgtcaacagaaatcgcatcaaggtgaccaaagatggctatgcagacattgtggatgtcctgaacagccctttggaaggacctgaccagaagagcttcattcctgtggaaagggcagagagcaccttcctgttcctggtaggtcaggatgaccacaactggaagagtgagttctatgctaatgaggcctgtaaacgcttgcaggcccatgggaggagaaagccccagatcatctgttacccagagacagggcactatattgagcctccttacttccccctgtgtcgggcttccctgcatgccttggtgggcagtcctattatctggggaggggagcccagggctcatgccatggctcaggtggatgcttggaaacaactccagactttcttccacaaacacttgggtggccacgaggggacaatcccatcaaaagtgtaaattttatttgatcatgtggcctctctgttgctaatctctcctggaaacatctgccacatttagtgtgtgtatgtgtattcattcttttgtttttaataactaaagttttttcccctcattattaaaatgaatttaccagtaa

SEQ ID NO: 452285 - DNA, 2396 bp, Homo sapiens
tacttttcagaactgtattaagaactgtaacagtcactgcgagggtctgcggcttcattcttgatgtcagcgagaccaagaatccaccagaaggaaccaattccagacacagaattatttgccttcttacttcctgagagttctaggcacagaacatacttgaggtgttatacaaaggtaattagaactgacagggaattgtatgattaatgacgtgggacatgagagatttggaacgagataaaaaggcttaccttgaggacagccttattaggagcagaggcaaacacaggttttgtgggtttgaagcctacacatttatagctttctctaattacacaggtaggaaattataaaatcaggtacaagggcttggcaggggcctaaagcttaagtgatgaaaaaaaaaaaacaccacacctctggtgaaaccaatagcttacgaaaaagtagaaaaaagcgcgatgcatggggagctccggtagtcctttgaggtatttgagaggctgagtcaggaagatggcttgagcaccaggagttggaggtttgtaagtgcagtgatggtaaactgccgctgtactccagtctggcaatgtagtgagaccctgtctctcaaaaaaaaaaagtaacccttgcctgactgggacaataattgagaaaccagtaaaacaaaataataactattagccgggcgcggtggctcatgcctgtaaatcctagcattttgggaggctgaggcgggcggattacaaagtcaggagtttgagaaattactacctattaccccatttggctatttttacacttgtaaggaatgaagctcagaggtcacacagctagtaagaagccagcacccttcgatgtgggattgatgtggaggataggcatatacagagaacacaaaagcaaaacaccatggtgcagattttgaaagaaaagccctaagattagtaatgagtgtgaattattcaacaaagtgatcaaaactaactccagctctgcattcctcttcgccatcaggagtttggagcctggagactgctagctgcctggttctttaagaaccagccctggtccagcccattccgcaggccagcaagcttctgaaaagcaaacctaggaagtagctttccaacataaagtggaggtttcaacacaggagactttaagcaagttccagtgtgtctatatttggtctggctgatcggctggactctggccttccccgctcacgttagcagacagctctgccctagtgggcgcttagcctgcgacggcagcccgagaggatgtctaacaagcttctttctccccacccccattcagttgttctcaggtctgaattcaaaatggcctcatctcctgctgtccttcgagcgtcccggctgtaccaatggagcctgaagagttcggcgcagttcctggggtctccacagctgaggcagaacctgggccctttcctgggattgtggacatgttcggaactggaggtggcctgctggagtatcgggctagtctgctggctgggaagggttttgctgtgatggctctggcttattataactatgaagacctccccaagaccatggagacgctccatctggagtactttgaagaagccatgaactacttgctcagtcatcccgaggtaaaaggtccaggagttgggctgcttggaatttccaaagggggtgagctctgcctttccatggcctctttcctgaagggcatcacggctgctgtcgtcatcaacggctctgtggccaatgttgggggaaccttacgctacaagggcgagaccctgccccctgtgggcgtcaacagaaatcgcatcaaggtgaccaaagatggctatgcagacattgtggatgtcctgaacagccctttggaaggacctgaccagaagagcttcattcctgtggaaagggcagagagcaccttcctgttcctggtaggtcaggatgaccacaactggaagagtgagttctatgctaatgaggcctgtaaacgcttgcaggcccatgggaggagaaagccccagatcatctgttacccagagacagggcactatattgagcctccttacttccccctgtgtcgggcttccctgcatgccttggtgggcagtcctattatctggggaggggagcccagggctcatgccatggctcaggtggatgcttggaaacaactccagactttcttccacaaacacttgggtggccacgaggggacaatcccatcaaaagtgtaaattttatttgatcatgtggcctctctgttgctaatctctcctggaaacatctgccacatttagtgtgtgtatgtgtattcattcttttgtttttaataactaaagttttttcccctcattattaaaatgaatttaccagtaa

SEQ ID NO: 452286 - DNA, 2337 bp, Homo sapiens
tacttttcagaactgtattaagaactgtaacagtcactgcgagggtctgcggcttcattcttgatgtcagcgagaccaagaatccaccagaaggaaccaattccagacacagaattatttgccttcttacttcctgagagttctaggcacagaacatacttgaggtgttatacaaaggtaattagaactgacagggaattgtatgattaatgacgtgggacatgagagatttggaacgagataaaaaggcttaccttgaggacagccttattaggagcagaggcaaacacaggttttgtgggtttgaagcctacacatttatagctttctctaattacacaggtaggaaattataaaatcaggtacaagggcttggcaggggcctaaagcttaagtgatgaaaaaaaaaaaacaccacacctctggtgaaaccaatagcttacgaaaaagtagaaaaaagcgcgatgcatggggagctccggtagtcctttgaggtatttgagaggctgagtcaggaagatggcttgagcaccaggagttggaggtttgtaagtgcagtgatggtaaactgccgctgtactccagtctggcaatgtagtgagaccctgtctctcaaaaaaaaaaagtaacccttgcctgactgggacaataattgagaaaccagtaaaacaaaataataactattagccgggcgcggtggctcatgcctgtaaatcctagcattttgggaggctgaggcgggcggattacaaagtcaggagtttgagaaattactacctattaccccatttggctatttttacacttgtaaggaatgaagctcagaggtcacacagctagtaagaagccagcacccttcgatgtgggattgatgtggaggataggcatatacagagaacacaaaagcaaaacaccatggtgcagattttgaaagaaaagccctaagattagtaatgagtgtgaattattcaacaaagtgatcaaaactaactccagctctgcattcctcttcgccatcaggagtttggagcctggagactgctagctgcctggttctttaagaaccagccctggtccagcccattccgcaggccagcaagcttctgaaaagcaaacctaggaagtagctttccaacataaagtggaggtttcaacacaggagactttaagcaagttccagtgtgtctatatttggtctggctgatcggctggactctggccttccccgctcacgttagcagacagctctgccctagtgggcgcttagcctgcgacggcagcccgagaggatgtctaacaagcttctttctccccacccccattcagttgttctcaggtctgaattcaaaatggcctcatctcctgctgtccttcgagcgtcccggctgtaccaatggagcctgaagagttcggcgcagttcctggggtctccacagctgaggcagtatcgggctagtctgctggctgggaagggttttgctgtgatggctctggcttattataactatgaagacctccccaagaccatggagacgctccatctggagtactttgaagaagccatgaactacttgctcagtcatcccgaggtaaaaggtccaggagttgggctgcttggaatttccaaagggggtgagctctgcctttccatggcctctttcctgaagggcatcacggctgctgtcgtcatcaacggctctgtggccaatgttgggggaaccttacgctacaagggcgagaccctgccccctgtgggcgtcaacagaaatcgcatcaaggtgaccaaagatggctatgcagacattgtggatgtcctgaacagccctttggaaggacctgaccagaagagcttcattcctgtggaaagggcagagagcaccttcctgttcctggtaggtcaggatgaccacaactggaagagtgagttctatgctaatgaggcctgtaaacgcttgcaggcccatgggaggagaaagccccagatcatctgttacccagagacagggcactatattgagcctccttacttccccctgtgtcgggcttccctgcatgccttggtgggcagtcctattatctggggaggggagcccagggctcatgccatggctcaggtggatgcttggaaacaactccagactttcttccacaaacacttgggtggccacgaggggacaatcccatcaaaagtgtaaattttatttgatcatgtggcctctctgttgctaatctctcctggaaacatctgccacatttagtgtgtgtatgtgtattcattcttttgtttttaataactaaagttttttcccctcattattaaaatgaatttaccagtaa

SEQ ID NO: 452287 - DNA, 929 bp, Homo sapiens
gctttccaacataaagtggaggtttcaacacaggagactttaagcaagttccagtgtgtctatatttggtctggctgatcggctggactctggccttccccgctcacgttagcagacagctctgccctagtgggcgcttagcctgcgacggcagcccgagaggatgtctaacaagcttctttctccccacccccattcagttgttctcaggtctgaattcaaaatggcctcatctcctgctgtccttcgagcgtcccggctgtaccaatggagcctgaagagttcggcgcagttcctggggtctccacagctgaggcaggttggtcagatcattagggttcctgctcggatggcggcgacgctgatcctggagcctgcgggccgctgctgctgggacgaaccggtgcgaatcgccgtgcgcggcctagccccggagcagccggtcacgctgcgcgcgtccctgcgcgacgagaagggcgcgcttttccaggcccacgcgcgctaccgcgccgacactcttggcgagctggacctggagcgcgcgcccgcgctgggcggcagcttcgcggggcttgagcccatggggctgctctgggccttggagcccgagaaacctttggtgcggctggtgaagcgcgacgtgcgaacgcccttggccgtggagctggaggtgctggatggccacgaccccgaccccgggcggctgctgtgccagacgcggcacgagcgctacttcctcccgcccggggtgcggcgcgagccggtgcgcgtgggccgggtgcgaggcacgctcttcctgccgccaggtgactcacctccgctaattgttccgtgttcgttcgcctttcactttgtgtgtctcccccgccccacgcttttcgcttatgtgtatgcccccccgccgcgcccccgggctatattgcccaggc

SEQ ID NO: 452288 - DNA, 1104 bp, Homo sapiens
tggaggtttcaacacaggagactttaagcaagttccagtgtgtctatatttggtctggctgatcggctggactctggccttccccgctcacattagcagacagctctgccctagtgggcgtttagcctgcgacggcagcccgagaggaagagttgggcagagttgcaggggtctccacagctgaggcagtttggccggattatttgggttcctgctcggatggcggcgacgctgatcctggagcccgcgggccgctgctgctgggacgaaccggtgcgaatcgccgtgcgcggcctagccccggagcagccggtcacgctgcgcgcgtccctgcgcgacgagaagggcgcgcttttccaggcccacgcgcgctaccgcgccgacacccttggcgagctggacctggagcgcgcgcccgcgctgggcggcagcttcgcggggcttgagcccatggggctgctctgggccttggagcccgagaaacccttggtgcggctggtgaagcgcgacgtgcgaacgcccttggccgtggagctggaggtgctggatggccacgaccccgaccccgggcggctgctgtgccgggtgcggcacgagcgctacttcctcccgcccggggtgcggcgcgagccggtgcgcgcgggccgggtgcgaggcacgctcttcctgccgccagaacctgggccctttcctggcattgtggacatgttcggaactggaggtggcctgctggagtatcgggctagtctgctggctgggaagggtttgctgtgatggctctggcttactataactatgaagacctccccaagaccatggagacgctccatctggagtactttgaagaagctgtgaactacttgctcagtcatcctgaggtaaaaggtccaggagttgggctgcttggaatttccaaagggggtgagctctgcctttccatggcctctttcctgaagggcatcacggctgctgtcgtcatcaacggctctgtggccaatgttgggggaaccttacgctacaagggcgagaccctgccccctgtgggcgtcaacagaaatcgcatcaaggtgaccaaagatggctatgcagacattgtggatgtcc

SEQ ID NO: 452289 - DNA, 2942 bp, Homo sapiens
tacttttcagaactgtattaagaactgtaacagtcactgcgagggtctgcggcttcattcttgatgtcagcgagaccaagaatccaccagaaggaaccaattccagacacagaattatttgccttcttacttcctgagagttctaggcacagaacatacttgaggtgttatacaaaggtaattagaactgacagggaattgtatgattaatgacgtgggacatgagagatttggaacgagataaaaaggcttaccttgaggacagccttattaggagcagaggcaaacacaggttttgtgggtttgaagcctacacatttatagctttctctaattacacaggtaggaaattataaaatcaggtacaagggcttggcaggggcctaaagcttaagtgatgaaaaaaaaaaaacaccacacctctggtgaaaccaatagcttacgaaaaagtagaaaaaagcgcgatgcatggggagctccggtagtcctttgaggtatttgagaggctgagtcaggaagatggcttgagcaccaggagttggaggtttgtaagtgcagtgatggtaaactgccgctgtactccagtctggcaatgtagtgagaccctgtctctcaaaaaaaaaaagtaacccttgcctgactgggacaataattgagaaaccagtaaaacaaaataataactattagccgggcgcggtggctcatgcctgtaaatcctagcattttgggaggctgaggcgggcggattacaaagtcaggagtttgagaaattactacctattaccccatttggctatttttacacttgtaaggaatgaagctcagaggtcacacagctagtaagaagccagcacccttcgatgtgggattgatgtggaggataggcatatacagagaacacaaaagcaaaacaccatggtgcagattttgaaagaaaagccctaagattagtaatgagtgtgaattattcaacaaagtgatcaaaactaactccagctctgcattcctcttcgccatcaggagtttggagcctggagactgctagctgcctggttctttaagaaccagccctggtccagcccattccgcaggccagcaagcttctgaaaagcaaacctaggaagtagctttccaacataaagtggaggtttcaacacaggagactttaagcaagttccagtgtgtctatatttggtctggctgatcggctggactctggccttccccgctcacgttagcagacagctctgccctagtgggcgcttagcctgcgacggcagcccgagaggatgtctaacaagcttctttctccccacccccattcagttgttctcaggtctgaattcaaaatggcctcatctcctgctgtccttcgagcgtcccggctgtaccaatggagcctgaagagttcggcgcagttcctggggtctccacagctgaggcaggttggtcagatcattagggttcctgctcggatggcggcgacgctgatcctggagcctgcgggccgctgctgctgggacgaaccggtgcgaatcgccgtgcgcggcctagccccggagcagccggtcacgctgcgcgcgtccctgcgcgacgagaagggcgcgcttttccaggcccacgcgcgctaccgcgccgacactcttggcgagctggacctggagcgcgcgcccgcgctgggcggcagcttcgcggggcttgagcccatggggctgctctgggccttggagcccgagaaacctttggtgcggctggtgaagcgcgacgtgcgaacgcccttggccgtggagctggaggtgctggatggccacgaccccgaccccgggcggctgctgtgccagacgcggcacgagcgctacttcctcccgcccggggtgcggcgcgagccggtgcgcgtgggccgggtgcgaggcacgctcttcctgccgccagaacctgggccctttcctgggattgtggacatgttcggaactggaggtggcctgctggagtatcgggctagtctgctggctgggaagggttttgctgtgatggctctggcttattataactatgaagacctccccaagaccatggagacgctccatctggagtactttgaagaagccatgaactacttgctcagtcatcccgaggtaaaaggtccaggagttgggctgcttggaatttccaaagggggtgagctctgcctttccatggcctctttcctgaagggcatcacggctgctgtcgtcatcaacggctctgtggccaatgttgggggaaccttacgctacaagggcgagaccctgccccctgtgggcgtcaacagaaatcgcatcaaggtgaccaaagatggctatgcagacattgtggatgtcctgaacagccctttggaaggacctgaccagaagagcttcattcctgtggaaagggcagagagcaccttcctgttcctggtaggtcaggatgaccacaactggaagagtgagttctatgctaatgaggcctgtaaacgcttgcaggcccatgggaggagaaagccccagatcatctgttacccagagacagggcactatattgagcctccttacttccccctgtgtcgggcttccctgcatgccttggtgggcagtcctattatctggggaggggagcccagggctcatgccatggctcaggtggatgcttggaaacaactccagactttcttccacaaacacttgggtggccacgaggggacaatcccatcaaaagtgtaaattttatttgatcatgtggcctctctgttgctaatctctcctggaaacatctgccacatttagtgtgtgtatgtgtattcattcttttgtttttaataactaaagttttttcccctcattattaaaatgaatttaccagtaaaaaaaaaaacaacgccaacaccgcagaaagaacaaggggggcaccggggacccttgagc

SEQ ID NO: 452290 - DNA, 2889 bp, Homo sapiens
tacttttcagaactgtattaagaactgtaacagtcactgcgagggtctgcggcttcattcttgatgtcagcgagaccaagaatccaccagaaggaaccaattccagacacagaattatttgccttcttacttcctgagagttctaggcacagaacatacttgaggtgttatacaaaggtaattagaactgacagggaattgtatgattaatgacgtgggacatgagagatttggaacgagataaaaaggcttaccttgaggacagccttattaggagcagaggcaaacacaggttttgtgggtttgaagcctacacatttatagctttctctaattacacaggtaggaaattataaaatcaggtacaagggcttggcaggggcctaaagcttaagtgatgaaaaaaaaaaaacaccacacctctggtgaaaccaatagcttacgaaaaagtagaaaaaagcgcgatgcatggggagctccggtagtcctttgaggtatttgagaggctgagtcaggaagatggcttgagcaccaggagttggaggtttgtaagtgcagtgatggtaaactgccgctgtactccagtctggcaatgtagtgagaccctgtctctcaaaaaaaaaaagtaacccttgcctgactgggacaataattgagaaaccagtaaaacaaaataataactattagccgggcgcggtggctcatgcctgtaaatcctagcattttgggaggctgaggcgggcggattacaaagtcaggagtttgagaaattactacctattaccccatttggctatttttacacttgtaaggaatgaagctcagaggtcacacagctagtaagaagccagcacccttcgatgtgggattgatgtggaggataggcatatacagagaacacaaaagcaaaacaccatggtgcagattttgaaagaaaagccctaagattagtaatgagtgtgaattattcaacaaagtgatcaaaactaactccagctctgcattcctcttcgccatcaggagtttggagcctggagactgctagctgcctggttctttaagaaccagccctggtccagcccattccgcaggccagcaagcttctgaaaagcaaacctaggaagtagctttccaacataaagtggaggtttcaacacaggagactttaagcaagttccagtgtgtctatatttggtctggctgatcggctggactctggccttccccgctcacgttagcagacagctctgccctagtgggcgcttagcctgcgacggcagcccgagaggatgtctaacaagcttctttctccccacccccattcagttgttctcaggtctgaattcaaaatggcctcatctcctgctgtccttcgagcgtcccggctgtaccaatggagcctgaagagttcggcgcagttcctggggtctccacagctgaggcaggttggtcagatcattagggttcctgctcggatggcggcgacgctgatcctggagcctgcgggccgctgctgctgggacgaaccggtgcgaatcgccgtgcgcggcctagccccggagcagccggtcacgctgcgcgcgtccctgcgcgacgagaagggcgcgcttttccaggcccacgcgcgctaccgcgccgacactcttggcgagctggacctggagcgcgcgcccgcgctgggcggcagcttcgcggggcttgagcccatggggctgctctgggccttggagcccgagaaacctttggtgcggctggtgaagcgcgacgtgcgaacgcccttggccgtggagctggaggtgctggatggccacgaccccgaccccgggcggctgctgtgccagacgcggcacgagcgctacttcctcccgcccggggtgcggcgcgagccggtgcgcgtgggccgggtgcgaggcacgctcttcctgccgccagaacctgggccctttcctgggattgtggacatgttcggaactggaggtggcctgctggagtatcgggctagtctgctggctgggaagggttttgctgtgatggctctggcttattataactatgaagacctccccaagaccatggagacgctccatctggagtactttgaagcatagttataataagccagaggcacgagtaatcccgaggtaaaaggtccaggagttgggctgcttggaatttccaaagggggtgagctctgcctttccatggcctctttcctgaagggcatcacggctgctgtcgtcatcaacggctctgtggccaatgttgggggaaccttacgctacaagggcgagaccctgccccctgtgggcgtcaacagaaatcgcatcaaggtgaccaaagatggctatgcagacattgtggatgtcctgaacagccctttggaaggacctgaccagaagagcttcattcctgtggaaagggcagagagcaccttcctgttcctggtaggtcaggatgaccacaactggaagagtgagttctatgctaatgaggcctgtaaacgcttgcaggcccatgggaggagaaagccccagatcatctgttacccagagacagggcactatattgagcctccttacttccccctgtgtcgggcttccctgcatgccttggtgggcagtcctattatctggggaggggagcccagggctcatgccatggctcaggtggatgcttggaaacaactccagactttcttccacaaacacttgggtggccacgaggggacaatcccatcaaaagtgtaaattttatttgatcatgtggcctctctgttgctaatctctcctggaaacatctgccacatttagtgtgtgtatgtgtattcattcttttgtttttaataactaaagttttttcccctcattattaaaatgaatttaccagtaa

SEQ ID NO: 452291 - DNA, 1247 bp, Homo sapiens
tacttttcagaactgtattaagaactgtaacagtcactgcgagggtctgcggcttcattcttgatgtcagcgagaccaagaatccaccagaaggaaccaattccagacacagaattatttgccttcttacttcctgagagttctaggcacagaacatacttgaggtgttatacaaagttgttctcaggtctgaattcaaaatggcctcatctcctgctgtccttcgagcgtcccggctgtaccaatggagcctgaagagttcggcgcagttcctggggtctccacagctgaggcagaacctgggccctttcctgggattgtggacatgttcggaactggaggtggcctgctggagtatcgggctagtctgctggctgggaagggttttgctgtgatggctctggcttattataactatgaagacctccccaagaccatggagacgctccatctggagtactttgaagaagccatgaactacttgctcagtcatcccgaggtaaaaggtccaggagttgggctgcttggaatttccaaagggggtgagctctgcctttccatggcctctttcctgaagggcatcacggctgctgtcgtcatcaacggctctgtggccaatgttgggggaaccttacgctacaagggcgagaccctgccccctgtgggcgtcaacagaaatcgcatcaaggtgaccaaagatggctatgcagacattgtggatgtcctgaacagccctttggaaggacctgaccagaagagcttcattcctgtggaaagggcagagagcaccttcctgttcctggtaggtcaggatgaccacaactggaagagtgagttctatgctaatgaggcctgtaaacgcttgcaggcccatgggaggagaaagccccagatcatctgttacccagagacagggcactatattgagcctccttacttccccctgtgtcgggcttccctgcatgccttggtgggcagtcctattatctggggaggggagcccagggctcatgccatggctcaggtggatgcttggaaacaactccagactttcttccacaaacacttgggtggccacgaggggacaatcccatcaaaagtgtaaattttatttgatcatgtggcctctctgttgctaatctctcctggaaacatctgccacatttagtgtgtgtatgtgtattcattcttttgtttttaataactaaagttttttcccctcattattaaaatgaatttaccagtaa

SEQ ID NO: 452292 - DNA, 852 bp, Homo sapiens
acccaggctggagtgcaatggcatgatctcggctcactgcaaactccacctcccaggttcaattgattcttctgcctcagcctcccacgtagctgtgactacaggtaaaaggtccaggagttgggctgcttggaatttccaaagggggtgagctctgcctttccatggcctctttcctgaagggcatcacggctgctgtcgtcatcaacggctctgtggccaatgttgggggaaccttacgctacaagggcgagaccctgccccctgtgggcgtcaacagaaatcgcatcaaggtgaccaaagatggctatgcagacattgtggatgtcctgaacagccctttggaaggacctgaccagaagagcttcattcctgtggaaagggcagagagcaccttcctgttcctggtaggtcaggatgaccacaactggaagagtgagttctatgctaatgaggcctgtaaacgcttgcaggcccatgggaggagaaagccccagatcatctgttacccagagacagggcactatattgagcctccttacttccccctgtgtcgggcttccctgcatgccttggtgggcagtcctattatctggggaggggagcccagggctcatgccatggctcaggtggatgcttggaaacaactccagactttcttccacaaacacttgggtggccacgaggggacaatcccatcaaaagtgtaaattttatttgatcatgtggcctctctgttgctaatctctcctggaaacatctgccacatttagtgtgtgtatgtgtattcattcttttgtttttaataactaaagttttttcccctcattattaaaatgaatttaccagtaa

SEQ ID NO: 452293 - DNA, 3182 bp, Homo sapiens
gtggggcttacagaaatgactgccggtcatttgaatgagacctggaacaaatcgtttctcagaagtacttttctgttcatcaccagtctgtaaaatacatgtacctatagaaatagaacactgcctctgagttttgatgctgtatttgctgccagacactgagcttctgagacatccctgattctctctccatttggaattacaaccattgtattttgtttgtggcataaattacagtcatctgtctttcactggaatgaagaccatgcctaggaacattttttaaggactcagctgtggcttttagggcttggttcataccatgggggaaaaaaaagtcctaggagaaagcgacgtggctcattagtgttgcctcttcagtgctcaagccgcctggtggattcctatgacacagggggcctggaaagaaagggaaagtggatttaaaatatatatatacgtaacccaagccccataacccctaactggacaaatgaggtctgtttctttgggcctgaggctgtgccatataaagtcttattttgggactttacaaacttgtcctaactatcttgtggatagtgggctgtgacaatctggaatagagaacgttcacacttcgctcctttaaagaagcgaccccagatctgcaagggagtagattctgctatcttggcctcacagcccttcctgttgattacaaagcccgtggaagaaaacagaacacaccctcctcagttccgtctaaatgtgtttcttctgcttcaattacaccagttctggggcaaagacactgatgaaacaacacccatacctgaaaagaataaatgtgtgactttcaaatcccctttcgcagtgaaagaaacagcaaacacttaagattcagcatctgttctccagttgcactgaggaatgcactgtctcgcagcaccagctctgcagagcccttgccccagactctttgcggttttatttatatgtatttccatatttcattcctgtgtgtcactgctgcattggtgtggcagcaagtgaccaaatgctacaggtcttactatggacaccaggtcaggtgcaaccacacaaaacaaagccagttccatgagctgcctatgatatgcattgcggaagtaacattttacccagggtgtgccattgcagtgatataaatatatttttttcttagactaaatatgagctgactatctcttttgatgtgtgtacataggtgtgagtgtgtgtgtatgcgtgcctgtctgtgtgcgggtgtgtgtatgtgcatagcctcatgcttaggactacccatgaatgttgtggaatgctacacctggagagttctggttttccaccagtttcaagatgaagaactacatgatacagtggacctggagaccatccccttggaaagacaacccagagatgttcagcatcctgtatctacacgcatcctgtatctacacgtgtattttgtagctgtcacactaaccttaataagaattctacagctttggacagaggcattttcaccttaatggtgaagtaatttaaaatataaatccattcaggtgacaacccatcatcaaaattacaaattttctgattgaactcatctgaatcatcagttccttgatggagagagagaaggagatggaatgtgtctggtaaccccaaatggagtacaagtagcctttgttttcctgcataaatggacttgttgaatgcgaacgaatatatgcaattcatatacttttggagatgaacgtagatatgtgtgtcagctttgagatggtgtgtcctggattaatactttgtctcccaatatcacagaaaaatacatgccagtgactcttgaggttaaggtagttgggatgaaatggcctcaggcaatttcacattccctaattacctggaaagttctacagtaattaatatgcagctaactcctgttgccctcacaagagcatcagccttctagaatcggagctccggagtgtgaagattcagtattgatatgatatgtataccaaactccagccaacttactgccatttttcataatctgagtggctgccttgcttatcctaagctgtggttgcagaaaccgtggccatttatataagctataacatcaaatcagggaaaaatgaggaaaaaaaatagattctgaaccatttattgttgaataagtagagaaaatcatcaataaatatttattacattctgacagggtgtgtggcattgtgttctatgccagagtgacaaagttgattcacccctttttggggaccttaatatattttttaagggatgtgcctatgcattgatgcctgaaaaatatgtataaagaaatgaggttgactcttctgagcagttcatcttttccagaggtaagggtaggaggccaacttcaggatctgggtctgagcccgtgggcaagccctggccgagtgagctccaatgctaactcatgtgccgatctctagagcagtgggaaactaccccgctgcaccaaatcaagtagcttcaccttgtgtatgcaggccccaagttattttttagcaatcttacgagtgaaatgttctggtgggttgaaaaacgttcttattttaaagaaaggttgtgctcgctacactgctggtgtgtgcattctgagacctcttgtattcaatctgtgaaggatatgtgtattaatccgtacacccgtatagcctcaatatttgtctgaagacacttaaattctgacccataaaggaaagttctagaagcaatattttcacttatttaacattctccaaacaacatcaagcattgatacacactgaagagtgcgtttattttttgtatcactctaagtatgttggaatatgcaaggactgtggttcaaattagaatgtataaggcatattataatttagttcatactgaataagaaattaacagaacattgttcggttcacacgttccaaactttgagtgatttctggagttagacatagattttctattttgttttaatttgtcaaggtatttttcttcccttcatgaactttaggtacacataacttatgtcatttatttatggtcttttatacctagtttgtaaaattgtaaaatagcaaactaaatgcaaagagtttgcatttgaaaataataaagtagttgccgtatacaaccctgcaaac

SEQ ID NO: 452294 - DNA, 2747 bp, Homo sapiens
ggagttgtaattaagctgttagtaaacaggttttttttgctcttataattgctatttttcagaaaaggaaagtataattcgtgatctcaccactgaactacttttactgaaggataccaacttctacgaacctatatattctttcttacaatagtggttgacagttggctcgcaatatgggtcgacgttttgtctaaagtcttgctcttttatctacagggagtagattctgctatcttggcctcacagcccttcctgttgattacaaagcccgtggaagaaaacagaacacaccctcctcagttccgtctaaatgtgtttcttctgcttcaattacaccagttctggggcaaagacactgatgaaacaacacccatacctgaaaagaataaatgtgtgactttcaaatcccctttcgcagtgaaagaaacagcaaacacttaagattcagcatctgttctccagttgcactgaggaatgcactgtctcgcagcaccagctctgcagagcccttgccccagactctttgcggttttatttatatgtatttccatatttcattcctgtgtgtcactgctgcattggtgtggcagcaagtgaccaaatgctacaggtcttactatggacaccaggtcaggtgcaaccacacaaaacaaagccagttccatgagctgcctatgatatgcattgcggaagtaacattttacccagggtgtgccattgcagtgatataaatatatttttttcttagactaaatatgagctgactatctcttttgatgtgtgtacataggtgtgagtgtgtgtgtatgcgtgcctgtctgtgtgcgggtgtgtgtatgtgcatagcctcatgcttaggactacccatgaatgttgtggaatgctacacctggagagttctggttttccaccagtttcaagatgaagaactacatgatacagtggacctggagaccatccccttggaaagacaacccagagatgttcagcatcctgtatctacacgcatcctgtatctacacgtgtattttgtagctgtcacactaaccttaataagaattctacagctttggacagaggcattttcaccttaatggtgaagtaatttaaaatataaatccattcaggtgacaacccatcatcaaaattacaaattttctgattgaactcatctgaatcatcagttccttgatggagagagagaaggagatggaatgtgtctggtaaccccaaatggagtacaagtagcctttgttttcctgcataaatggacttgttgaatgcgaacgaatatatgcaattcatatacttttggagatgaacgtagatatgtgtgtcagctttgagatggtgtgtcctggattaatactttgtctcccaatatcacagaaaaatacatgccagtgactcttgaggttaaggtagttgggatgaaatggcctcaggcaatttcacattccctaattacctggaaagttctacagtaattaatatgcagctaactcctgttgccctcacaagagcatcagccttctagaatcggagctccggagtgtgaagattcagtattgatatgatatgtataccaaactccagccaacttactgccatttttcataatctgagtggctgccttgcttatcctaagctgtggttgcagaaaccgtggccatttatataagctataacatcaaatcagggaaaaatgaggaaaaaaaatagattctgaaccatttattgttgaataagtagagaaaatcatcaataaatatttattacattctgacagggtgtgtggcattgtgttctatgccagagtgacaaagttgattcacccctttttggggaccttaatatattttttaagggatgtgcctatgcattgatgcctgaaaaatatgtataaagaaatgaggttgactcttctgagcagttcatcttttccagaggtaagggtaggaggccaacttcaggatctgggtctgagcccgtgggcaagccctggccgagtgagctccaatgctaactcatgtgccgatctctagagcagtgggaaactaccccgctgcaccaaatcaagtagcttcaccttgtgtatgcaggccccaagttattttttagcaatcttacgagtgaaatgttctggtgggttgaaaaacgttcttattttaaagaaaggttgtgctcgctacactgctggtgtgtgcattctgagacctcttgtattcaatctgtgaaggatatgtgtattaatccgtacacccgtatagcctcaatatttgtctgaagacacttaaattctgacccataaaggaaagttctagaagcaatattttcacttatttaacattctccaaacaacatcaagcattgatacacactgaagagtgcgtttattttttgtatcactctaagtatgttggaatatgcaaggactgtggttcaaattagaatgtataaggcatattataatttagttcatactgaataagaaattaacagaacattgttcggttcacacgttccaaactttgagtgatttctggagttagacatagattttctattttgttttaatttgtcaaggtatttttcttcccttcatgaactttaggtacacataacttatgtcatttatttatggtcttttatacctagtttgtaaaattgtaaaatagcaaactaaatgcaaagagtttgcatttgaaaataataaagtagttgccgtatacaaccctgcaaac

SEQ ID NO: 452295 - DNA, 3124 bp, Homo sapiens
gtggggcttacagaaatgactgccggtcatttgaatgagacctggaacaaatcgtttctcagaagtacttttctgttcatcaccagtctgtaaaatacatgtacctatagaaatagaacactgcctctgagttttgatgctgtatttgctgccagacactgagcttctgagacatccctgattctctctccatttggaattacaaccattgtattttgtttgtggcataaattacagtcatctgtctttcactggaatgaagaccatgcctaggaacattttttaaggactcagctgtggcttttagggcttggttcataccatgggggaaaaaaaagtcctaggagaaagcgacgtggctcattagtgttgcctcttcagtgctcaagccgcctggtggattcctatgacacagggggcctggaaagaaagggaaagtggatttaaaatatatatatacgtaacccaagccccataacccctaactggacaaatgaggtctgtttctttgggcctgaggctgtgccatataaagtcttattttgggactttacaaacttgtcctaactatcttgtggatagtgggctgtgacaatctggaatagagaacgttcacacttcgctcctttaaagaagcgaccccagatctgcaagggagtagattctgctatcttggcctcacagcccttcctgttgattacaaagcccgtggaagaaaacagaacacaccctcctcagttccgtctaaatgtgtttcttctgcttcaattacaccagttctggggcaaagacactgatgaaacaacacccatacctgaaaagaataaatgtgtgactttcaaatcccctttcgcagtgaaagaaacagcaaacacttaagattcagcatctgttctccagttgcactgaggaatgcactgtctcgcagcaccagctctgcagagcccttgccccagactctttgcggttttatttatatgtatttccatatttcattcctgtgtgtcactgctgcattggtgtggcagcaagtgaccaaatgctacaggtcttactatggacaccaggtcaggtgcaaccacacaaaacaaagccagttccatgagctgcctatgatatgcattgcggaagtaacattttacccagggtgtgccattgcagtgatataaatatatttttttcttagactaaatatgagctgactatctcttttgatgtgtgtacataggtgtgagtgtgtgtgtatgcgtgcctgtctgtgtgcgggtgtgtgtatgtgcatagcctcatgcttaggactacccatgaatgttgtggaatgctacacctggagagttctggttttccaccagtttcaagatgaagaactacatgatacagtggacctggagaccatccccttggaaagacaacccagagatgttcagcatcctgtatctacacgcatcctgtatctacacgtgtattttgtagctgtcacactaaccttaataagaattctacagctttggacagaggcattttcaccttaatggtgaagtaatttaaaatataaatccattcaggtgacaacccatcatcaaaattacaaattttctgattgaactcatctgaatcatcagttccttgatggagagagagaaggagatggaatgtgtctggtaaccccaaatggagtacaagtagcctttgttttcctgcataaatggacttgttgaatgcgaacgaatatatgcaattcatatacttttggagatgaacgtagatatgtgtgtcagctttgagatggtgtgtcctggattaatactttgtctcccaatatcacagaaaaatacatgccagtgactcttgaggttaaggtagttgggatgaaatggcctcaggcaatttcacattccctaattacctggaaagttctacagtaattaatatgcagctaactcctgttgccctcacaagagcatcagccttctagaatcggagctccggagtgtgaagattcagtattgatatgatatgtataccaaactccagccaacttactgccatttttcataatctgagtggctgccttgcttatcctaagctgtggttgcagaaaccgtggccatttatataagctataacatcaaatcagggaaaaatgaggtatttattacattctgacagggtgtgtggcattgtgttctatgccagagtgacaaagttgattcacccctttttggggaccttaatatattttttaagggatgtgcctatgcattgatgcctgaaaaatatgtataaagaaatgaggttgactcttctgagcagttcatcttttccagaggtaagggtaggaggccaacttcaggatctgggtctgagcccgtgggcaagccctggccgagtgagctccaatgctaactcatgtgccgatctctagagcagtgggaaactaccccgctgcaccaaatcaagtagcttcaccttgtgtatgcaggccccaagttattttttagcaatcttacgagtgaaatgttctggtgggttgaaaaacgttcttattttaaagaaaggttgtgctcgctacactgctggtgtgtgcattctgagacctcttgtattcaatctgtgaaggatatgtgtattaatccgtacacccgtatagcctcaatatttgtctgaagacacttaaattctgacccataaaggaaagttctagaagcaatattttcacttatttaacattctccaaacaacatcaagcattgatacacactgaagagtgcgtttattttttgtatcactctaagtatgttggaatatgcaaggactgtggttcaaattagaatgtataaggcatattataatttagttcatactgaataagaaattaacagaacattgttcggttcacacgttccaaactttgagtgatttctggagttagacatagattttctattttgttttaatttgtcaaggtatttttcttcccttcatgaactttaggtacacataacttatgtcatttatttatggtcttttatacctagtttgtaaaattgtaaaatagcaaactaaatgcaaagagtttgcatttgaaaataataaagtagttgccgtatacaaccctgcaaac

SEQ ID NO: 452296 - DNA, 3097 bp, Homo sapiens
gtggggcttacagaaatgactgccggtcatttgaatgagacctggaacaaatcgtttctcagaagtacttttctgttcatcaccagtctgtaaaatacatgtacctatagaaatagaacactgcctctgagttttgatgctgtatttgctgccagacactgagcttctgagacatccctgattctctctccatttggaattacaaccattgtattttgtttgtggcataaattacagtcatctgtctttcactggaatgaagaccatgcctaggaacattttttaaggactcagctgtggcttttagggcttggttcataccatgggggaaaaaaaagtcctaggagaaagcgacgtggctcattagtgttgcctcttcagtgctcaagccgcctggtggattcctatgacacagggggcctggaaagaaagggaaagtggatttaaaatatatatatacgtaacccaagccccataacccctaactggacaaatgaggtctgtttctttgggcctgaggctgtgccatataaagtcttattttgggactttacaaacttgtcctaactatcttgtggatagtgggctgtgacaatctggaatagagaacgttcacacttcgctcctttaaagaagcgaccccagatctgcaagggagtagattctgctatcttggcctcacagcccttcctgttgattacaaagcccgtggaagaaaacagaacacaccctcctcagttccgtctaaatgtgtttcttctgcttcaattacaccagttctggggcaaagacactgatgaaacaacacccatacctgaaaagaataaatgtgtgactttcaaatcccctttcgcagtgaaagaaacagcaaacacttaagattcagcatctgttctccagttgcactgaggaatgcactgtctcgcagcaccagctctgcagagcccttgccccagactctttgcggttttatttatatgtatttccatatttcattcctgtgtgtcactgctgcattggtgtggcagcaagtgaccaaatgctacaggtcttactatggacaccaggtcaggtgcaaccacacaaaacaaagccagttccatgagctgcctatgatatgcattgcggaagtaacattttacccagggtgtgccattgcagtgatataaatatatttttttcttagactaaatatgagctgactatctcttttgatgtgtgtacataggtgtgagtgtgtgtgtatgcgtgcctgtctgtgtgcgggtgtgtgtatgtgcatagcctcatgcttaggactacccatgaatgttgtggaatgctacacctggagagttctggttttccaccagtttcaagatgaagaactacatgatacagtggacctggagaccatccccttggaaagacaacccagagatgttcagcatcctgtatctacacgcatcctgtatctacacgtgtattttgtagctgtcacactaaccttaataagaattctacagctttggacagaggcattttcaccttaatggtgaagtaatttaaaatataaatccattcaggtgacaacccatcatcaaaattacaaattttctgattgaactcatctgaatcatcagttccttgatggagagagagaaggagatggaatgtgtctggtaaccccaaatggagtacaagtagcctttgttttcctgcataaatggacttgttgaatgcgaacgaatatatgcaattcatatacttttggagatgaacgtagatatgtgtgtcagctttgagatggtgtgtcctggattaatactttgtctcccaatatcacagaaaaatacatgccagtgactcttgaggttaaggtagttgggatgaaatggcctcaggcaatttcacattccctaattacctggaaagttctacagtaattaatatgcagctaactcctgttgccctcacaagagcatcagccttctagaatcggagctccggagtgtgaagattcagtattgatatgatatgtataccaaactccagccaacttactgccatttttcataatctgagtggctgccttgcttatcctaagctgtggttgcagaaaccgtggccatttatataagctataacatcaaatcagggaaaaatgaggaaaaaaaatagattctgaaccatttattgttgaataagtagagaaaatcatcaataaatatttattacattctgacagggtgtgtggcattgtgttctatgccagagtgacaaagttgattcacccctttttggggaccttaatatattttttaagggatgtgcctatgcattgatgcctgaaaaatatgtataaagaaatgaggttgactcttctgagcagttcatcttttccagaggtaagggtaggaggccaacttcaggatctgggtctgagcccgtgggcaagccctggccgagtgagctccaatgctaactcatgtgccgatctctagagcagtgggaaactaccccgctgcaccaaatcaagtagcttcaccttgtgtatgcaggccccaagttattttttagcaatcttacgagtgaaatgttctggtgggttgaaaaacgttcttattttaaagaaaggttgtgctcgctacactgctggtgtgtgcattctgagacctcttgtattcaatctgtgaaggatatgtgtattaatccgtacacccgtatagcctcaatatttgtctgaagacacttaaattctgacccataaaggaaagttctagaagcaatattttcacttatttaacattctccaaacaacatcaagcattgatacacactgaagagtgcgtttattttttgtatcactctaagtatgttggaatatgcaaggactgtggttcaaattagaatgtataaggcatattataatttagttcatactgaataagaaattaacagaacattgttcggttcacacgttccaaactttgagtgatttctggagtgtcaacgtacgttgacacttcaggtgggtatgatgtgtcccactgtgagtgtaatttatgcaacaagctctcgtgctaacaaacacttgggttattttatgcatctactc

SEQ ID NO: 452297 - DNA, 807 bp, Homo sapiens
  misc_feature (3)..(3): n is a, c, g, or t
ggnccgctctagaggatccccacgttgacacttcaggatctgggtctgagcccgtgggcaagccctggccgagtgagctccaatgctaactcatgtgccgatctctagagcagtgggaaactaccccgctgcaccaaatcaagtagcttcaccttgtgtatgcaggccccaagttattttttagcaatcttacgagtgaaatgttctggtgggttgaaaaacgttcttattttaaagaaaggttgtgctcgctacactgctggtgtgtgcattctgagacctcttgtattcaatctgtgaaggatatgtgtattaatccgtacacccgtatagcctcaatatttgtctgaagacacttaaattctgacccataaaggaaagttctagaagcaatattttcacttatttaacattctccaaacaacatcaagcattgatacacactgaagagtgcgtttattttttgtatcactctaagtatgttggaatatgcaaggactgtggttcaaattagaatgtataaggcatattataatttagttcatactgaataagaaattaacagaacattgttcggttcacacgttccaaactttgagtgatttctggagttagacatagattttctattttgttttaatttgtcaaggtatttttcttcccttcatgaactttaggtacacataacttatgtcatttatttatggtcttttatacctagtttgtaaaattgtaaaatagcaaactaaatgcaaagagtttgcatttgaaaataataaagtagttgccgtatacaaccctgcaaac

SEQ ID NO: 452298 - DNA, 365 bp, Homo sapiens
gggaggggcatttggtcctcaggctgagcccacctggattccccaggcccttggtgagcgccactctggctgcaactccccttgcctggcccgtcctgaggcccctctctcgtcctcagtggtggttctggcggggctgttcgtgatggtgttgatcctcttcctgggagcctccatggtctacctgatccgggtggcacggaggaaccaggagcgtgccctgcgcaccgtctggagctccggagatgacaaggagcagctggtgaagaacacatatgtcctgtgaccgccctgtcgccaagaggactggggaagggaggggagactatgtgtgagctttttttaaatagagggattgactcgga

SEQ ID NO: 452299 - DNA, 742 bp, Homo sapiens
aatgggtgcttccttagggtgtcatttagttttttggggacttttaacccaagacttttttaggggtagggttaagtatttgggccttcctccttaaaaaggtatttctcccttttatggttgaggcacaggtccttttacaagggaattcggttttaaaaccgttcaacgtttgagcccattttcggtaaaattgttttatttttaaaggatgttcacatatttggcccttttgttataaaattgggttgatttataaagaattttaccggtatttttccaataggttaaggctttaaatttttcaattcgcatttaaggggggtttctttttgatatgaccgtttgaatgggcctttttgctttttagcctgcgcaccaaatgggaatttcgttcaaagcggttttatttggtaataccccagtttttcaaattgggatgtttttaaaagccgttcagttggtttttaacagggtttttttaaggccaatttgtgtaaagggcccccccggagtttttttattttattttttatatgttttttttttgttttttgtttcttcctttattttttttttttttttttttttttttttttttttttttttttttttttttttttttttttttttaagtataaacaaaagttttttattagcattctgaaagaaggaaagtaaaatgtacaagtttaataaaaaggggccttcccctttagaataaatttcagcatgtgctttc

SEQ ID NO: 452300 - DNA, 1949 bp, Homo sapiens
ccatcctcccaacaggagccacctgagcttgggccagacatgaccatcttgtgtgacccagaaacggtattttatgaatctccacacttgaccctggacgttctaccctgtgtccgatttcagatcgaaccccgcccttcagaggacaccttaatcataaaccaggcattgaggcgatgggaagcgtagaccccaaacatcactccagcaggttctgttgggggcgaggcccgcgcaagccccgcctcttccccggcaccaggggcgggcccaggtgcgcccagggccggggagcggccgcgcaggtgcctgccctttgcgcctgcgcccagctcgccctgcctagccaggtgcgccccgccccctgcctgcccggccaccttcgggagccgcttccaataggcgttcgccattggctctggcgacctccgcgcgttgggaggtgtagcgcggctctgaacgcgctgagggccgttgagtgtcgcaggcggcgagggcgcgagtgaggagcagacccaggcatcgcgcgccgagaaggccgggcgtccccacactgaaggtccggaaaggcgacttccgggggctttggcacctggcggaccctcccggagcgtcggcacctgaacgcgaggcgctccattgcgcgtgcgcgttgaggggcttcccgcacctgatcgcgagaccccaacggctggtggcgtcgcctgcgcgtctcggctgagctggccatggcgcagctgtgcgggctgaggcggagccgggcgtttctcgccctgctgggatcgctgctcctctctggggtcctggcggccgaccgagaacgcagcatccacgacttctgcctggtgtcgaaggtggtgggcagatgccgggcctccatgcctaggtggtggtacaatgtcactgacggatcctgccagctgtttgtgtatgggggctgtgacggaaacagcaataattacctgaccaaggaggagtgcctcaagaaatgtgccactgtcacagagaatgccacgggtgacctggccaccagcaggaatgcagcggattcctctgtcccaagtgctcccagaaggcaggattctgaagaccactccagcgatatgttcaactatgaagaatactgcaccgccaacgcagtcactgggccttgccgtgcatccttcccacgctggtactttgacgtggagaggaactcctgcaataacttcatctatggaggctgccggggcaataagaacagctaccgctctgaggaggcctgcatgctccgctgcttccgccagcaggagaatcctcccctgccccttggctcaaaggtggtggttctggcggggctgttcgtgatggtgttgatcctcttcctgggagcctccatggtctacctgatccgggtggcacggaggaaccaggagcgtgccctgcgcaccgtctggagctccggagatgacaaggagcagctggtgaagaacacatatgtcctgtgaccgccctgtcgccaagaggactggggaagggaggggagactatgtgtgagctttttttaaatagagggattgactcggatttgagtgatcattagggctgaggtctgtttctctgggaggtaggacggctgcttcctggtctggcagggatgggtttgctttggaaatcctctaggaggctcctcctcgcatggcctgcagtctggcagcagccccgagttgtttcctcgctgatcgatttctttcctccaggtagagttttctttgcttatgttgaattccattgcctcttttctcatcacagaagtgatgttggaatcgtttcttttgtttgtctgatttatggtttttttaagtataaacaaaagttttttattagcattctgaaagaaggaaagtaaaatgtacaagtttaataaaaaggggccttcccctttagaataaatttcagcatgtgctttc

SEQ ID NO: 452301 - DNA, 2133 bp, Homo sapiens
ccatcctcccaacaggagccacctgagcttgggccagacatgaccatcttgtgtgacccagaaacggtattttatgaatctccacacttgaccctggacgttctaccctgtgtccgatttcagatcgaaccccgcccttcagaggacaccttaatcataaaccaggcattgaggcgatgggaagcgtagaccccaaacatcactccagcaggttctgttgggggcgaggcccgcgcaagccccgcctcttccccggcaccaggggcgggcccaggtgcgcccagggccggggagcggccgcgcaggtgcctgccctttgcgcctgcgcccagctcgccctgcctagccaggtgcgccccgccccctgcctgcccggccaccttcgggagccgcttccaataggcgttcgccattggctctggcgacctccgcgcgttgggaggtgtagcgcggctctgaacgcgctgagggccgttgagtgtcgcaggcggcgagggcgcgagtgaggagcagacccaggcatcgcgcgccgagaaggccgggcgtccccacactgaaggtccggaaaggcgacttccgggggctttggcacctggcggaccctcccggagcgtcggcacctgaacgcgaggcgctccattgcgcgtgcgcgttgaggggcttcccgcacctgatcgcgagaccccaacggctggtggcgtcgcctgcgcgtctcggctgagctggccatggcgcagctgtgcgggctgaggcggagccgggcgtttctcgccctgctgggatcgctgctcctctctggggtcctggcggccgaccgagaacgcagcatccacgacttctgcctggtgtcgaaggtggtgggcagatgccgggcctccatgcctaggtggtggtacaatgtcactgacggatcctgccagctgtttgtgtatgggggctgtgacggaaacagcaataattacctgaccaaggaggagtgcctcaagaaatgtgccactgtcacagagaatgccacgggtgacctggccaccagcaggaatgcagcggattcctctgtcccaagtgctcccagaaggcaggattctgaagaccactccagcgatatgttcaactatgaagaatactgcaccgccaacgcagtcactgggccttgccgtgcatccttcccacgctggtactttgacgtggagaggaactcctgcaataacttcatctatggaggctgccggggcaataagaacagctaccgctctgaggaggcctgcatgctccgctgcttccgccagcaggagaatcctcccctgccccttggctcaaaggtggtggttctggcggggctgttcgtgatggtgttgatcctcttcctgggagcctccatggtctacctgatccgggtggcacggaggaaccaggagcgtgccctgcgcaccgtctggagctccggagatgacaaggagcagctggtgaagaacacatatgtcctgtgaccgccctgtcgccaagaggactggggaagggaggggagactatgtgtgagctttttttaaatagagggattgactcggatttgagtgatcattagggctgaggtctgtttctctgggaggtaggacggctgcttcctggtctggcagggatgggtttgctttggaaatcctctaggaggctcctcctcgcatggcctgcagtctggcagcagccccgagttgtttcctcgctgatcgatttctttcctccaggtagagttttctttgcttatgttgaattccattgcctcttttctcatcacagaagtgatgttggaatcgtttcttttgtttgtctgatttatggtttttttaagtataaacaaaagttttttattagcattctgaaagaaggaaagtaaaatgtacaagtttaataaaaaggggccttcccctttagaataaatttcagcatgtgctttcagcatgtgctttctttatgggagtcctaatttcaaccctaccaaaatgatcacaagacactatctgaggtgtcccattctagaaatagacccctcaaaatagcgtctttcagatctttttgaatgaatccacaagatgaaataaatgtcctattactgagtgcccgtgaactttcgccaaacca

SEQ ID NO: 452302 - DNA, 2003 bp, Homo sapiens
  misc_feature (1906)..(1906): n is a, c, g, or t
  misc_feature (1913)..(1913): n is a, c, g, or t
  misc_feature (1939)..(1939): n is a, c, g, or t
  misc_feature (1946)..(1946): n is a, c, g, or t
  misc_feature (1954)..(1954): n is a, c, g, or t
  misc_feature (1956)..(1956): n is a, c, g, or t
  misc_feature (1960)..(1960): n is a, c, g, or t
ccatcctcccaacaggagccacctgagcttgggccagacatgaccatcttgtgtgacccagaaacggtattttatgaatctccacacttgaccctggacgttctaccctgtgtccgatttcagatcgaaccccgcccttcagaggacaccttaatcataaaccaggcattgaggcgatgggaagcgtagaccccaaacatcactccagcaggttctgttgggggcgaggcccgcgcaagccccgcctcttccccggcaccaggggcgggcccaggtgcgcccagggccggggagcggccgcgcaggtgcctgccctttgcgcctgcgcccagctcgccctgcctagccaggtgcgccccgccccctgcctgcccggccaccttcgggagccgcttccaataggcgttcgccattggctctggcgacctccgcgcgttgggaggtgtagcgcggctctgaacgcgctgagggccgttgagtgtcgcaggcggcgagggcgcgagtgaggagcagacccaggcatcgcgcgccgagaaggccgggcgtccccacactgaaggtccggaaaggcgacttccgggggctttggcacctggcggaccctcccggagcgtcggcacctgaacgcgaggcgctccattgcgcgtgcgcgttgaggggcttcccgcacctgatcgcgagaccccaacggctggtggcgtcgcctgcgcgtctcggctgagctggccatggcgcagctgtgcgggctgaggcggagccgggcgtttctcgccctgctgggatcgctgctcctctctggggtcctggcggccgaccgagaacgcagcatccacgacttctgcctggtgtcgaaggtggtgggcagatgccgggcctccatgcctaggtggtggtacaatgtcactgacggatcctgccagctgtttgtgtatgggggctgtgacggaaacagcaataattacctgaccaaggaggagtgcctcaagaaatgtgccactgtcacagagaatgccacgggtgacctggccaccagcaggaatgcagcggattcctctgtcccaagtgctcccagaaggcaggattctgaagaccactccagcgatatgttcaactatgaagaatactgcaccgccaacgcagtcactgggccttgccgtgcatccttcccacgctggtactttgacgtggagaggaactcctgcaataacttcatctatggaggctgccggggcaataagaacagctaccgctctgaggaggcctgcatgctccgctgcttccgccagcaggagaatcctcccctgccccttggctcaaaggtggtggttctggcggggctgttcgtgatggtgttgatcctcttcctgggagcctccatggtctacctgatccgggtggcacggaggaaccaggagcgtgccctgcgcaccgtctggagctccggagatgacaaggagcagctggtgaagaacacatatgtcctgtgaccgccctgtcgccaagaggactggggaagggaggggagactatgtgtgagctttttttaaatagagggattgactcggatttgagtgatcattagggctgaggtctgtttctctgggaggtaggacggctgcttcctggtctggcagggatgggtttgctttggaaatcctctaggaggctcctcctcgcatggcctgcagtctggcagcagccccgagttgtttcctcgctgatcgatttctttcctccaggtagagttttctttgcttatgttgaattccattgcctcttttctcatcacagaagtgatgttggaatcgtttcttttgtttgtctgatttatggtttttttaagtataaacaaaagttttttattagcattctgaaagaaggaaagtaatgtcagttataaaagggnctccttnataaaaaaaaaaaactcgggcctttnggggggnaaaggttnanggcnggcatgtccgccgcttgaaaggggaaccgcccaagggggaata

SEQ ID NO: 452303 - DNA, 1566 bp, Homo sapiens
ccatcctcccaacaggagccacctgagcttgggccagacatgaccatcttgtgtgacccagaaacggtattttatgaatctccacacttgaccctggacgttctaccctgtgtccgatttcagatcgaaccccgcccttcagaggacaccttaatcataaaccaggcattgaggcgatgggaagcgtagaccccaaacatcactccagcaggttctgttgggggcgaggcccgcgcaagccccgcctcttccccggcaccaggggcgggcccaggtgcgcccagggccggggagcggccgcgcaggtgcctgccctttgcgcctgcgcccagctcgccctgcctagccaggtgcgccccgccccctgcctgcccggccaccttcgggagccgcttccaataggcgttcgccattggctctggcgacctccgcgcgttgggaggtgtagcgcggctctgaacgcgctgagggccgttgagtgtcgcaggcggcgagggcgcgagtgaggagcagacccaggcatcgcgcgccgagaaggccgggcgtccccacactgaaggtccggaaaggcgacttccgggggctttggcacctggcggaccctcccggagcgtcggcacctgaacgcgaggcgctccattgcgcgtgcgcgttgaggggcttcccgcacctgatcgcgagaccccaacggctggtggcgtcgcctgcgcgtctcggctgagctggccatggcgcagctgtgcgggctgaggcggagccgggcgtttctcgccctgctgggatcgctgctcctctctggggtcctggcggccgaccgagaacgcagcatccacgacttctgcctggtgtcgaaggtggtgggcagatgccgggcctccatgcctaggtggtggtacaatgtcactgacggatcctgccagctgtttgtgtatgggggctgtgacggaaacagcaataattacctgaccaaggaggagtgcctcaagaaatgtgccactgtcacagagaatgccacgggtgacctggccaccagcaggaatgcagcggattcctctgtcccaagtgctcccagaaggcaggattctgaagaccactccagcgatatgttcaactatgaagaatactgcaccgccaacgcagtcactgggccttgccgtgcatccttcccacgctggtactttgacgtggagaggaactcctgcaataacttcatctatggaggctgccggggcaataagaacagctaccgctctgaggaggcctgcatgctccgctgcttccgccagcaggagaatcctcccctgccccttggctcaaaggtggtggttctggcggggctgttcgtgatggtgttgatcctcttcctgggagcctccatggtctacctgatccgggtggcacggaggaaccaggagcgtgccctgcgcaccgtctggagctccggagatgacaaggagcagctggtgaagaacacatatgtcctgtgaccgccctgtcgccaagaggactggggaagggaggggagactatgtgtgagctttttttaaatagagggattgactcgga

SEQ ID NO: 452304 - DNA, 1662 bp, Homo sapiens
tccctgccagctcatccgtcctcgactctttgtgcttgctccaagctctgtagccaatccccccttttaacttagaaaccaaacgactaaactctctgtaggggatcctgctgctgtgcttgcctgcctcgctacttcctaaaaagcaacaagtaagtttttgtgtatgctgcaagattgttgcattgtgtatactgagataatctgaggcattggagagcagattcagggtgtgtgtgtgtgtggcacacgccgagtatccatatctgaaggtccggaaaggcgacttccgggggctttggcacctggcggaccctcccggagcgtcggcacctgaacgcgaggcgctccattgcgcgtgcgcgttgaggggcttcccgcacctgatcgcgagaccccaacggctggtggcgtcgcctgcgcgtctcggctgagctggccatggcgcagctgtgcgggctgaggcggagccgggcgtttctcgccctgctgggatcgctgctcctctctggggtcctggcggccgaccgagaacgcagcatccacgacttctgcctggtgtcgaaggtggtgggcagatgccgggcctccatgcctaggtggtggtacaatgtcactgacggatcctgccagctgtttgtgtatgggggctgtgacggaaacagcaataattacctgaccaaggaggagtgcctcaagaaatgtgccactgtcacagagaatgccacgggtgacctggccaccagcaggaatgcagcggattcctctgtcccaagtgctcccagaaggcaggattctgaagaccactccagcgatatgttcaactatgaagaatactgcaccgccaacgcagtcactgggccttgccgtgcatccttcccacgctggtactttgacgtggagaggaactcctgcaataacttcatctatggaggctgccggggcaataagaacagctaccgctctgaggaggcctgcatgctccgctgcttccgccagcaggagaatcctcccctgccccttggctcaaaggtggtggttctggcggggctgttcgtgatggtgttgatcctcttcctgggagcctccatggtctacctgatccgggtggcacggaggaaccaggagcgtgccctgcgcaccgtctggagctccggagatgacaaggagcagctggtgaagaacacatatgtcctgtgaccgccctgtcgccaagaggactggggaagggaggggagactatgtgtgagctttttttaaatagagggattgactcggatttgagtgatcattagggctgaggtctgtttctctgggaggtaggacggctgcttcctggtctggcagggatgggtttgctttggaaatcctctaggaggctcctcctcgcatggcctgcagtctggcagcagccccgagttgtttcctcgctgatcgatttctttcctccaggtagagttttctttgcttatgttgaattccattgcctcttttctcatcacagaagtgatgttggaatcgtttcttttgtttgtctgatttatggtttttttaagtataaacaaaagttttttattagcattctgaaagaaggaaagtaaaatgtacaagtttaataaaaaggggccttcccctttagaataaatttcagcatgtgctttc

SEQ ID NO: 452305 - DNA, 1970 bp, Homo sapiens
ccatcctcccaacaggagccacctgagcttgggccagacatgaccatcttgtgtgacccagaaacggtattttatgaatctccacacttgaccctggacgttctaccctgtgtccgatttcagatcgaaccccgcccttcagaggacaccttaatcataaaccaggcattgaggcgatgggaagcgtagaccccaaacatcactccagcaggttctgttgggggcgaggcccgcgcaagccccgcctcttccccggcaccaggggcgggcccaggtgcgcccagggccggggagcggccgcgcaggtgcctgccctttgcgcctgcgcccagctcgccctgcctagccaggtgcgccccgccccctgcctgcccggccaccttcgggagccgcttccaataggcgttcgccattggctctggcgacctccgcgcgttgggaggtgtagcgcggctctgaacgcgctgagggccgttgagtgtcgcaggcggcgagggcgcgagtgaggagcagacccaggcatcgcgcgccgagaaggccgggcgtccccacactgaaggtccggaaaggcgacttccgggggctttggcacctggcggaccctcccggagcgtcggcacctgaacgcgaggcgctccattgcgcgtgcgcgttgaggggcttcccgcacctgatcgcgagaccccaacggctggtggcgtcgcctgcgcgtctcggctgagctggccatggcgcagctgtgcgggctgaggcggagccgggcgtttctcgccctgctgggatcgctgctcctctctggggtcctggcggccgaccgagaacgcagcatccacgacttctgcctggtgtcgaaggtggtgggcagatgccgggcctccatgcctaggtggtggtacaatgtcactgacggatcctgccagctgtttgtgtatgggggctgtgacggaaacagcaataattacctgaccaaggaggagtgcctcaagaaatgtgccactgtcacagagaatgccacgggtgacctggccaccagcaggaatgcagcggattcctctgtcccaagtgctcccagaaggcaggattctgaagaccactccagcgatatgttcaactatgaaggtaaaactccaaagaggccagaatactgcaccgccaacgcagtcactgggccttgccgtgcatccttcccacgctggtactttgacgtggagaggaactcctgcaataacttcatctatggaggctgccggggcaataagaacagctaccgctctgaggaggcctgcatgctccgctgcttccgccagcaggagaatcctcccctgccccttggctcaaaggtggtggttctggcggggctgttcgtgatggtgttgatcctcttcctgggagcctccatggtctacctgatccgggtggcacggaggaaccaggagcgtgccctgcgcaccgtctggagctccggagatgacaaggagcagctggtgaagaacacatatgtcctgtgaccgccctgtcgccaagaggactggggaagggaggggagactatgtgtgagctttttttaaatagagggattgactcggatttgagtgatcattagggctgaggtctgtttctctgggaggtaggacggctgcttcctggtctggcagggatgggtttgctttggaaatcctctaggaggctcctcctcgcatggcctgcagtctggcagcagccccgagttgtttcctcgctgatcgatttctttcctccaggtagagttttctttgcttatgttgaattccattgcctcttttctcatcacagaagtgatgttggaatcgtttcttttgtttgtctgatttatggtttttttaagtataaacaaaagttttttattagcattctgaaagaaggaaagtaaaatgtacaagtttaataaaaaggggccttcccctttagaataaatttcagcatgtgctttc

SEQ ID NO: 452306 - DNA, 2001 bp, Homo sapiens
ccatcctcccaacaggagccacctgagcttgggccagacatgaccatcttgtgtgacccagaaacggtattttatgaatctccacacttgaccctggacgttctaccctgtgtccgatttcagatcgaaccccgcccttcagaggacaccttaatcataaaccaggcattgaggcgatgggaagcgtagaccccaaacatcactccagcaggttctgttgggggcgaggcccgcgcaagccccgcctcttccccggcaccaggggcgggcccaggtgcgcccagggccggggagcggccgcgcaggtgcctgccctttgcgcctgcgcccagctcgccctgcctagccaggtgcgccccgccccctgcctgcccggccaccttcgggagccgcttccaataggcgttcgccattggctctggcgacctccgcgcgttgggaggtgtagcgcggctctgaacgcgctgagggccgttgagtgtcgcaggcggcgagggcgcgagtgaggagcagacccaggcatcgcgcgccgagaaggccgggcgtccccacactgaaggtccggaaaggcgacttccgggggctttggcacctggcggaccctcccggagcgtcggcacctgaacgcgaggcgctccattgcgcgtgcgcgttgaggggcttcccgcacctgatcgcgagaccccaacggctggtggcgtcgcctgcgcgtctcggctgagctggccatggcgcagctgtgcgggctgaggcggagccgggcgtttctcgccctgctgggatcgctgctcctctctggggtcctggcggccgaccgagaacgcagcatccacgacttctgcctggtgtcgaaggtggtgggcagatgccgggcctccatgcctaggtggtggtacaatgtcactgacggatcctgccagctgtaaggtgtactaggggggggcctgtgaacgcgaaagacacgccaacgtaacttctaccccttgaacaccaaaggggacgggacaggtgggcccgtcaaacgcgaacattggtttgccaacttggtcacaggaggagaatgccacgggtgacctggccaccagcaggaatgcagcggattcctctgtcccaagtgctcccagaaggcaggattctgaagaccactccagcgatatgttcaactatgaagaatactgcaccgccaacgcagtcactgggccttgccgtgcatccttcccacgctggtactttgacgtggagaggaactcctgcaataacttcatctatggaggctgccggggcaataagaacagctaccgctctgaggaggcctgcatgctccgctgcttccgccagcaggagaatcctcccctgccccttggctcaaaggtggtggttctggcggggctgttcgtgatggtgttgatcctcttcctgggagcctccatggtctacctgatccgggtggcacggaggaaccaggagcgtgccctgcgcaccgtctggagctccggagatgacaaggagcagctggtgaagaacacatatgtcctgtgaccgccctgtcgccaagaggactggggaagggaggggagactatgtgtgagctttttttaaatagagggattgactcggatttgagtgatcattagggctgaggtctgtttctctgggaggtaggacggctgcttcctggtctggcagggatgggtttgctttggaaatcctctaggaggctcctcctcgcatggcctgcagtctggcagcagccccgagttgtttcctcgctgatcgatttctttcctccaggtagagttttctttgcttatgttgaattccattgcctcttttctcatcacagaagtgatgttggaatcgtttcttttgtttgtctgatttatggtttttttaagtataaacaaaagttttttattagcattctgaaagaaggaaagtaaaatgtacaagtttaataaaaaggggccttcccctttagaataaatttcagcatgtgctttc

SEQ ID NO: 452307 - DNA, 1889 bp, Homo sapiens
ccatcctcccaacaggagccacctgagcttgggccagacatgaccatcttgtgtgacccagaaacggtattttatgaatctccacacttgaccctggacgttctaccctgtgtccgatttcagatcgaaccccgcccttcagaggacaccttaatcataaaccaggcattgaggcgatgggaagcgtagaccccaaacatcactccagcaggttctgttgggggcgaggcccgcgcaagccccgcctcttccccggcaccaggggcgggcccaggtgcgcccagggccggggagcggccgcgcaggtgcctgccctttgcgcctgcgcccagctcgccctgcctagccaggtgcgccccgccccctgcctgcccggccaccttcgggagccgcttccaataggcgttcgccattggctctggcgacctccgcgcgttgggaggtgtagcgcggctctgaacgcgctgagggccgttgagtgtcgcaggcggcgagggcgcgagtgaggagcagacccaggcatcgcgcgccgagaaggccgggcgtccccacactgaaggtccggaaaggcgacttccgggggctttggcacctggcggaccctcccggagcgtcggcacctgaacgcgaggcgctccattgcgcgtgcgcgttgaggggcttcccgcacctgatcgcgagaccccaacggctggtggcgtcgcctgcgcgtctcggctgagctggccatggcgcagctgtgcgggctgaggcggagccgggcgtttctcgccctgctgggatcgctgctcctctctggggtcctggcggccgaccgagaacgcagcatccacgacttctgcctggtgtcgaaggtggtgggcagatgccgggcctccatgcctaggtggtggtacaatgtcactgacggatcctgccagctgtttgtgtatgggggctgtgacggaaacagcaataattacctgaccaaggaggagtgcctcaagaaatgtgccactgtcacagctcccagaaggcaggattctgaagaccactccagcgatatgttcaactatgaagaatactgcaccgccaacgcagtcactgggccttgccgtgcatccttcccacgctggtactttgacgtggagaggaactcctgcaataacttcatctatggaggctgccggggcaataagaacagctaccgctctgaggaggcctgcatgctccgctgcttccgccagcaggagaatcctcccctgccccttggctcaaaggtggtggttctggcggggctgttcgtgatggtgttgatcctcttcctgggagcctccatggtctacctgatccgggtggcacggaggaaccaggagcgtgccctgcgcaccgtctggagctccggagatgacaaggagcagctggtgaagaacacatatgtcctgtgaccgccctgtcgccaagaggactggggaagggaggggagactatgtgtgagctttttttaaatagagggattgactcggatttgagtgatcattagggctgaggtctgtttctctgggaggtaggacggctgcttcctggtctggcagggatgggtttgctttggaaatcctctaggaggctcctcctcgcatggcctgcagtctggcagcagccccgagttgtttcctcgctgatcgatttctttcctccaggtagagttttctttgcttatgttgaattccattgcctcttttctcatcacagaagtgatgttggaatcgtttcttttgtttgtctgatttatggtttttttaagtataaacaaaagttttttattagcattctgaaagaaggaaagtaaaatgtacaagtttaataaaaaggggccttcccctttagaataaatttcagcatgtgctttc

SEQ ID NO: 452308 - DNA, 1784 bp, Homo sapiens
ccatcctcccaacaggagccacctgagcttgggccagacatgaccatcttgtgtgacccagaaacggtattttatgaatctccacacttgaccctggacgttctaccctgtgtccgatttcagatcgaaccccgcccttcagaggacaccttaatcataaaccaggcattgaggcgatgggaagcgtagaccccaaacatcactccagcaggttctgttgggggcgaggcccgcgcaagccccgcctcttccccggcaccaggggcgggcccaggtgcgcccagggccggggagcggccgcgcaggtgcctgccctttgcgcctgcgcccagctcgccctgcctagccaggtgcgccccgccccctgcctgcccggccaccttcgggagccgcttccaataggcgttcgccattggctctggcgacctccgcgcgttgggaggtgtagcgcggctctgaacgcgctgagggccgttgagtgtcgcaggcggcgagggcgcgagtgaggagcagacccaggcatcgcgcgccgagaaggccgggcgtccccacactgaaggtccggaaaggcgacttccgggggctttggcacctggcggaccctcccggagcgtcggcacctgaacgcgaggcgctccattgcgcgtgcgcgttgaggggcttcccgcacctgatcgcgagaccccaacggctggtggcgtcgcctgcgcgtctcggctgagctggccatggcgcagctgtgcgggctgaggcggagccgggcgtttctcgccctgctgggatcgctgctcctctctggggtcctggcggccgaccgagaacgcagcatccacgacttctgcctggtgtcgaaggtggtgggcagatgccgggcctccatgcctaggtggtggtacaatgtcactgacggatcctgccagctgtttgtgtatgggggctgtgacggaaacagcaataattacctgaccaaggaggagtgcctcaagaaatgtgccactgtcacagagaatgccacgggtgacctggccaccagcaggaatgcagcggattcctctgtcccaagtgctcccagaaggcaggattctgaagaccactccagcgatatgttcaactatgaagaatactgcaccgccaacgcagtcactgggccttgccgtgcatccttcccacgctggtactttgacgtggagaggaactcctgcaataactccatggtctacctgatccgggtggcacggaggaaccaggagcgtgccctgcgcaccgtctggagctccggagatgacaaggagcagctggtgaagaacacatatgtcctgtgaccgccctgtcgccaagaggactggggaagggaggggagactatgtgtgagctttttttaaatagagggattgactcggatttgagtgatcattagggctgaggtctgtttctctgggaggtaggacggctgcttcctggtctggcagggatgggtttgctttggaaatcctctaggaggctcctcctcgcatggcctgcagtctggcagcagccccgagttgtttcctcgctgatcgatttctttcctccaggtagagttttctttgcttatgttgaattccattgcctcttttctcatcacagaagtgatgttggaatcgtttcttttgtttgtctgatttatggtttttttaagtataaacaaaagttttttattagcattctgaaagaaggaaagtaaaatgtacaagtttaataaaaaggggccttcccctttagaataaatttcagcatgtgctttc

SEQ ID NO: 452309 - DNA, 1370 bp, Homo sapiens
ccatcctcccaacaggagccacctgagcttgggccagacatgaccatcttgtgtgacccagaaacggtattttatgaatctccacacttgaccctggacgttctaccctgtgtccgatttcagatcgaaccccgcccttcagaggacaccttaatcataaaccaggcattgaggcgatgggaagcgtagaccccaaacatcactccagcaggttctgttgggggcgaggcccgcgcaagccccgcctcttccccggcaccaggggcgggcccaggtgcgcccagggccggggagcggccgcgcaggtgcctgccctttgcgcctgcgcccagctcgccctgcctagccaggtgcgccccgccccctgcctgcccggccaccttcgggagccgcttccaataggcgttcgccattggctctggcgacctccgcgcgttgggaggtgtagcgcggctctgaacgcgctgagggccgttgagtgtcgcaggcggcgagggcgcgagtgaggagcagacccaggcatcgcgcgccgagaaggccgggcgtccccacactgaaggtccggaaaggcgacttccgggggctttggcacctggcggaccctcccggagcgtcggcacctgaacgcgaggcgctccattgcgcgtgcgcgttgaggggcttcccgcacctgatcgcgagaccccaacggctggtggcgtcgcctgcgcgtctcggctgagctggccatggcgcagctgtgcgggctgaggcggagccgggcgtttctcgccctgctgggatcgctgctcctctctggggtcctggcggccgaccgagaacgcagcatccacgacttctgcctggtgtcgaaggtggtgggcagatgccgggcctccatgcctaggtggtggtacaatgtcactgacggatcctgccagctgtttgtgtatgggggctgtgacggaaacagcaataattacctgaccaaggaggagtgcctcaagaaatgtgccactgtcacagagaatgccacgggtgacctggccaccagcaggaatgcagcggattcctctgtcccaagtgctcccagaaggcaggattctgaagaccactccagcgatatgttcaactatgaagaatactgcaccgccaacgcagtcactgggccttgccgtgcatccttcccacgctggtactttgacgtggagaggaactcctgcaataacttcatctatggaggctgccggggcaataagaacagctaccgctctgaggaggcctgcatgctccgctgcttccgcagagggaatctccctggccttggccaaggggggccggggggcggcccgcggggggacccctcggggcgcccaggggacagaaccggg

SEQ ID NO: 452310 - DNA, 1495 bp, Homo sapiens
  misc_feature (1494)..(1495): n is a, c, g, or t
ccatcctcccaacaggagccacctgagcttgggccagacatgaccatcttgtgtgacccagaaacggtattttatgaatctccacacttgaccctggacgttctaccctgtgtccgatttcagatcgaaccccgcccttcagaggacaccttaatcataaaccaggcattgaggcgatgggaagcgtagaccccaaacatcactccagcaggttctgttgggggcgaggcccgcgcaagccccgcctcttccccggcaccaggggcgggcccaggtgcgcccagggccggggagcggccgcgcaggtgcctgccctttgcgcctgcgcccagctcgccctgcctagccaggtgcgccccgccccctgcctgcccggccaccttcgggagccgcttccaataggcgttcgccattggctctggcgacctccgcgcgttgggaggtgtagcgcggctctgaacgcgctgagggccgttgagtgtcgcaggcggcgagggcgcgagtgaggagcagacccaggcatcgcgcgccgagaaggccgggcgtccccacactgaaggtccggaaaggcgacttccgggggctttggcacctggcggaccctcccggagcgtcggcacctgaacgcgaggcgctccattgcgcgtgcgcgttgaggggcttcccgcacctgatcgcgagaccccaacggctggtggcgtcgcctgcgcgtctcggctgagctggccatggcgcagctgtgcgggctgaggcggagccgggcgtttctcgccctgctgggatcgctgctcctctctggggtcctggcggccgaccgagaacgcagcatccacgacttctgcctggtgtcgaaggtggtgggcagatgccgggcctccatgcctaggtggtggtacaatgtcactgacggatcctgccagctgtttgtgtatgggggctgtgacggaaacagcaataattacctgaccaaggaggagtgcctcaagaaatgtgccactgtcacagagaatgccacgggtgacctggccaccagcaggaatgcagcggattcctctgtcccaagtgctcccagaaggcaggattctgaagaccactccagcgatatgttcaactatgaagaatactgaccggcaacgcagtcactgggacatggccgggcagtcctttcccagcgggtacttgacgtgggcaaggagctccgggaaaactcacataaggaggggccggggcgaaaacagacgcgtataaggtggatgtccgggttcgcacgaagaaatgcccggcgcgtggccaaaggggggcatgtagggagacacgaaggtgtgaaccacacggggcccggacacctacagcggggcggaacacacagccgtgccagtcgcgcaaacgacggcagaaactagcgctcccacaccagagagcgagagacacacagccagccctctacgcgcggcagcgagcgctactccagtagcagagagtgtgtcgttcacnn

SEQ ID NO: 452311 - DNA, 1291 bp, Homo sapiens
  misc_feature (1119)..(1119): n is a, c, g, or t
  misc_feature (1181)..(1181): n is a, c, g, or t
  misc_feature (1190)..(1190): n is a, c, g, or t
  misc_feature (1204)..(1204): n is a, c, g, or t
  misc_feature (1248)..(1248): n is a, c, g, or t
  misc_feature (1271)..(1271): n is a, c, g, or t
ccatcctcccaacaggagccacctgagcttgggccagacatgaccatcttgtgtgacccagaaacggtattttatgaatctccacacttgaccctggacgttctaccctgtgtccgatttcagatcgaaccccgcccttcagaggacaccttaatcataaaccaggcattgaggcgatgggaagcgtagaccccaaacatcactccagcaggttctgttgggggcgaggcccgcgcaagccccgcctcttccccggcaccaggggcgggcccaggtgcgcccagggccggggagcggccgcgcaggtgcctgccctttgcgcctgcgcccagctcgccctgcctagccaggtgcgccccgccccctgcctgcccggccaccttcgggagccgcttccaataggcgttcgccattggctctggcgacctccgcgcgttgggaggtgtagcgcggctctgaacgcgctgagggccgttgagtgtcgcaggcggcgagggcgcgagtgaggagcagacccaggcatcgcgcgccgagaaggccgggcgtccccacactgaaggtccggaaaggcgacttccgggggctttggcacctggcggaccctcccggagcgtcggcacctgaacgcgaggcgctccattgcgcgtgcgcgttgaggggcttcccgcacctgatcgcgagaccccaacggctggtggcgtcgcctgcgcgtctcggctgagctggccatggcgcagctgtgcgggctgaggcggagccgggcgtttctcgccctgctgggatcgctgctcctctctggggtcctggcggccgaccgagaacgcagcatccacgacttctgcctggtgtcgaaggtggtgggcagatgccgggcctccatgcctaggtggtggtacaatgtcactgacggatcctgccagctgtttgtgtatgggggctgtgacggaaacagcaataattacctgaccaaggaggagtgcctcaagaaatgtgccactgtcacagatgccacagccatgcgctaccacagagcagagcacaaagaattgggctataccttctacaggtgcagtgcagaagtgcagaaatagagaagacaaaaggcaaagtgaggttccnagatatagacagccccgtgcaatccaaggcaccacaagtcgtgatccggtctgtgcctacanattgtcccnctctttgggtcccnctcttggacattaggaacagaggaagtatagagggctctcccanggctacaccggtgaatgtgggangaggaagaccctattacctt

SEQ ID NO: 452312 - DNA, 1101 bp, Homo sapiens
ccatcctcccaacaggagccacctgagcttgggccagacatgaccatcttgtgtgacccagaaacggtattttatgaatctccacacttgaccctggacgttctaccctgtgtccgatttcagatcgaaccccgcccttcagaggacaccttaatcataaaccaggcattgaggcgatgggaagcgtagaccccaaacatcactccagcaggttctgttgggggcgaggcccgcgcaagccccgcctcttccccggcaccaggggcgggcccaggtgcgcccagggccggggagcggccgcgcaggtgcctgccctttgcgcctgcgcccagctcgccctgcctagccaggtgcgccccgccccctgcctgcccggccaccttcgggagccgcttccaataggcgttcgccattggctctggcgacctccgcgcgttgggaggtgtagcgcggctctgaacgcgctgagggccgttgagtgtcgcaggcggcgagggcgcgagtgaggagcagacccaggcatcgcgcgccgagaaggccgggcgtccccacactgaaggtccggaaaggcgacttccgggggctttggcacctggcggaccctcccggagcgtcggcacctgaacgcgaggcgctccattgcgcgtgcgcgttgaggggcttcccgcacctgatcgcgagaccccaacggctggtggcgtcgcctgcgcgtctcggctgagctggccatggcgcagctgtgcgggctgaggcggagccgggcgtttctcgccctgctgggatcgctgctcctctctggggtccttggctggctcggatcctggaggaaccggcgaggcattccgacggacttttctttgcccttgggttgtcggaaagggttggatgggcagcatgcctgggcctccattgcctatggttggtgggtaacaataggttcatctttgacctgggaattccattggccccaaggaattaggttaaaggggatgggtaattaggagggagggagctttgggttggaagctggtgtggaaaaaaaaccaatggtgcgaaaacgttaaaaattttaaaaccctttgaaatcccaaaagggggacg

SEQ ID NO: 452313 - DNA, 341 bp, Homo sapiens
ccaccgctgggtccccagcattaagccctggagcatgagcccagtgaactttgaaattcaggaaggaattcacaggaaagctgcggcgaggcgggcagaaaaccacaggcttccaagaaacgcgtgtctgccgccccctcctcccaccctgaggccagtcctagagcgaaggccctcctccgacgtcgtcaccaagcccaagggaagggtggcaggtgctcagcgggcagacgccccgccccgccccgccaggttctgttgggggcgaggcccgcgcaagccccgcctcttccccggcaccaggggcgggcccaggtgcgcccagggccggggagcggccg

SEQ ID NO: 452314 - DNA, 159 bp, Homo sapiens
agccgctgcactggtcttgggtgtaatttacaggcttctttaccagagagatgtttctccgtctgctggagccgcaagcctcctcaggcactttctggcttgcttcccctccttgcgggccctactaatttgtattccctgggctgtcttactcctaga

SEQ ID NO: 452315 - DNA, 994 bp, Homo sapiens
aaaattaggctaggtacgaggcttgggtgtaatcggccgaggcgagcgacctccgcgcgttgggaggtgtagcgcggctctgaacgcgctgagggccgttgagtgtcgcaggcggcgagggcgcgagtgaggagcagacccaggcatcgcgcgccgagaaggccgggcgtccccacactgaaggtccggaaaggcgacttccgggggctttggcacctggcggaccctcccggagcgtcggcacctgaacgcgaggcgctccattgcgcgtgcgcgttgaggggcttcccgcacctgatcgcgagaccccaacggctggtggcgtcgcctgcgcgtctcggctgagctggccatggcgcagctgtgcgggctgaggcggagccgggcgtttctcgccctgctgggatcgctgctcctctctggggtcctggcggccgaccgagaacgcagcatccacgacttctgcctggtgtcgaaggtggtgggcagatgccgggcctccatgcctaggtggtggtacaatgtcactgacggatcctgccagctgtttgtgtatgggggctgtgacggaaacagcaataattacctgaccaaggaggagtgcctcaagaaatgtgccactgtcacagagaatgccacgggtgacctggccaccagcaggaatgcagcggattcctctgtcccaagtgctcccagaaggcaggattctgaagaccactccagcgatatgttcaactatgaagaatactgcaccgccaacgcagtcactgggccttgccgtgcatccttcccacgctggtactttgacgtggagaggaactcctgcaataacttcatctatggaggctgccggggcaataagaacagctaccgctctgaggaggcctgcatgctccgctgcttccgcagagggaatctccctggccttggccaaggggggccggggggcggcccgcggggggacccctcggggcgcccaggggacagaaccggg

SEQ ID NO: 452316 - DNA, 1573 bp, Homo sapiens
aaaattaggctaggtacgaggcttgggtgtaatcggccgaggcgagcgacctccgcgcgttgggaggtgtagcgcggctctgaacgcgctgagggccgttgagtgtcgcaggcggcgagggcgcgagtgaggagcagacccaggcatcgcgcgccgagaaggccgggcgtccccacactgaaggtccggaaaggcgacttccgggggctttggcacctggcggaccctcccggagcgtcggcacctgaacgcgaggcgctccattgcgcgtgcgcgttgaggggcttcccgcacctgatcgcgagaccccaacggctggtggcgtcgcctgcgcgtctcggctgagctggccatggcgcagctgtgcgggctgaggcggagccgggcgtttctcgccctgctgggatcgctgctcctctctggggtcctggcggccgaccgagaacgcagcatccacgacttctgcctggtgtcgaaggtggtgggcagatgccgggcctccatgcctaggtggtggtacaatgtcactgacggatcctgccagctgtttgtgtatgggggctgtgacggaaacagcaataattacctgaccaaggaggagtgcctcaagaaatgtgccactgtcacagagaatgccacgggtgacctggccaccagcaggaatgcagcggattcctctgtcccaagtgctcccagaaggcaggattctgaagaccactccagcgatatgttcaactatgaagaatactgcaccgccaacgcagtcactgggccttgccgtgcatccttcccacgctggtactttgacgtggagaggaactcctgcaataacttcatctatggaggctgccggggcaataagaacagctaccgctctgaggaggcctgcatgctccgctgcttccgccagcaggagaatcctcccctgccccttggctcaaaggtggtggttctggcggggctgttcgtgatggtgttgatcctcttcctgggagcctccatggtctacctgatccgggtggcacggaggaaccaggagcgtgccctgcgcaccgtctggagctccggagatgacaaggagcagctggtgaagaacacatatgtcctgtgaccgccctgtcgccaagaggactggggaagggaggggagactatgtgtgagctttttttaaatagagggattgactcggatttgagtgatcattagggctgaggtctgtttctctgggaggtaggacggctgcttcctggtctggcagggatgggtttgctttggaaatcctctaggaggctcctcctcgcatggcctgcagtctggcagcagccccgagttgtttcctcgctgatcgatttctttcctccaggtagagttttctttgcttatgttgaattccattgcctcttttctcatcacagaagtgatgttggaatcgtttcttttgtttgtctgatttatggtttttttaagtataaacaaaagttttttattagcattctgaaagaaggaaagtaaaatgtacaagtttaataaaaaggggccttcccctttagaataaatttcagcatgtgctttc

SEQ ID NO: 452317 - DNA, 2615 bp, Homo sapiens
ccatcctcccaacaggagccacctgagcttgggccagacatgaccatcttgtgtgacccagaaacggtattttatgaatctccacacttgaccctggacgttctaccctgtgtccgatttcagatcgaaccccgcccttcagaggacaccttaatcataaaccaggcattgaggcgatgggaagcgtagaccccaaacatcactccagcaggttctgttgggggcgaggcccgcgcaagccccgcctcttccccggcaccaggggcgggcccaggtgcgcccagggccggggagcggccgcgcaggtgcctgccctttgcgcctgcgcccagctcgccctgcctagccaggtgcgccccgccccctgcctgcccggccaccttcgggagccgcttccaataggcgttcgccattggctctggcgacctccgcgcgttgggaggtgtagcgcggctctgaacgcgctgagggccgttgagtgtcgcaggcggcgagggcgcgagtgaggagcagacccaggcatcgcgcgccgagaaggccgggcgtccccacactgaaggtccggaaaggcgacttccgggggctttggcacctggcggaccctcccggagcgtcggcacctgaacgcgaggcgctccattgcgcgtgcgcgttgaggggcttcccgcacctgatcgcgagaccccaacggctggtggcgtcgcctgcgcgtctcggctgagctggccatggcgcagctgtgcgggctgaggcggagccgggcgtttctcgccctgctgggatcgctgctcctctctggggtcctggcggccgaccgagaacgcagcatccacgacttctgcctggtgtcgaaggtggtgggcagatgccgggcctccatgcctaggtggtggtacaatgtcactgacggatcctgccagctgtttgtgtatgggggctgtgacggaaacagcaataattacctgaccaaggaggagtgcctcaagaaatgtgccactgtcacagagaatgccacgggtgacctggccaccagcaggaatgcagcggattcctctgtcccaagtgctcccagaaggcaggattctgaagaccactccagcgatatgttcaactatgaagaatactgcaccgccaacgcagtcactgggccttgccgtgcatccttcccacgctggtactttgacgtggagaggaactcctgcaataacttcatctatggaggctgccggggcaataagaacagctaccgctctgaggaggcctgcatgctccgctgcttccgccagcaggagaatcctcccctgccccttggctcaaaggtggtggttctggcggggctgttcgtgatggtgttgatcctcttcctgggagcctccatggtctacctgatccgggtggcacggaggaaccaggagcgtgccctgcgcaccgtctggagctccggagatgacaaggagcagctggtgaagaacacatatgtcctgtgaccgccctgtcgccaagaggactggggaagggaggggagactatgtgtgagctttttttaaatagagggattgactcggatttgagtgatcattagggctgaggtctgtttctctgggaggtaggacggctgcttcctggtctggcagggatgggtttgctttggaaatcctctaggaggctcctcctcgcatggcctgcagtctggcagcagccccgagttgtttcctcgctgatcgatttctttcctccaggtagagttttctttgcttatgttgaattccattgcctcttttctcatcacagaagtgatgttggaatcgtttcttttgtttgtctgatttatggtttttttaagtataaacaaaagttttttattagcattctgaaagaaggaaagtaaaatgtacaagtttaataaaaaggggccttcccctttagaataaatttcagcatgtgctttcaaaaaaaaaaaaaaaaaagaaaaaaagcggggtttttgtttttggaccccttttatagggggaaaaaaatttgggggttggggaaacttttgggcgggggtttttaaggcacacattatttataggccgcgaaaaaaattcagccaggacatctcgtgggttctcgatccccgaatacaagcattgcgggggggaccctcctgggacatattttttgactcttagaacaataaccctcaagcccttcttgtgggggcatcgcctaaaacctattgggggctgcaccctccccattttcatgaaaaaagcctttcataggattaagaatcccgggggatttatgtagaccccttcgaaaggatgtcctcgcaagacaaacctgtgttctcaacaatgatcctttaaatcatcagtcacaaggggttttgtggcaccgttacgactttatgtatctcaaactttgtccctatctttcaacagttggtgcccagggagattcaacgagggggggattaaacaccttccaaaaaagggattcgcgccagcaattttcattgtggtgaggcttcggacgggagacaatataagtgtccccaatcgcagagccgatgtttacgcgcgtctctcggatatgaggatggtccctggcccaagtgttagcgtcaa

SEQ ID NO: 452318 - DNA, 1735 bp, Homo sapiens
ccatcctcccaacaggagccacctgagcttgggccagacatgaccatcttgtgtgacccagaaacggtattttatgaatctccacacttgaccctggacgttctaccctgtgtccgatttcagatcgaaccccgcccttcagaggacaccttaatcataaaccaggcattgaggcgatgggaagcgtagaccccaaacatcactccagcaggttctgttgggggcgaggcccgcgcaagccccgcctcttccccggcaccaggggcgggcccaggtgcgcccagggccggggagcggccgcgcaggtgcctgccctttgcgcctgcgcccagctcgccctgcctagccaggtgcgccccgccccctgcctgcccggccaccttcgggagccgcttccaataggcgttcgccattggctctggcgacctccgcgcgttgggaggtgtagcgcggctctgaacgcgctgagggccgttgagtgtcgcaggcggcgagggcgcgagtgaggagcagacccaggcatcgcgcgccgagaaggccgggcgtccccacactgaaggtccggaaaggcgacttccgggggctttggcacctggcggaccctcccggagcgtcggcacctgaacgcgaggcgctccattgcgcgtgcgcgttgaggggcttcccgcacctgatcgcgagaccccaacggctggtggcgtcgcctgcgcgtctcggctgagctggccatggcgcagctgtgcgggctgaggcggagccgggcgtttctcgccctgctgggatcgctgctcctctctggggtcctggcggccgaccgagaacgcagcatccacgacttctgcctggtgtcgaaggtggtgggcagatgccgggcctccatgcctaggtggtggtacaatgtcactgacggatcctgccagctgtttgtgtatgggggctgtgacggaaacagcaataattacctgaccaaggaggagtgcctcaagaaatgtgccactgtcacagagaatgccacgggtgacctggccaccagcaggaatgcagcggattcctctgtcccaagtgctcccagaaggcaggattctgaagaccactccagcgatatgttcaactatgaagaatactgcaccgccaacgcagtcactgggccttgccgtgcatccttcccacgctggtactttgacgtggagaggaactcctgcaataacttcatctatggaggctgccggggcaataagaacagctaccgctctgaggaggcctgcatgctccgctgcttccgccagcaggagaatcctcccctgccccttggctcaaaggtggtggttctggcggggctgttcgtgatggtgttgatcctcttcctgggagcctccatggtctacctgatccgggtggcacggaggaaccaggagcgtgccctgcgcaccgtctggagctccggagatgacaaggagcagctggtgaagaacacatatgtcctgtgaccgccctgtcgccaagaggactggggaagggaggggagactatgtgtgagctttttttaaatagagggattgactcggatttgagtgatcattagggctgaggtctgtttctctgggaggtaggacggctgcttcctggtctggcagggatgggtttgctttggaaatcctctaggaggctcctcctcgcatgtccccgtacatcgttagaagcttgaattcgagcagtagtagtagtaggcggccgc

SEQ ID NO: 452319 - DNA, 1968 bp, Homo sapiens
ccatcctcccaacaggagccacctgagcttgggccagacatgaccatcttgtgtgacccagaaacggtattttatgaatctccacacttgaccctggacgttctaccctgtgtccgatttcagatcgaaccccgcccttcagaggacaccttaatcataaaccaggcattgaggcgatgggaagcgtagaccccaaacatcactccagcaggttctgttgggggcgaggcccgcgcaagccccgcctcttccccggcaccaggggcgggcccaggtgcgcccagggccggggagcggccgcgcaggtgcctgccctttgcgcctgcgcccagctcgccctgcctagccaggtgcgccccgccccctgcctgcccggccaccttcgggagccgcttccaataggcgttcgccattggctctggcgacctccgcgcgttgggaggtgtagcgcggctctgaacgcgctgagggccgttgagtgtcgcaggcggcgagggcgcgagtgaggagcagacccaggcatcgcgcgccgagaaggccgggcgtccccacactgaaggtccggaaaggcgacttccgggggctttggcacctggcggaccctcccggagcgtcggcacctgaacgcgaggcgctccattgcgcgtgcgcgttgaggggcttcccgcacctgatcgcgagaccccaacggctggtggcgtcgcctgcgcgtctcggctgagctggccatggcgcagctgtgcgggctgaggcggagccgggcgtttctcgccctgctgggatcgctgctcctctctggggtcctggcggccgaccgagaacgcagcatccacgacttctgcctggtgtcgaaggtggtgggcagatgccgggcctccatgcctaggtggtggtacaatgtcactgacggatcctgccagctgtttgtgtatgggggctgtgacggaaacagcaataattacctgaccaaggaggagtgcctcaagaaatgtgccactgtcacagagaatgccacgggtgacctggccaccagcaggaatgcagcggattcctctgtcccaagtgctcccagaaggcaggattctgaagaccactccagcgatatgttcaactatgaagaatactgcaccgccaacgcagtcactgggccttgccgtgcatccttcccacgctggtactttgacgtggagaggaactcctgcaataacttcatctatggaggctgccggggcaataagaacagctaccgctctgaggaggcctgcatgctccgctgcttccgctgtgtgttctcttccaggccagcaggagaatcctcccctgccccttggctcaaaggtggtggttctggcggggctgttcgtgatggtgttgatcctcttcctgggagcctccatggtctacctgatccgggtggcacggaggaaccaggagcgtgccctgcgcaccgtctggagctccggagatgacaaggagcagctggtgaagaacacatatgtcctgtgaccgccctgtcgccaagaggactggggaagggaggggagactatgtgtgagctttttttaaatagagggattgactcggatttgagtgatcattagggctgaggtctgtttctctgggaggtaggacggctgcttcctggtctggcagggatgggtttgctttggaaatcctctaggaggctcctcctcgcatggcctgcagtctggcagcagccccgagttgtttcctcgctgatcgatttctttcctccaggtagagttttctttgcttatgttgaattccattgcctcttttctcatcacagaagtgatgttggaatcgtttcttttgtttgtctgatttatggtttttttaagtataaacaaaagttttttattagcattctgaaagaaggaaagtaaaatgtacaagtttaataaaaaggggccttcccctttagaataaatttcagcatgtgctttc

SEQ ID NO: 452320 - DNA, 1778 bp, Homo sapiens
ccatcctcccaacaggagccacctgagcttgggccagacatgaccatcttgtgtgacccagaaacggtattttatgaatctccacacttgaccctggacgttctaccctgtgtccgatttcagatcgaaccccgcccttcagaggacaccttaatcataaaccaggcattgaggcgatgggaagcgtagaccccaaacatcactccagcaggttctgttgggggcgaggcccgcgcaagccccgcctcttccccggcaccaggggcgggcccaggtgcgcccagggccggggagcggccgcgcaggtgcctgccctttgcgcctgcgcccagctcgccctgcctagccaggtgcgccccgccccctgcctgcccggccaccttcgggagccgcttccaataggcgttcgccattggctctggcgacctccgcgcgttgggaggtgtagcgcggctctgaacgcgctgagggccgttgagtgtcgcaggcggcgagggcgcgagtgaggagcagacccaggcatcgcgcgccgagaaggccgggcgtccccacactgaaggtccggaaaggcgacttccgggggctttggcacctggcggaccctcccggagcgtcggcacctgaacgcgaggcgctccattgcgcgtgcgcgttgaggggcttcccgcacctgatcgcgagaccccaacggctggtggcgtcgcctgcgcgtctcggctgagctggccatggcgcagctgtgcgggctgaggcggagccgggcgtttctcgccctgctgggatcgctgctcctctctggggtcctggcggccgaccgagaacgcagcatccacgagaatgccacgggtgacctggccaccagcaggaatgcagcggattcctctgtcccaagtgctcccagaaggcaggattctgaagaccactccagcgatatgttcaactatgaagaatactgcaccgccaacgcagtcactgggccttgccgtgcatccttcccacgctggtactttgacgtggagaggaactcctgcaataacttcatctatggaggctgccggggcaataagaacagctaccgctctgaggaggcctgcatgctccgctgcttccgccagcaggagaatcctcccctgccccttggctcaaaggtggtggttctggcggggctgttcgtgatggtgttgatcctcttcctgggagcctccatggtctacctgatccgggtggcacggaggaaccaggagcgtgccctgcgcaccgtctggagctccggagatgacaaggagcagctggtgaagaacacatatgtcctgtgaccgccctgtcgccaagaggactggggaagggaggggagactatgtgtgagctttttttaaatagagggattgactcggatttgagtgatcattagggctgaggtctgtttctctgggaggtaggacggctgcttcctggtctggcagggatgggtttgctttggaaatcctctaggaggctcctcctcgcatggcctgcagtctggcagcagccccgagttgtttcctcgctgatcgatttctttcctccaggtagagttttctttgcttatgttgaattccattgcctcttttctcatcacagaagtgatgttggaatcgtttcttttgtttgtctgatttatggtttttttaagtataaacaaaagttttttattagcattctgaaagaaggaaagtaaaatgtacaagtttaataaaaaggggccttcccctttagaataaatttcagcatgtgctttc

SEQ ID NO: 452321 - DNA, 2438 bp, Homo sapiens
ccatcctcccaacaggagccacctgagcttgggccagacatgaccatcttgtgtgacccagaaacggtattttatgaatctccacacttgaccctggacgttctaccctgtgtccgatttcagatcgaaccccgcccttcagaggacaccttaatcataaaccaggcattgaggcgatgggaagcgtagaccccaaacatcactccagcaggttctgttgggggcgaggcccgcgcaagccccgcctcttccccggcaccaggggcgggcccaggtgcgcccagggccggggagcggccgcgcaggtgcctgccctttgcgcctgcgcccagctcgccctgcctagccaggtgcgccccgccccctgcctgcccggccaccttcgggagccgcttccaataggcgttcgccattggctctggcgacctccgcgcgttgggaggtgtagcgcggctctgaacgcgctgagggccgttgagtgtcgcaggcggcgagggcgcgagtgaggagcagacccaggcatcgcgcgccgagaaggccgggcgtccccacactgaaggtccggaaaggcgacttccgggggctttggcacctggcggaccctcccggagcgtcggcacctgaacgcgaggcgctccattgcgcgtgcgcgttgaggggcttcccgcacctgatcgcgagaccccaacggctggtggcgtcgcctgcgcgtctcggctgagctggccatggcgcagctgtgcgggctgaggcggagccgggcgtttctcgccctgctgggatcgctgctcctctctggggtcctggcggccgaccgagaacgcagcatccacgacttctgcctggtgtcgaaggtggtgggcagatgccgggcctccatgcctaggtggtggtacaatgtcactgacggatcctgccagctgtttgtgtatgggggctgtgacggaaacagcaataattacctgaccaaggaggagtgcctcaagaaatgtgccactgtcacagagaatgccacgggtgacctggccaccagcaggaatgcagcggattcctctgtcccaagtgctcccagaaggcaggattctgaagaccactccagcgatatgttcaactatgaagaatactgcaccgccaacgcagtcactgggccttgccgtgcatccttcccacgctggtactttgacgtggagaggaactcctgcaataacttcatctatggaggctgccggggcaataagaacagctaccgctctgaggaggcctgcatgctccgctgcttccgccagcaggagaatcctcccctgccccttggctcaaagggtaagtggccccttaccctcctcctgccatcagcctgcctcctcccttccttgactgagctcagccctgcccagctgtggtttacattatccttcactgtgaacatcatcttggcagaaagtcatgtttctgcgtgagaatggcgaggtggtggtttgtcccaccgttcagtgtacacagttggggctggagtgagtcagtcacaaggcaggccctgcccaggcggcgtgggtgactggggatgaggtcttcctgttgagcatttgaggactgctgcacacgggcctgaggctggcctgaggtgtggagggagcgctgctatgtggggcataagagttggtcacgggtgacaggacggaggaccacgggccagggtgtttcccaacacagtctggtctgagcgggaggccaggcctctggcctgtgtttctgagcttgagttgcaggtgataatgttggcacaaaagacctgccatgccagtctggcctctttctccacctgtttcccggtgaaggagccaggacctggcctgcgagtctgtcctgttctagcagtgaagcctggtttgccaggcacggggctgggaagcaagcagtctgggtctggagggtggccccaaaaaggccaactctgcagctccacagccacatgggggaggctgccacaggtcacactccttagccggatcccctcctgaagaaaagcatctgagctgaccagcgagactgcagtggggcagacactattaaatttgctggcacagctctgagtaccccctcgcttccaccctgacttcatcccgcagtagctctcagccctcccagcccctgcagggccacgtctttctctattgccggtcagcgtgtgtgtgcacaaagcccctaaggtttcatgtgtacacaccggtgctaagtgttttttacacccttgtgcatctctcggcctggggctcctgtgcaggttgccctgagagttgggtttttagttcaaaaagaaggaacacagatgactactctgctggcgacacggccactctgctggcacgcacatagcatggcgcctcctttttttgggggactcttccttggtggcatctctggcaggctgtgtcctctcc

SEQ ID NO: 452322 - DNA, 1316 bp, Homo sapiens
aaaattaggctaggtacgaggcttgggtgtaatcggccgaggcgagtcgcctgcgcgtctcggctgagctggccatggcgcagctgtgcgggctgaggcggagccgggcgtttctcgccctgctgggatcgctgctcctctctggggtcctggcggccgaccgagaacgcagcatccacgacttctgcctggtgtcgaaggtggtgggcagatgccgggcctccatgcctaggtggtggtacaatgtcactgacggatcctgccagctgtttgtgtatgggggctgtgacggaaacagcaataattacctgaccaaggaggagtgcctcaagaaatgtgccactgtcacagagaatgccacgggtgacctggccaccagcaggaatgcagcggattcctctgtcccaagtgctcccagaaggcaggattctgaagaccactccagcgatatgttcaactatgaaggtaaaactccaaagaggccagaatactgcaccgccaacgcagtcactgggccttgccgtgcatccttcccacgctggtactttgacgtggagaggaactcctgcaataacttcatctatggaggctgccggggcaataagaacagctaccgctctgaggaggcctgcatgctccgctgcttccgccagcaggagaatcctcccctgccccttggctcaaaggtggtggttctggcggggctgttcgtgatggtgttgatcctcttcctgggagcctccatggtctacctgatccgggtggcacggaggaaccaggagcgtgccctgcgcaccgtctggagctccggagatgacaaggagcagctggtgaagaacacatatgtcctgtgaccgccctgtcgccaagaggactggggaagggaggggagactatgtgtgagctttttttaaatagagggattgactcggatttgagtgatcattagggctgaggtctgtttctctgggaggtaggacggctgcttcctggtctggcagggatgggtttgctttggaaatcctctaggaggctcctcctcgcatggcctgcagtctggcagcagccccgagttgtttcctcgctgatcgatttctttcctccaggtagagttttctttgcttatgttgaattccattgcctcttttctcatcacagaagtgatgttggaatcgtttcttttgtttgtctgatttatggtttttttaagtataaacaaaagttttttattagcattctgaaagaaggaaagtaaaatgtacaagtttaataaaaaggggccttcccctttagaataaatttcagcatgtgctttc

SEQ ID NO: 452323 - DNA, 748 bp, Homo sapiens
gggaggggcatttggtcctcaggctgagcccacctggattccccaggcccttggtgagcgccactctggctgcaactccccttgcctggcccgtcctgaggcccctctctcgtcctcagtggtggttctggcggggctgttcgtgatggtgttgatcctcttcctgggagcctccatggtctacctgatccgggtggcacggaggaaccaggagcgtgccctgcgcaccgtctggagctccggagatgacaaggagcagctggtgaagaacacatatgtcctgtgaccgccctgtcgccaagaggactggggaagggaggggagactatgtgtgagctttttttaaatagagggattgactcggatttgagtgatcattagggctgaggtctgtttctctgggaggtaggacggctgcttcctggtctggcagggatgggtttgctttggaaatcctctaggaggctcctcctcgcatggcctgcagtctggcagcagccccgagttgtttcctcgctgatcgatttctttcctccaggtagagttttctttgcttatgttgaattccattgcctcttttctcatcacagaagtgatgttggaatcgtttcttttgtttgtctgatttatggtttttttaagtataaacaaaagttttttattagcattctgaaagaaggaaagtaaaatgtacaagtttaataaaaaggggccttcccctttagaataaatttcagcatgtgctttc

SEQ ID NO: 452324 - DNA, 1317 bp, Homo sapiens
ccatcctcccaacaggagccacctgagcttgggccagacatgaccatcttgtgtgacccagaaacggtattttatgaatctccacacttgaccctggacgttctaccctgtgtccgatttcagatcgaaccccgcccttcagaggacaccttaatcataaaccaggcattgaggcgatgggaagcgtagaccccaaacatcactccagcaggttctgttgggggcgaggcccgcgcaagccccgcctcttccccggcaccaggggcgggcccaggtgcgcccagggccggggagcggccgcgcaggtgcctgccctttgcgcctgcgcccagctcgccctgcctagccaggtgcgccccgccccctgcctgcccggccaccttcgggagccgcttccaataggcgttcgccattggctctggcgacctccgcgcgttgggaggtgtagcgcggctctgaacgcgctgagggccgttgagtgtcgcaggcggcgagggcgcgagtgaggagcagacccaggcatcgcgcgccgagaaggccgggcgtccccacactgaaggtccggaaaggcgacttccgggggctttggcacctggcggaccctcccggagcgtcggcacctgaacgcgaggcgctccattgcgcgtgcgcgttgaggggcttcccgcacctgatcgcgagaccccaacggctggtggcgtcgcctgcgcgtctcggctgagctggccatggcgcagctgtgcgggctgaggcggagccgggcgtttctcgccctgctgggatcgctgctcctctctggggtcctggcggccgaccgagaacgcagcatccacgacttctgcctggtgtcgaaggtggtgggcagatgccgggcctccatgcctaggtggtggtacaatgtcactgacggatcctgccagctgtttgtgtatgggggctgtgacggaaacagcaataattacctgaccaaggaggagtgcctcaagaaatgtgccactgtcacagtgggtttgctttggaaatcctctaggaggctcctcctcgcatggcctgcagtctggcagcagccccgagttgtttcctcgctgatcgatttctttcctccaggtagagttttctttgcttatgttgaattccattgcctcttttctcatcacagaagtgatgttggaatcgtttcttttgtttgtctgatttatggtttttttaagtataaacaaaagttttttattagcattctgaaagaaggaaagtaaaatgtacaagtttaataaaaaggggccttcccctttagaataaatttcagcatgtgctttc

SEQ ID NO: 452325 - DNA, 446 bp, Homo sapiens
accagcaacacatagaggaaactgatgttccaaatgtttctggtgtttcagtgtatgtgtcttctagaaagtaggagattttatttttaaaacctatctatgtttaaaccctattttgaaagaaaatttcattttccttgcctacaaatctgaaagctgtacatcctaagtaaaaatctatgcccaaagtgctgggattacaggcgtgagccaccgcgcccggccgaaagccaactcttatgcctagaaatatgtgcacctatgaccaagcccatgaattatacaggaattatgtaattatgagtgatgtacttcaaagttattgcacatacacttgtttactttgtatgtttgcaggattaaactttgtataatctttttacaaaaattttttttcagtatgcaagcttgcaagatgaaaataaaacctgtttgcctgatagttg

SEQ ID NO: 452326 - DNA, 4924 bp, Homo sapiens
aacttctcgggaagatgaggcagtttggcatctgtggccgagttgctgttgccgggtgatagttggagcggagacttagcataatggcagaacctgtttctccactgaagcactttgtgctggctaagaaggcgattactgcagtctttgaccagttactggagtttgttactgaaggatcacattttgttgaagcaacatataagaatccggaacttgatcgaatagccactgaagatgatctggtagaaatgcaaggatataaagacaagctttccatcattggtgaggtgctatctcggagacacatgaaggtggcattttttggcaggacaagcagtgggaagagctctgttatcaatgcaatgttgtgggataaagttctccctagtgggattggccatataaccaattgcttcctaagtgttgaaggaactgatggagataaagcctatcttatgacagaaggatcagatgaaaaaaagagtgtgaagacagttaatcaactggcccatgcccttcacatggacaaagatttgaaagctggctgtcttgtacgtgtgttttggccaaaagcaaaatgtgccctcttgagagatgacctggtgttagtagacagtccaggcacagatgtcactacagagctggatagctggattgataagttttgcctagatgctgatgtctttgttttggtcgcaaactctgaatcaacactaatgaatacggaaaaacacttttttcacaaggtgaatgagcggctttccaagcctaatattttcattctcaataatcgttgggatgcctctgcatcagagccagaatatatggaagacgtacgcagacagcacatggaaagatgcctgcatttcttggtggaggagctcaaagttgtaaatgctttagaagcacagaatcgtatcttctttgtttcagcaaaggaagttcttagtgctagaaagcaaaaagcacaggggatgccagaaagtggtgtggcacttgctgaaggatttcatgcaagattacaggaatttcagaattttgaacaaatctttgaggagtgtatctcgcagtcagcagtgaaaacaaagttcgaacagcacactatcagagctaaacagatactagctactgtgaaaaacataatggattcagtaaacctggcagctgaagataaaaggtttcatgtgcaatgacagatgaaatttgtcgactgtctgttttggttgatgaattttgttcagagtttcatcctaatccagatgtattaaaaatatataaaagtgaattaaataagcacatagaggatggtatgggaagaaatttggctgatcgatgcaccgatgaagtaaacgccttagtgcttcagacccagcaagaaattattgaaaatttgaagccattacttccagctggtatacaggataaactacatacactgatcccttgcaagaaatttgatctcagttataatctaaattaccacaagttatgttcagattttcaagaggatattgtatttcgtttttccctgggctggtcttcccttgtacatcgatttttgggccctagaaatgctcaaagggtgctcctaggattatcagagcctatctttcagctccctagatctttagcttctactcccactgctcctaccactccagcaacgccagataatgcatcacaggaagaactcatgattacattagtaacaggattggcgtccgttacatctagaacttctatgggcatcattattgttggaggagtgatttggaaaactataggctggaaactcctatctgtttcattaactatgtatggagctttgtatctttatgaaagactgagctggaccacccatgccaaggagcgagcctttaaacagcagtttgtaaactatgcaactgaaaaactgaggatgattgttagctccacgagtgcaaactgcagtcaccaagtaaaacaacaaatagctaccacttttgctcgcctgtgccaacaagttgatattactcaaaaacagctggaagaagaaattgctagattacccaaagaaatagatcagttggagaaaatacaaaacaattcaaagctcttaagaaataaagctgttcaacttgaaaatgagctggagaattttactaagcagtttctaccttcaagcaatgaagaatcctaacaatagagattgctttggtgaccatgataggaggaaacgaaacttgtaagattggaacagttgttatttttatgaaattactttaaatatgaattgtactaactgtacctaaatagcaaagccctgtgtagattctggtaatgatctgtctcagggtatgtgtatttttgaagagtgttatgtccttagttttaattttgagtaaagaaaaggctaaaatcatgaattagttacaagcaacagtaccaacttatgtgacccctgaggggtggggctgtgagctcttaatttgtttttgattctgaaaaactctgcttcctggcatccaggagttagagattgagcctttcatcttctttctcaaaactagtttttgatgctttctttcatgggaatagtcacttttttatttagtaaatcgcattgctggaaccaccaaggagtgtggaatgtccttgagtgtattatttatgcaagtcacagtcacgttgccatcatggcagctatgtgaaacactaataaatgtgtttttactttttattcccgttaaaactgatgtaaaacaggataaaggcttgttatagtcacttataagtatctgggtctaagtaatttccttagatgtttctaaagaaacattttcagctttgctcccattatgattccaataaggaacgctttcctagtgcaattttaggagtaaagtttgaagagataaaaatagccaaagataggagacgtctgaattttgaatgataaacagtgatgttttaaaaaagctgttgttcttcaggaggcatttgcctaggatattgctggattataccccattggaggcttttaattttatttgtatgaattttccaggatttcattaaaaattattattgtattttttaccttaatgaaagattttgggttcaaatatctttctatattaaaagctgattgagtctgtacatatgtaaattatgcctagtggaggttctgttgactttcttccccactgtggaagaggccagttttgcctccatttgcacattcatttcagttatttctgatccataaatataacatttacaaaattcttccttgagctggtggaaatgcctcaccagtttcctctttaatgaatcaaataaaatctttaactgatgttaaaaaaaattgattgaaactcagatggaatggaaatgtacaaaaatgacaccattctaggaatttgctagacaaaatgtaggactaccagatcagtatctcctagacacttgttagaaatgcacaatcccggggaacgcagtacatttggccacatgtagtttatgtttccttttcatgggagggataaaatttaaagctttttttttctttgaatacagtccttccttttctatgccttttaaggcttctagatgctattcagcctttttacagcaggtgcaactctatttttcaaggtatcttagaagataacactaggccattgaagcctttcaaaaatatatttttatgcaaattgacacgagtgcagtatactaatgcaaattaattttggtgtttagcttttattgctcatttataacccaagaaatggtacagaccacagtaagtgggattaggtaacaactacaacatggaaaaacagtgtctaagatcacgtactgctaatttaggttacaaaactcaaggctgtaacctttatatgaaagtacttaagcttgaaagttcataatagtttggtatcacctcattagtatagtacagtggttctcaaagtttggtcctgggtcatcgacattacttctttttctttctgagacagggtctcagtctgtcacccaggatggagtgcagtggcgtgatcatggctcactgcagcctcaacctctcgggttcaggtgatcctcccacatcagcctcctgggtggctgggactacaggcacacgccaccatgcctggctagtttttgtaaagacgaggtttccccatgttgtgcaggctggtcttgaactcacagactcaagtgatccttttacctcagcctcccaaactgttgggataacaggtgtaagccaccacacacagctataatcaaccttcaaacttataaaaagtgtggatccttgggtctgaacccagacctatggagtcagacagtaggtttgaggcccagcaatctatggtttaacaagccatccaggtgtttctgatgcacagtgaaattggggtaccactggtattaggtttggtatggcaactttttcatcacttgttttatgtagttgtctgatcaattgtgaaaacataatgaatgttggaaatggaacagtaaaataacgaaagccaactttttttttttttttttttttttttgagacggagtctcgctctgtcgcccaggctggagtgcagtggcgcgatctcggctcactgcaagctccgcctcccgggttcacgccattctcctgcctcagcctcccgagtagctgggactacaggcgtgagccaccgcgcccggccgaaagccaactcttatgcctagaaatatgtgcacctatgaccaagcccatgaattatacaggaattatgtaattatgagtgatgtacttcaaagttattgcacatacacttgtttactttgtatgtttgcaggattaaactttgtataatctttttacaaaaattttttttcagtatgcaagcttgcaagatgaaaataaaacctgtttgcctgatagttg

SEQ ID NO: 452327 - DNA, 3213 bp, Homo sapiens
aacttctcgggaagatgaggcagtttggcatctgtggccgagttgctgttgccgggtgatagttggagcggagacttagcataatggcagaacctgtttctccactgaagcactttgtgctggctaagaaggcgattactgcagtctttgaccagttactggagtttgttactgaaggatcacattttgttgaagcaacatataagaatccggaacttgatcgaatagccactgaagatgatctggtagaaatgcaaggatataaagacaagctttccatcattggtgaggtgctatctcggagacacatgaaggtggcattttttggcaggacaagcagtgggaagagctctgttatcaatgcaatgttgtgggataaagttctccctagtgggattggccatataaccaattgcttcctaagtgttgaaggaactgatggagataaagcctatcttatgacagaaggatcagatgaaaaaaagagtgtgaagacagttaatcaactggcccatgcccttcacatggacaaagatttgaaagctggctgtcttgtacgtgtgttttggccaaaagcaaaatgtgccctcttgagagatgacctggtgttagtagacagtccaggcacagatgtcactacagagctggatagctggattgataagttttgcctagatgctgatgtctttgttttggtcgcaaactctgaatcaacactaatgaatacggaaaaacacttttttcacaaggtgaatgagcggctttccaagcctaatattttcattctcaataatcgttgggatgcctctgcatcagagccagaatatatggaagacgtacgcagacagcacatggaaagatgcctgcatttcttggtggaggagctcaaagttgtaaatgctttagaagcacagaatcgtatcttctttgtttcagcaaaggaagttcttagtgctagaaagcaaaaagcacaggggatgccagaaagtggtgtggcacttgctgaaggatttcatgcaagattacaggaatttcagaattttgaacaaatctttgaggagtgtatctcgcagtcagcagtgaaaacaaagttcgaacagcacactatcagagctaaacagatactagctactgtgaaaaacataatggattcagtaaacctggcagctgaagataaaaggcattattcagtggaagagagggaagaccaaattgatagactggactttattcgaaaccagatgaaccttttaacactggatgttaagaaaaaaatcaaggaggttaccgaggaggtggcaaacaaagtttcatgtgcaatgacagatgaaatttgtcgactgtctgttttggttgatgaattttgttcagagtttcatcctaatccagatgtattaaaaatatataaaagtgaattaaataagcacatagaggatggtatgggaagaaatttggctgatcgatgcaccgatgaagtaaacgccttagtgcttcagacccagcaagaaattattgaaaatttgaagccattacttccagctggtatacaggataaactacatacactgatcccttgcaagaaatttgatctcagttataatctaaattaccacaagttatgttcagattttcaagaggatattgtatttcgtttttccctgggctggtcttcccttgtacatcgatttttgggccctagaaatgctcaaagggtgctcctaggattatcagagcctatctttcagctccctagatctttagcttctactcccactgctcctaccactccagcaacgccagataatgcatcacaggaagaactcatgattacattagtaacaggattggcgtccgttacatctagaacttctatgggcatcattattgttggaggagtgatttggaaaactataggctggaaactcctatctgtttcattaactatgtatggagctttgtatctttatgaaagactgagctggaccacccatgccaaggagcgagcctttaaacagcagtttgtaaactatgcaactgaaaaactgaggatgattgttagctccacgagtgcaaactgcagtcaccaagtaaaacaacaaatagctaccacttttgctcgcctgtgccaacaagttgatattactcaaaaacagctggaagaagaaattgctagattacccaaagaaatagatcagttggagaaaatacaaaacaattcaaagctcttaagaaataaagctgttcaacttgaaaatgagctggagaattttactaagcagtttctaccttcaagcaatgaagaatcctaacaatagagattgctttggtgaccatgataggaggaaacgaaacttgtaagattggaacagttgttatttttatgaaattactttaaatatgaattgtactaactgtacctaaatagcaaagccctgtgtagattctggtaatgatctgtctcagggtatgtgtatttttgaagagtgttatgtccttagttttaattttgagtaaagaaaaggctaaaatcatgaattagttacaagcaacagtaccaacttatgtgacccctgaggggtggggctgtgagctcttaatttgtttttgattctgaaaaactctgcttcctggcatccaggagttagagattgagcctttcatcttctttctcaaaactagtttttgatgctttctttcatgggaatagtcacttttttatttagtaaatcgcattgctggaaccaccaaggagtgtggaatgtccttgagtgtattatttatgcaagtcacagtcacgttgccatcatggcagctatgtgaaacactaataaatgtgtttttactttttattcccgttaaaactgatgtaaaacaggataaaggcttgttatagtcacttataagtatctgggtctaagtaatttccttagatgtttctaaagaaacattttcagctttgctcccattatgattccaataaggaacgctttcctagtgcaattttaggagtaaagtttgaagagataaaaatagccaaagataggagacgtctgaattttgaatgataaacagtgatgttttaaaaaagctgttgttcttcaggaggcatttgcctaggatattgctggattataccccattggaggcttttaattttatttgtatgaattttccaggatttcattaaaaattattattgtattttttacctta

SEQ ID NO: 452328 - DNA, 4641 bp, Homo sapiens
aacaaagtatagcacaaagaagatgtgatttgaggattgtataatcataatgtcctgggaacttcttaagtaaaagatcttcttaaatggatctcaggtctttattttcctgtatcagccagagttgaacaaacttttgtttaaaaaaagagccagatagtaaatattctaggctttatgggccataaagtctcttggagctactcatttctacagttttagagcaaaagcagccatagatagataataggtaaatgaatgggtgtggctgtgtttcaagaaaactttaacaaaagctggcagctggctagatttggcttgtaaggtgctatatgctgacccctgcttattaactaaagtcagtattgcattctgttttgcctgttcatatctatgaagacttagaattcttattcatcctttctgggattcaggtgccacatgggcagagaaacgtggtttctatcaaatcatctatatttttttttccttgagtcatgctaatagatggttcaatacatgaatgagtcccttgctgaaatgctttaggacttcagactaccctgaacgttgattactctttatactgaaataggcattattcagtggaagagagggaagaccaaattgatagactggactttattcgaaaccagatgaaccttttaacactggatgttaagaaaaaaatcaaggaggttaccgaggaggtggcaaacaaagtgggtaacagtagcttcatgattaaaataacctggatggaaattatttttgataatgctaaaaatgttattcctgttactttaaaagaatgttttcagatttttcaatttaatttttttgaataattgataatcttgtttaattattttaactccaaaattttcatattttcaggtttcatgtgcaatgacagatgaaatttgtcgactgtctgttttggttgatgaattttgttcagagtttcatcctaatccagatgtattaaaaatatataaaagtgaattaaataagcacatagaggatggtatgggaagaaatttggctgatcgatgcaccgatgaagtaaacgccttagtgcttcagacccagcaagaaattattgaaaatttgaagccattacttccagctggtatacaggataaactacatacactgatcccttgcaagaaatttgatctcagttataatctaaattaccacaagttatgttcagattttcaagaggatattgtatttcgtttttccctgggctggtcttcccttgtacatcgatttttgggccctagaaatgctcaaagggtgctcctaggattatcagagcctatctttcagctccctagatctttagcttctactcccactgctcctaccactccagcaacgccagataatgcatcacaggaagaactcatgattacattagtaacaggattggcgtccgttacatctagaacttctatgggcatcattattgttggaggagtgatttggaaaactataggctggaaactcctatctgtttcattaactatgtatggagctttgtatctttatgaaagactgagctggaccacccatgccaaggagcgagcctttaaacagcagtttgtaaactatgcaactgaaaaactgaggatgattgttagctccacgagtgcaaactgcagtcaccaagtaaaacaacaaatagctaccacttttgctcgcctgtgccaacaagttgatattactcaaaaacagctggaagaagaaattgctagattacccaaagaaatagatcagttggagaaaatacaaaacaattcaaagctcttaagaaataaagctgttcaacttgaaaatgagctggagaattttactaagcagtttctaccttcaagcaatgaagaatcctaacaatagagattgctttggtgaccatgataggaggaaacgaaacttgtaagattggaacagttgttatttttatgaaattactttaaatatgaattgtactaactgtacctaaatagcaaagccctgtgtagattctggtaatgatctgtctcagggtatgtgtatttttgaagagtgttatgtccttagttttaattttgagtaaagaaaaggctaaaatcatgaattagttacaagcaacagtaccaacttatgtgacccctgaggggtggggctgtgagctcttaatttgtttttgattctgaaaaactctgcttcctggcatccaggagttagagattgagcctttcatcttctttctcaaaactagtttttgatgctttctttcatgggaatagtcacttttttatttagtaaatcgcattgctggaaccaccaaggagtgtggaatgtccttgagtgtattatttatgcaagtcacagtcacgttgccatcatggcagctatgtgaaacactaataaatgtgtttttactttttattcccgttaaaactgatgtaaaacaggataaaggcttgttatagtcacttataagtatctgggtctaagtaatttccttagatgtttctaaagaaacattttcagctttgctcccattatgattccaataaggaacgctttcctagtgcaattttaggagtaaagtttgaagagataaaaatagccaaagataggagacgtctgaattttgaatgataaacagtgatgttttaaaaaagctgttgttcttcaggaggcatttgcctaggatattgctggattataccccattggaggcttttaattttatttgtatgaattttccaggatttcattaaaaattattattgtattttttaccttaatgaaagattttgggttcaaatatctttctatattaaaagctgattgagtctgtacatatgtaaattatgcctagtggaggttctgttgactttcttccccactgtggaagaggccagttttgcctccatttgcacattcatttcagttatttctgatccataaatataacatttacaaaattcttccttgagctggtggaaatgcctcaccagtttcctctttaatgaatcaaataaaatctttaactgatgttaaaaaaaattgattgaaactcagatggaatggaaatgtacaaaaatgacaccattctaggaatttgctagacaaaatgtaggactaccagatcagtatctcctagacacttgttagaaatgcacaatcccggggaacgcagtacatttggccacatgtagtttatgtttccttttcatgggagggataaaatttaaagctttttttttctttgaatacagtccttccttttctatgccttttaaggcttctagatgctattcagcctttttacagcaggtgcaactctatttttcaaggtatcttagaagataacactaggccattgaagcctttcaaaaatatatttttatgcaaattgacacgagtgcagtatactaatgcaaattaattttggtgtttagcttttattgctcatttataacccaagaaatggtacagaccacagtaagtgggattaggtaacaactacaacatggaaaaacagtgtctaagatcacgtactgctaatttaggttacaaaactcaaggctgtaacctttatatgaaagtacttaagcttgaaagttcataatagtttggtatcacctcattagtatagtacagtggttctcaaagtttggtcctgggtcatcgacattacttctttttctttctgagacagggtctcagtctgtcacccaggatggagtgcagtggcgtgatcatggctcactgcagcctcaacctctcgggttcaggtgatcctcccacatcagcctcctgggtggctgggactacaggcacacgccaccatgcctggctagtttttgtaaagacgaggtttccccatgttgtgcaggctggtcttgaactcacagactcaagtgatccttttacctcagcctcccaaactgttgggataacaggtgtaagccaccacacacagctataatcaaccttcaaacttataaaaagtgtggatccttgggtctgaacccagacctatggagtcagacagtaggtttgaggcccagcaatctatggtttaacaagccatccaggtgtttctgatgcacagtgaaattggggtaccactggtattaggtttggtatggcaactttttcatcacttgttttatgtagttgtctgatcaattgtgaaaacataatgaatgttggaaatggaacagtaaaataacgaaagccaactttttttttttttttttttttttttgagacggagtctcgctctgtcgcccaggctggagtgcagtggcgcgatctcggctcactgcaagctccgcctcccgggttcacgccattctcctgcctcagcctcccgagtagctgggactacaggcgtgagccaccgcgcccggccgaaagccaactcttatgcctagaaatatgtgcacctatgaccaagcccatgaattatacaggaattatgtaattatgagtgatgtacttcaaagttattgcacatacacttgtttactttgtatgtttgcaggattaaactttgtataatctttttacaaaaattttttttcagtatgcaagcttgcaagatgaaaataaaacctgtttgcctgatagttg

SEQ ID NO: 452329 - DNA, 2746 bp, Homo sapiens
aacttctcgggaagatgaggcagtttggcatctgtggccgagttgctgttgccgggtgatagttggagcggagacttagcataatggcagaacctgtttctccactgaagcactttgtgctggctaagaaggcgattactgcagtctttgaccagttactggagtttgttactgaaggatcacattttgttgaagcaacatataagaatccggaacttgatcgaatagccactgaagatgatctggtagaaatgcaaggatataaagacaagctttccatcattggtgaggtgctatctcggagacacatgaaggtggcattttttggcaggacaagcagtgggaagagctctgttatcaatgcaatgttgtgggataaagttctccctagtgggattggccatataaccaattgcttcctaagtgttgaaggaactgatggagataaagcctatcttatgacagaaggatcagatgaaaaaaagagtgtgaagacagttaatcaactggcccatgcccttcacatggacaaagatttgaaagctggctgtcttgtacgtgtgttttggccaaaagcaaaatgtgccctcttgagagatgacctggtgttagtagacagtccaggcacagatgtcactacagagctggatagctggattgataagttttgcctagatgctgatgtctttgttttggtcgcaaactctgaatcaacactaatgaatacggaaaaacacttttttcacaaggtgaatgagcggctttccaagcctaatattttcattctcaataatcgttgggatgcctctgcatcagagccagaatatatggaagacgtacgcagacagcacatggaaagatgcctgcatttcttggtggaggagctcaaagttgtaaatgctttagaagcacagaatcgtatcttctttgtttcagcaaaggaagttcttagtgctagaaagcaaaaagcacaggggatgccagaaagtggtgtggcacttgctgaaggatttcatgcaagattacaggaatttcagaattttgaacaaatctttgaggagtgtatctcgcagtcagcagtgaaaacaaagttcgaacagcacactatcagagctaaacagatactagctactgtgaaaaacataatggattcagtaaacctggcagctgaagataaaaggcattattcagtggaagagagggaagaccaaattgatagactggactttattcgaaaccagatgaaccttttaacactggatgttaagaaaaaaatcaaggaggttaccgaggaggtggcaaacaaagtttcatgtgcaatgacagatgaaatttgtcgactgtctgttttggttgatgaattttgttcagagtttcatcctaatccagatgtattaaaaatatataaaagtgaattaaataagcacatagaggatggtatgggaagaaatttggctgatcgatgcaccgatgaagtaaacgccttagtgcttcagacccagcaagaaattattgaaaatttgaagccattacttccagctggtatacaggataaactacatacactgatcccttgcaagaaatttgatctcagttataatctaaattaccacaagttatgttcagattttcaagaggatattgtatttcgtttttccctgggctggtcttcccttgtacatcgatttttgggccctagaaatgctcaaagggtgctcctaggattatcagagcctatctttcagctccctagatctttagcttctactcccactgctcctaccactccagcaacgccagataatgcatcacaggaagaactcatgattacattagtaacaggattggcgtccgttacatctagaacttctatgggcatcattattgttggaggagtgatttggaaaactataggctggaaactcctatctgtttcattaactatgtatggagctttgtatctttatgaaagactgagctggaccacccatgccaaggagcgagcctttaaacagcagtttgtaaactatgcaactgaaaaactgaggatgattgttagctccacgagtgcaaactgcagtcaccaagtaaaacaacaaatagctaccacttttgctcgcctgtgccaacaagttgatattactcaaaaacagctggaagaagaaattgctagattacccaaagaaatagatcagttggagaaaatacaaaacaattcaaagctcttaagaaataaagctgttcaacttgaaaatgagctggagaattttactaagcagtttctaccttcaagcaatgaagaatcctaacaatagagattgctttggtgaccatgataggaggaaacgaaacttgtaagattggaacagttgttatttttatgaaattactttaaatatgaattgtactaactgtacctaaatagcaaagccctgtgtagattctggtaatgatctgtctcagggtatgtgtatttttgaagagtgttatgtccttagttttaattttgagtaaagaaaaggctaaaatcatgaattagttacaagcaacagtaccaacttatgtgacccctgaggggtggggctgtgagctcttaatttgtttttgattctgaaaaactctgcttcctggcatccaggagttagagattgagcctttcatcttctttctcaaaactagtttttgatgctttctttcatgggaatagtcacttttttatttagtaaatcgcattgctggaaccacc

SEQ ID NO: 452330 - DNA, 4980 bp, Homo sapiens
aacttctcgggaagatgaggcagtttggcatctgtggccgagttgctgttgccgggtgatagttggagcggagacttagcataatggcagaacctgtttctccactgaagcactttgtgctggctaagaaggcgattactgcagtctttgaccagttactggagtttgttactgaaggatcacattttgttgaagcaacatataagaatccggaacttgatcgaatagccactgaagatgatctggtagaaatgcaaggatataaagacaagctttccatcattggtgaggtgctatctcggagacacatgaaggtggcattttttggcaggacaagcagtgggaagagctctgttatcaatgcaatgttgtgggataaagttctccctagtgggattggccatataaccaattgcttcctaagtgttgaaggaactgatggagataaagcctatcttatgacagaaggatcagatgaaaaaaagagtgtgaagacagttaatcaactggcccatgcccttcacatggacaaagatttgaaagctggctgtcttgtacgtgtgttttggccaaaagcaaaatgtgccctcttgagagatgacctggtgttagtagacagtccaggcacagatgtcactacagagctggatagctggattgataagttttgcctagatgctgatgtctttgttttggtcgcaaactctgaatcaacactaatgaatacggaaaaacacttttttcacaaggtgaatgagcggctttccaagcctaatattttcattctcaataatcgttgggatgcctctgcatcagagccagaatatatggaagacgtacgcagacagcacatggaaagatgcctgcatttcttggtggaggagctcaaagttgtaaatgctttagaagcacagaatcgtatcttctttgtttcagcaaaggaagttcttagtgctagaaagcaaaaagcacaggggatgccagaaagtggtgtggcacttgctgaaggatttcatgcaagattacaggaatttcagaattttgaacaaatctttgaggagtgtatctcgcagtcagcagtgaaaacaaagttcgaacagcacactatcagagctaaacagatactagctactgtgaaaaacataatggattcagtaaacctggcagctgaagataaaaggcattattcagtggaagagagggaagaccaaattgatagactggactttattcgaaaccagatgaaccttttaacactggatgttaagaaaaaaatcaaggaggttaccgaggaggtggcaaacaaagtttcatgtgcaatgacagatgaaatttgtcgactgtctgttttggttgatgaattttgttcagagtttcatcctaatccagatgtattaaaaatatataaaagtgaattaaataagcacatagaggatggtatgggaagaaatttggctgatcgatgcaccgatgaagtaaacgccttagtgcttcagacccagcaagaaattattgaaaatttgaagccattacttccagctggtatacaggataaactacatacactgatcccttgcaagaaatttgatctcagttataatctaaattaccacaagttatgttcagattttcaagaggatattgtatttcgtttttccctgggctggtcttcccttgtacatcgatttttgggccctagaaatgctcaaagggtgctcctaggattatcagagcctatctttcagctccctagatctttagcttctactcccactgctcctaccactccagcaacgccagataatgcatcacaggaagaactcatgattacattagtaacaggattggcgtccgttacatctagaacttctatgggcatcattattgttggaggagtgatttggaaaactataggctggaaactcctatctgtttcattaactatgtatggagctttgtatctttatgaaagactgagctggaccacccatgccaaggagcgagcctttaaacagcagtttgtaaactatgcaactgaaaaactgaggatgattgttagctccacgagtgcaaactgcagtcaccaagtaaaacaacaaatagctaccacttttgctcgcctgtgccaacaagttgatattactcaaaaacagctggaagaagaaattgctagattacccaaagaaatagatcagttggagaaaatacaaaacaattcaaagctcttaagaatcctaacaatagagattgctttggtgaccatgataggaggaaacgaaacttgtaagattggaacagttgttatttttatgaaattactttaaatatgaattgtactaactgtacctaaatagcaaagccctgtgtagattctggtaatgatctgtctcagggtatgtgtatttttgaagagtgttatgtccttagttttaattttgagtaaagaaaaggctaaaatcatgaattagttacaagcaacagtaccaacttatgtgacccctgaggggtggggctgtgagctcttaatttgtttttgattctgaaaaactctgcttcctggcatccaggagttagagattgagcctttcatcttctttctcaaaactagtttttgatgctttctttcatgggaatagtcacttttttatttagtaaatcgcattgctggaaccaccaaggagtgtggaatgtccttgagtgtattatttatgcaagtcacagtcacgttgccatcatggcagctatgtgaaacactaataaatgtgtttttactttttattcccgttaaaactgatgtaaaacaggataaaggcttgttatagtcacttataagtatctgggtctaagtaatttccttagatgtttctaaagaaacattttcagctttgctcccattatgattccaataaggaacgctttcctagtgcaattttaggagtaaagtttgaagagataaaaatagccaaagataggagacgtctgaattttgaatgataaacagtgatgttttaaaaaagctgttgttcttcaggaggcatttgcctaggatattgctggattataccccattggaggcttttaattttatttgtatgaattttccaggatttcattaaaaattattattgtattttttaccttaatgaaagattttgggttcaaatatctttctatattaaaagctgattgagtctgtacatatgtaaattatgcctagtggaggttctgttgactttcttccccactgtggaagaggccagttttgcctccatttgcacattcatttcagttatttctgatccataaatataacatttacaaaattcttccttgagctggtggaaatgcctcaccagtttcctctttaatgaatcaaataaaatctttaactgatgttaaaaaaaattgattgaaactcagatggaatggaaatgtacaaaaatgacaccattctaggaatttgctagacaaaatgtaggactaccagatcagtatctcctagacacttgttagaaatgcacaatcccggggaacgcagtacatttggccacatgtagtttatgtttccttttcatgggagggataaaatttaaagctttttttttctttgaatacagtccttccttttctatgccttttaaggcttctagatgctattcagcctttttacagcaggtgcaactctatttttcaaggtatcttagaagataacactaggccattgaagcctttcaaaaatatatttttatgcaaattgacacgagtgcagtatactaatgcaaattaattttggtgtttagcttttattgctcatttataacccaagaaatggtacagaccacagtaagtgggattaggtaacaactacaacatggaaaaacagtgtctaagatcacgtactgctaatttaggttacaaaactcaaggctgtaacctttatatgaaagtacttaagcttgaaagttcataatagtttggtatcacctcattagtatagtacagtggttctcaaagtttggtcctgggtcatcgacattacttctttttctttctgagacagggtctcagtctgtcacccaggatggagtgcagtggcgtgatcatggctcactgcagcctcaacctctcgggttcaggtgatcctcccacatcagcctcctgggtggctgggactacaggcacacgccaccatgcctggctagtttttgtaaagacgaggtttccccatgttgtgcaggctggtcttgaactcacagactcaagtgatccttttacctcagcctcccaaactgttgggataacaggtgtaagccaccacacacagctataatcaaccttcaaacttataaaaagtgtggatccttgggtctgaacccagacctatggagtcagacagtaggtttgaggcccagcaatctatggtttaacaagccatccaggtgtttctgatgcacagtgaaattggggtaccactggtattaggtttggtatggcaactttttcatcacttgttttatgtagttgtctgatcaattgtgaaaacataatgaatgttggaaatggaacagtaaaataacgaaagccaactttttttttttttttttttttttttgagacggagtctcgctctgtcgcccaggctggagtgcagtggcgcgatctcggctcactgcaagctccgcctcccgggttcacgccattctcctgcctcagcctcccgagtagctgggactacaggcgtgagccaccgcgcccggccgaaagccaactcttatgcctagaaatatgtgcacctatgaccaagcccatgaattatacaggaattatgtaattatgagtgatgtacttcaaagttattgcacatacacttgtttactttgtatgtttgcaggattaaactttgtataatctttttacaaaaattttttttcagtatgcaagcttgcaagatgaaaataaaacctgtttgcctgatagttg

SEQ ID NO: 452331 - DNA, 1557 bp, Homo sapiens
aacttctcgggaagatgaggcagtttggcatctgtggccgagttgctgttgccgggtgatagttggagcggagacttagcataatggcagaacctgtttctccactgaagcactttgtgctggctaagaaggcgattactgcagtctttgaccagttactggagtttgttactgaaggatcacattttgttgaagcaacatataagaatccggaacttgatcgaatagccactgaagatgatctggtagaaatgcaaggatataaagacaagctttccatcattggtgaggtgctatctcggagacacatgaaggtggcattttttggcaggacaagcagtgggaagagctctgttatcaatgcaatgttgtgggataaagttctccctagtgggattggccatataaccaattgcttcctaagtgttgaaggaactgatggagataaagcctatcttatgacagaaggatcagatgaaaaaaagagtgtgaagacagttaatcaactggcccatgcccttcacatggacaaagatttgaaagctggctgtcttgtacgtgtgttttggccaaaagcaaaatgtgccctcttgagagatgacctggtgttagtagacagtccaggcacagatgtcactacagagctggatagctggattgataagttttgcctagatgctgatgtctttgttttggtcgcaaactctgaatcaacactaatgaatacggaaaaacacttttttcacaaggtgaatgagcggctttccaagcctaatattttcattctcaataatcgttgggatgcctctgcatcagagccagaatatatggaagacgtacgcagacagcacatggaaagatgcctgcatttcttggtggaggagctcaaagttgtaaatgctttagaagcacagaatcgtatcttctttgtttcagcaaaggaagttcttagtgctagaaagcaaaaagcacaggggatgccagaaagtggtgtggcacttgctgaaggatttcatgcaagattacaggaatttcagaattttgaacaaatctttgaggagtgtatctcgcagtcagcagtgaaaacaaagttcgaacagcacactatcagagctaaacagatactagctactgtgaaaaacataatggattcagtaaacctggcagctgaagataaaaggtatgagttcattttgttgcaacataaaaatgttagtttttttgtcagacttttgttaagatgaggttttaaattgttgtactataaatactttttacactgaaatcaaccttgtgggtttaactgatgcctacttctatatttttaagtgcgtatttgaaagtgtcgatatttattctgcaaccttgcacacatcatttatatcccctggacctcactattcctgtgtatgaattgtgatttttaaaatgttttgtggctttaaaatatctttgaagcagtggaagaaccatttcttcaagcagatttttatgaagaagtccaaaacaggtgatcctctttctgcattcaacccacgacccattttttaatatggt

SEQ ID NO: 452332 - DNA, 174 bp, Homo sapiens
gaaatttggctgatcgatgcaccgatgaagtaaacgccttagtgcttcagacccagcaagaaattattggtaatatttatgtctacaaggtcatgtctggtttgttttttcattcatgactggtgaagagcttattttcctttaggcattccattgaaggtaaaacatttacca

SEQ ID NO: 452333 - DNA, 723 bp, Homo sapiens
gtatacagtatttacttctatttataggatctgtaaaatagtatgaaaatttgcaggttaaaagtagtgaattaaatatcacaagtttcatcttaaatttttaaaaaacatacatctttaggaatgaactatcaccacctagctggtctttaatacttcctaagcattttcacatcacagcacacaaagaaatatttgtacgttgaggtaataagaaaaccccaggtgccctatctagccttctctgaatatcaaggggatctgtcttaagtattaaatgttatttttagtagtagttcttatttgtttctttaaaaaatgtatatcattaacagcatggatatgcttgttttggtttttgaaaggtctgacctacaatatttaacattgttttatttttgagatacattgaatcaggataagtctggcagcttataaagctctccctcatttgtgtgctgatcccttttaagcctgattgatttctggtaacttcaggttttctcatggagaaggaatatacatttttagaaaatgtatctaactcaaagatccatagggaactaaaatgcttttaaatgtactctccaaagtggtgtttttccttctcagactaagctatgactttatcttacagatttggaaaactataggctggaaactcctatctgtttcattaactatgtatggagctttgtatctttatgaaagactgagctggac

SEQ ID NO: 452334 - DNA, 606 bp, Homo sapiens
caagaaaactttaacaaaagctggcagctggctagatttggcttgtaaggtgctatatgctgacccctgcttattaactaaagtcagtattgcattctgttttgcctgttcatatctatgaagacttagaattcttattcatcctttctgggattcaggtgccacatgggcagagaaacgtggtttctatcaaatcatctatataaaatactttataagtgaaatattacttgaatcctttgagatgttacaagttttttttttccttgagtcatgctaatagatggttcaatacatgaatgagtcccttgctgaaatgctttaggacttcagactaccctgaacgttgattactctttatactgaaataggcattattcagtggaagagagggaagaccaaattgatagactggactttattcgaaaccagatgaaccttttaacactggatgttaagaaaaaaatcaaggaggttaccgaggaggtggcaaacaaagtgggtaacagtagcttcatgattaaaataacctggatggaaattatttttgataatgctaaaaatgttattcctgttactttaaaagaatgttttcagatttttcaa

SEQ ID NO: 452335 - DNA, 387 bp, Homo sapiens
acaaatagctaccacttttgctcgcctgtgccaacaagttgatattactcaaaaacagctggaagaagaaattgctagattacccaaagaaatagatcagttggagaaaatacaaaacaattcaaagctcttaagtttaaacctttcttctcaataatttgaacatttactggtctcattacaaaatatgtaaaattattaatgaatttgtattcattcctaatagctttttgtgttggtttaaatgaaaatcttccatatttaattccatgtggtttgcagtttcaccgaaggtttaaatgaaaatcttccatatttaattccatgtggtttgcagtttcactgaaggctaattgcaacaagaaaacaaatctgaattgaaaggga

SEQ ID NO: 452336 - DNA, 5051 bp, Homo sapiens
aacttctcgggaagatgaggcagtttggcatctgtggccgagttgctgttgccgggtgatagttggagcggagacttagcataatggcagaacctgtttctccactgaagcactttgtgctggctaagaaggcgattactgcagtctttgaccagttactggagtttgttactgaaggatcacattttgttgaagcaacatataagaatccggaacttgatcgaatagccactgaagatgatctggtagaaatgcaaggatataaagacaagctttccatcattggtgaggtgctatctcggagacacatgaaggtggcattttttggcaggacaagcagtgggaagagctctgttatcaatgcaatgttgtgggataaagttctccctagtgggattggccatataaccaattgcttcctaagtgttgaaggaactgatggagataaagcctatcttatgacagaaggatcagatgaaaaaaagagtgtgaagacagttaatcaactggcccatgcccttcacatggacaaagatttgaaagctggctgtcttgtacgtgtgttttggccaaaagcaaaatgtgccctcttgagagatgacctggtgttagtagacagtccaggcacagatgtcactacagagctggatagctggattgataagttttgcctagatgctgatgtctttgttttggtcgcaaactctgaatcaacactaatgaatacggaaaaacacttttttcacaaggtgaatgagcggctttccaagcctaatattttcattctcaataatcgttgggatgcctctgcatcagagccagaatatatggaagacgtacgcagacagcacatggaaagatgcctgcatttcttggtggaggagctcaaagttgtaaatgctttagaagcacagaatcgtatcttctttgtttcagcaaaggaagttcttagtgctagaaagcaaaaagcacaggggatgccagaaagtggtgtggcacttgctgaaggatttcatgcaagattacaggaatttcagaattttgaacaaatctttgaggagtgtatctcgcagtcagcagtgaaaacaaagttcgaacagcacactatcagagctaaacagatactagctactgtgaaaaacataatggattcagtaaacctggcagctgaagataaaaggcattattcagtggaagagagggaagaccaaattgatagactggactttattcgaaaccagatgaaccttttaacactggatgttaagaaaaaaatcaaggaggttaccgaggaggtggcaaacaaagtttcatgtgcaatgacagatgaaatttgtcgactgtctgttttggttgatgaattttgttcagagtttcatcctaatccagatgtattaaaaatatataaaagtgaattaaataagcacatagaggatggtatgggaagaaatttggctgatcgatgcaccgatgaagtaaacgccttagtgcttcagacccagcaagaaattattgaaaatttgaagccattacttccagctggtatacaggataaactacatacactgatcccttgcaagaaatttgatctcagttataatctaaattaccacaagttatgttcagattttcaagaggatattgtatttcgtttttccctgggctggtcttcccttgtacatcgatttttgggccctagaaatgctcaaagggtgctcctaggattatcagagcctatctttcagctccctagatctttagcttctactcccactgctcctaccactccagcaacgccagataatgcatcacaggaagaactcatgattacattagtaacaggattggcgtccgttacatctagaacttctatgggcatcattattgttggaggagtgatttggaaaactataggctggaaactcctatctgtttcattaactatgtatggagctttgtatctttatgaaagactgagctggaccacccatgccaaggagcgagcctttaaacagcagtttgtaaactatgcaactgaaaaactgaggatgattgttagctccacgagtgcaaactgcagtcaccaagtaaaacaacaaatagctaccacttttgctcgcctgtgccaacaagttgatattactcaaaaacagctggaagaagaaattgctagattacccaaagaaatagatcagttggagaaaatacaaaacaattcaaagctcttaagaaataaagctgttcaacttgaaaatgagctggagaattttactaagcagtttctaccttcaagcaatgaagaatcctaacaatagagattgctttggtgaccatgataggaggaaacgaaacttgtaagattggaacagttgttatttttatgaaattactttaaatatgaattgtactaactgtacctaaatagcaaagccctgtgtagattctggtaatgatctgtctcagggtatgtgtatttttgaagagtgttatgtccttagttttaattttgagtaaagaaaaggctaaaatcatgaattagttacaagcaacagtaccaacttatgtgacccctgaggggtggggctgtgagctcttaatttgtttttgattctgaaaaactctgcttcctggcatccaggagttagagattgagcctttcatcttctttctcaaaactagtttttgatgctttctttcatgggaatagtcacttttttatttagtaaatcgcattgctggaaccaccaaggagtgtggaatgtccttgagtgtattatttatgcaagtcacagtcacgttgccatcatggcagctatgtgaaacactaataaatgtgtttttactttttattcccgttaaaactgatgtaaaacaggataaaggcttgttatagtcacttataagtatctgggtctaagtaatttccttagatgtttctaaagaaacattttcagctttgctcccattatgattccaataaggaacgctttcctagtgcaattttaggagtaaagtttgaagagataaaaatagccaaagataggagacgtctgaattttgaatgataaacagtgatgttttaaaaaagctgttgttcttcaggaggcatttgcctaggatattgctggattataccccattggaggcttttaattttatttgtatgaattttccaggatttcattaaaaattattattgtattttttaccttaatgaaagattttgggttcaaatatctttctatattaaaagctgattgagtctgtacatatgtaaattatgcctagtggaggttctgttgactttcttccccactgtggaagaggccagttttgcctccatttgcacattcatttcagttatttctgatccataaatataacatttacaaaattcttccttgagctggtggaaatgcctcaccagtttcctctttaatgaatcaaataaaatctttaactgatgttaaaaaaaattgattgaaactcagatggaatggaaatgtacaaaaatgacaccattctaggaatttgctagacaaaatgtaggactaccagatcagtatctcctagacacttgttagaaatgcacaatcccggggaacgcagtacatttggccacatgtagtttatgtttccttttcatgggagggataaaatttaaagctttttttttctttgaatacagtccttccttttctatgccttttaaggcttctagatgctattcagcctttttacagcaggtgcaactctatttttcaaggtatcttagaagataacactaggccattgaagcctttcaaaaatatatttttatgcaaattgacacgagtgcagtatactaatgcaaattaattttggtgtttagcttttattgctcatttataacccaagaaatggtacagaccacagtaagtgggattaggtaacaactacaacatggaaaaacagtgtctaagatcacgtactgctaatttaggttacaaaactcaaggctgtaacctttatatgaaagtacttaagcttgaaagttcataatagtttggtatcacctcattagtatagtacagtggttctcaaagtttggtcctgggtcatcgacattacttctttttctttctgagacagggtctcagtctgtcacccaggatggagtgcagtggcgtgatcatggctcactgcagcctcaacctctcgggttcaggtgatcctcccacatcagcctcctgggtggctgggactacaggcacacgccaccatgcctggctagtttttgtaaagacgaggtttccccatgttgtgcaggctggtcttgaactcacagactcaagtgatccttttacctcagcctcccaaactgttgggataacaggtgtaagccaccacacacagctataatcaaccttcaaacttataaaaagtgtggatccttgggtctgaacccagacctatggagtcagacagtaggtttgaggcccagcaatctatggtttaacaagccatccaggtgtttctgatgcacagtgaaattggggtaccactggtattaggtttggtatggcaactttttcatcacttgttttatgtagttgtctgatcaattgtgaaaacataatgaatgttggaaatggaacagtaaaataacgaaagccaactttttttttttttttttttttttttgagacggagtctcgctctgtcgcccaggctggagtgcagtggcgcgatctcggctcactgcaagctccgcctcccgggttcacgccattctcctgcctcagcctcccgagtagctgggactacaggcgtgagccaccgcgcccggccgaaagccaactcttatgcctagaaatatgtgcacctatgaccaagcccatgaattatacaggaattatgtaattatgagtgatgtacttcaaagttattgcacatacacttgtttactttgtatgtttgcaggattaaactttgtataatctttttacaaaaattttttttcagtatgcaagcttgcaagatgaaaataaaacctgtttgcctgatagttg

SEQ ID NO: 452337 - DNA, 4466 bp, Homo sapiens
aacaaagtatagcacaaagaagatgtgatttgaggattgtataatcataatgtcctgggaacttcttaagtaaaagatcttcttaaatggatctcaggtctttattttcctgtatcagccagagttgaacaaacttttgtttaaaaaaagagccagatagtaaatattctaggctttatgggccataaagtctcttggagctactcatttctacagttttagagcaaaagcagccatagatagataataggtaaatgaatgggtgtggctgtgtttcaagaaaactttaacaaaagctggcagctggctagatttggcttgtaaggtgctatatgctgacccctgcttattaactaaagtcagtattgcattctgttttgcctgttcatatctatgaagacttagaattcttattcatcctttctgggattcaggtgccacatgggcagagaaacgtggtttctatcaaatcatctatatttttttttccttgagtcatgctaatagatggttcaatacatgaatgagtcccttgctgaaatgctttaggacttcagactaccctgaacgttgattactctttatactgaaataggcattattcagtggaagagagggaagaccaaattgatagactggactttattcgaaaccagatgaaccttttaacactggatgttaagaaaaaaatcaaggaggttaccgaggaggtggcaaacaaagtttcatgtgcaatgacagatgaaatttgtcgactgtctgttttggttgatgaattttgttcagagtttcatcctaatccagatgtattaaaaatatataaaagtgaattaaataagcacatagaggatggtatgggaagaaatttggctgatcgatgcaccgatgaagtaaacgccttagtgcttcagacccagcaagaaattattgaaaatttgaagccattacttccagctggtatacaggataaactacatacactgatcccttgcaagaaatttgatctcagttataatctaaattaccacaagttatgttcagattttcaagaggatattgtatttcgtttttccctgggctggtcttcccttgtacatcgatttttgggccctagaaatgctcaaagggtgctcctaggattatcagagcctatctttcagctccctagatctttagcttctactcccactgctcctaccactccagcaacgccagataatgcatcacaggaagaactcatgattacattagtaacaggattggcgtccgttacatctagaacttctatgggcatcattattgttggaggagtgatttggaaaactataggctggaaactcctatctgtttcattaactatgtatggagctttgtatctttatgaaagactgagctggaccacccatgccaaggagcgagcctttaaacagcagtttgtaaactatgcaactgaaaaactgaggatgattgttagctccacgagtgcaaactgcagtcaccaagtaaaacaacaaatagctaccacttttgctcgcctgtgccaacaagttgatattactcaaaaacagctggaagaagaaattgctagattacccaaagaaatagatcagttggagaaaatacaaaacaattcaaagctcttaagaaataaagctgttcaacttgaaaatgagctggagaattttactaagcagtttctaccttcaagcaatgaagaatcctaacaatagagattgctttggtgaccatgataggaggaaacgaaacttgtaagattggaacagttgttatttttatgaaattactttaaatatgaattgtactaactgtacctaaatagcaaagccctgtgtagattctggtaatgatctgtctcagggtatgtgtatttttgaagagtgttatgtccttagttttaattttgagtaaagaaaaggctaaaatcatgaattagttacaagcaacagtaccaacttatgtgacccctgaggggtggggctgtgagctcttaatttgtttttgattctgaaaaactctgcttcctggcatccaggagttagagattgagcctttcatcttctttctcaaaactagtttttgatgctttctttcatgggaatagtcacttttttatttagtaaatcgcattgctggaaccaccaaggagtgtggaatgtccttgagtgtattatttatgcaagtcacagtcacgttgccatcatggcagctatgtgaaacactaataaatgtgtttttactttttattcccgttaaaactgatgtaaaacaggataaaggcttgttatagtcacttataagtatctgggtctaagtaatttccttagatgtttctaaagaaacattttcagctttgctcccattatgattccaataaggaacgctttcctagtgcaattttaggagtaaagtttgaagagataaaaatagccaaagataggagacgtctgaattttgaatgataaacagtgatgttttaaaaaagctgttgttcttcaggaggcatttgcctaggatattgctggattataccccattggaggcttttaattttatttgtatgaattttccaggatttcattaaaaattattattgtattttttaccttaatgaaagattttgggttcaaatatctttctatattaaaagctgattgagtctgtacatatgtaaattatgcctagtggaggttctgttgactttcttccccactgtggaagaggccagttttgcctccatttgcacattcatttcagttatttctgatccataaatataacatttacaaaattcttccttgagctggtggaaatgcctcaccagtttcctctttaatgaatcaaataaaatctttaactgatgttaaaaaaaattgattgaaactcagatggaatggaaatgtacaaaaatgacaccattctaggaatttgctagacaaaatgtaggactaccagatcagtatctcctagacacttgttagaaatgcacaatcccggggaacgcagtacatttggccacatgtagtttatgtttccttttcatgggagggataaaatttaaagctttttttttctttgaatacagtccttccttttctatgccttttaaggcttctagatgctattcagcctttttacagcaggtgcaactctatttttcaaggtatcttagaagataacactaggccattgaagcctttcaaaaatatatttttatgcaaattgacacgagtgcagtatactaatgcaaattaattttggtgtttagcttttattgctcatttataacccaagaaatggtacagaccacagtaagtgggattaggtaacaactacaacatggaaaaacagtgtctaagatcacgtactgctaatttaggttacaaaactcaaggctgtaacctttatatgaaagtacttaagcttgaaagttcataatagtttggtatcacctcattagtatagtacagtggttctcaaagtttggtcctgggtcatcgacattacttctttttctttctgagacagggtctcagtctgtcacccaggatggagtgcagtggcgtgatcatggctcactgcagcctcaacctctcgggttcaggtgatcctcccacatcagcctcctgggtggctgggactacaggcacacgccaccatgcctggctagtttttgtaaagacgaggtttccccatgttgtgcaggctggtcttgaactcacagactcaagtgatccttttacctcagcctcccaaactgttgggataacaggtgtaagccaccacacacagctataatcaaccttcaaacttataaaaagtgtggatccttgggtctgaacccagacctatggagtcagacagtaggtttgaggcccagcaatctatggtttaacaagccatccaggtgtttctgatgcacagtgaaattggggtaccactggtattaggtttggtatggcaactttttcatcacttgttttatgtagttgtctgatcaattgtgaaaacataatgaatgttggaaatggaacagtaaaataacgaaagccaactttttttttttttttttttttttttgagacggagtctcgctctgtcgcccaggctggagtgcagtggcgcgatctcggctcactgcaagctccgcctcccgggttcacgccattctcctgcctcagcctcccgagtagctgggactacaggcgtgagccaccgcgcccggccgaaagccaactcttatgcctagaaatatgtgcacctatgaccaagcccatgaattatacaggaattatgtaattatgagtgatgtacttcaaagttattgcacatacacttgtttactttgtatgtttgcaggattaaactttgtataatctttttacaaaaattttttttcagtatgcaagcttgcaagatgaaaataaaacctgtttgcctgatagttg

SEQ ID NO: 452338 - DNA, 3129 bp, Homo sapiens
aacttctcgggaagatgaggcagtttggcatctgtggccgagttgctgttgccgggtgatagttggagcggagacttagcataatggcagaacctgtttctccactgaagcactttgtgctggctaagaaggcgattactgcagtctttgaccagttactggagtttgttactgaaggatcacattttgttgaagcaacatataagaatccggaacttgatcgaatagccactgaagatgatctggtagaaatgcaaggatataaagacaagctttccatcattggtgaggtgctatctcggagacacatgaaggtggcattttttggcaggacaagcagtgggaagagctctgttatcaatgcaatgttgtgggataaagttctccctagtgggattggccatataaccaattgcttcctaagtgttgaaggaactgatggagataaagcctatcttatgacagaaggatcagatgaaaaaaagagtgtgaagacagttaatcaactggcccatgcccttcacatggacaaagatttgaaagctggctgtcttgtacgtgtgttttggccaaaagcaaaatgtgccctcttgagagatgacctggtgttagtagacagtccaggcacagatgtcactacagagctggatagctggattgataagttttgcctagatgctgatgtctttgttttggtcgcaaactctgaatcaacactaatgaatacggaaaaacacttttttcacaaggtgaatgagcggctttccaagcctaatattttcattctcaataatcgttgggatgcctctgcatcagagccagaatatatggaagacgtacgcagacagcacatggaaagatgcctgcatttcttggtggaggagctcaaagttgtaaatgctttagaagcacagaatcgtatcttctttgtttcagcaaaggaagttcttagtgctagaaagcaaaaagcacaggggatgccagaaagtggtgtggcacttgctgaaggatttcatgcaagattacaggaatttcagaattttgaacaaatctttgaggagtgtatctcgcagtcagcagtgaaaacaaagttcgaacagcacactatcagagctaaacagatactagctactgtgaaaaacataatggattcagtaaacctggcagctgaagataaaaggcattattcagtggaagagagggaagaccaaattgatagactggactttattcgaaaccagatgaaccttttaacactggatgttaagaaaaaaatcaaggaggttaccgaggaggtggcaaacaaagtttcatgtgcaatgacagatgaaatttgtcgactgtctgttttggttgatgaattttgttcagagtttcatcctaatccagatgtattaaaaatatataaaagtgaattaaataagcacatagaggatggtatgggaagaaatttggctgatcgatgcaccgatgaagtaaacgccttagtgcttcagacccagcaagaaattattgaaaatttgaagccattacttccagctggtatacaggataaactacatacactgatcccttgcaagaaatttgatctcagttataatctaaattaccacaagttatgttcagattttcaagaggatattgtatttcgtttttccctgggctggtcttcccttgtacatcgatttttgggccctagaaatgctcaaagggtgctcctaggattatcagagcctatctttcagctccctagatctttagcttctactcccactgctcctaccactccagcaacgccagataatgcatcacaggaagaactcatgattacattagtaacaggattggcgtccgttacatctagaacttctatgggcatcattattgttggaggagtgatttggaaaactataggctggaaactcctatctgtttcattaactatgtatggagctttgtatctttatgaaagactgagctggaccacccatgccaaggagcgagcctttaaacagcagtttgtaaactatgcaactgaaaaactgaggatgattgttagctccacgagtgcaaactgcagtcaccaagtaaaacaacaaatagctaccacttttgctcgcctgtgccaacaagttgatattactcaaaaacagctggaagaagaaattgctagattacccaaagaaatagatcagttggagaaaatacaaaacaattcaaagctcttaagaaataaagctgttcaacttgaaaatgagctggagaattttactaagcagtttctaccttcaagcaatgaagaatcctaacaatagagattgctttggtgaccatgataggaggaaacgaaacttgtaagattggaacagttgttatttttatgaaattactttaaatatgaattgtactaactgtacctaaatagcaaagccctgtgtagattctggtaatgatctgtctcagggtatgtgtatttttgaagagtgttatgtccttagttttaattttgagtaaagaaaaggctaaaatcatgaattagttacaagcaacagtaccaacttatgtgacccctgaggggtggggctgtgagctcttaatttgtttttgattctgaaaaactctgcttcctggcatccaggagttagagattgagcctttcatcttctttctcaaaactagtttttgatgctttctttcatgggaatagtcacttttttatttagtaaatcgcattgctggaaccaccaaggagtgtggaatgtccttgagtgtattatttatgcaagtcacagtcacgttgccatcatggcagctatgtgaaacactaataaatgtgtttttactttttattcccgttaaaactgatgtaaaacaggataaaggcttgttatagtcacttataagtatctgggtctaagtaatttccttagatgtttctaaagaaacattttcagctttgctcccattatgattccaataaggaacgctttcctagtgcaattttaggagtaaagtttgaagagataaaaatagccaaagataggagacgtctgaattttgaatgataaacagtgatgcggcaagccatgctgccggcatctgaccacgaatgattagtacagatatatt

SEQ ID NO: 452339 - DNA, 733 bp, Homo sapiens
cacagaacccagaaaaacaactcattcgctttcatttcctcactgactataaaagaatagagaaggaagggcttcagtgaccggctgcctggctgacttacagcagtcagactctgacaggatcatggctatgatggaggtccaggggggacccagcctgggacagacctgcgtgctgatcgtgatcttcacagtgctcctgcagtctctctgtgtggctgtaacttacgtgtactttaccaacgagctgaagcagatgcaggacaagtactccaaaagtggcattgcttgtttcttaaaagaagatgacagttattgggaccccaatgacgaagagagtatgaacagcccctgctggcaagtcaagtggcaactccgtcagctcgttagaaagatgattttgagaacctctgaggaaaccatttctacagttcaagaaaagcaacaaaatatttctcccctagtgagagaaagaggtcctcagagagtagcagctcacataactgggaccagaggaagaagcaacacattgtcttctccaaactccaagaatgaaaaggctctgggccgcaaaataaactcctgggaatcatcaaggagtgggcattcattcctgagcaacttgcacttgaggaatggtgaactggtcatccatgaaaaagggttttactacatctattcccaaacatactttcgatttcaggaggaaataaaagaaaacacaaagaacgac

SEQ ID NO: 452340 - DNA, 410 bp, Homo sapiens
ttagacagagtttcacgtttgttgcccaggctggagtgcaatggcaccatctcggctcactgcaacctccgcctccagtcaggagaatcgtttgaacccgggaggcagaggttgcagtgtggtgagatcatgccactacactccagcctggcgacagagcgagacttggtttcaaaaaaaaaaaaaaaaaaaacttcagtaagtacgtgttatttttttcaataaaattctattacagtatgtcatgtttgctgtagtgctcatatttattgttgtttttgttttagtactcacttgtttcataatatcaagattactaaaaatgggggaaaggacttctaatctttttttcataatatctttgacacatattacagaagaaataaatttcttacttttaatttaatatg

SEQ ID NO: 452341 - DNA, 672 bp, Homo sapiens
ttttgtatttttagtagagatggggtttcaccgtgttagccaggatagtctcaatctcctgaccatctgtttgttggtaccactctgtttatttctgtatgtaattcaaggtggaaatttgccaatacgtagttatttgcacaatttaactcagcaggattattacacagctacagctatttctttatttatatttttggaaaagggatagaatcttcactttgttgtatcttcactttgtttctctttggaccctacccgtgagacactaataaattataatccatgttactgcttattctttccgtgtaaagtacttttcaagttgatcataagctgagcaggagaatcgtttgaacccgggaggcagaggttgcagtgtggtgagatcatgccactacactccagcctggcgacagagcgagacttggtttcaaaaaaaaaaaaaaaaaaaacttcagtaagtacgtgttatttttttcaataaaattctattacagtatgtcatgtttgctgtagtgctcatatttattgttgtttttgttttagtactcacttgtttcataatatcaagattactaaaaatgggggaaaggacttctaatctttttttcataatatctttgacacatattacagaagaaataaatttcttacttttaatttaatatg

SEQ ID NO: 452342 - DNA, 708 bp, Homo sapiens
cacagaacccagaaaaacaactcattcgctttcatttcctcactgactataaaagaatagagaaggaagggcttcagtgaccggctgcctggctgacttacagcagtcagactctgacaggatcatggctatgatggaggtccaggggggacccagcctgggacagacctgcgtgctgatcgtgatcttcacagtgctcctgcagtctctctgtgtggctgtaacttacgtgtactttaccaacgagctgaagcagaaaagcaacaaaatatttctcccctagtgagagaaagaggtcctcagagagtagcagctcacataactgggaccagaggaagaagcaacacattgtcttctccaaactccaaaaaaaaaaaaaaaaaaaaaaaaacctgtgtgtggggcgcgccctgggccctgggaaaaagttttttaaaaccccaatgtggttgtggggcgcgcgggggcccccagtggggttaggggacccggggcccaaaaacgggtcgccagaagaagagactccggcgccaaaagacaataggggcggggggagtcccctcccccatattaaaaaagccgcgcggggggaacccccggagcgcggttcggagaaccaaatccccaaaggggaggtccgaaggggcccatagcggggctctcttcacgggggaggcccaagggaggagccggatttttaaaataagg

SEQ ID NO: 452343 - DNA, 1606 bp, Homo sapiens
  misc_feature (1504)..(1504): n is a, c, g, or t
cacagaacccagaaaaacaactcattcgctttcatttcctcactgactataaaagaatagagaaggaagggcttcagtgaccggctgcctggctgacttacagcagtcagactctgacaggatcatggctatgatggaggtccaggggggacccagcctgggacagacctgcgtgctgatcgtgatcttcacagtgctcctgcagtctctctgtgtggctgtaacttacgtgtactttaccaacgagctgaagcagatgcaggacaagtactccaaaagtggcattgcttgtttcttaaaagaagatgacagttattgggaccccaatgacgaagagagtatgaacagcccctgctggcaagtcaagtggcaactccgtcagctcgttagaaagatgattttgagaacctctgaggaaaccatttctacagttcaagaaaagcaacaaaatatttctcccctagtgagagaaagaggtcctcagagagtagcagctcacataactgggaccagaggaagaagcaacacattgtcttctccaaactccaagaatgaaaaggctctgggccgcaaaataaactcctgggaatcatcaaggagtgggcattcattcctgagcaacttgcacttgaggaatggtgaactggtcatccatgaaaaagggttttactacatctattcccaaacatactttcgatttcaggaggaaataaaagaaaacacaaagaacgacaaacaaatggtccaatatatttacaaatacacaagttatcctgaccctatattgttgatgaaaagtgctagaaatagttgttggtctaaagatgcagaatatggactctattccatctatcaagggggaatatttgagcttaaggaaaatgacagaatttttgtttctgtaacaaatgagcacttgatagacatggaccatgaagccagttttttcggggcctttttagttggctaactgacctggaaagaaaaagcaataacctcaaagtgactattcagttttcaggatgatacactatgaagatgtttcaaaaaatctgaccaaaacaaacaaacagaaaacagaaaacaaaaaaacctctatgcaatctgagtagagcagccacaaccaaaaaattctacaacacacactgttctgaaagtgactcacttatcccaagagaatgaaattgctgaaagatctttcaggactctacctcatatcagtttgctagcagaaatctagaagactgtcagcttccaaacattaatgcaatggttaacatcttctgtctttataatctactccttgtaaagactgtagaagaaagcgcaacaatccatctctcaagtagtgtatcacagtagtagcctccaggtttccttaagggacaacatccttaagtcaaaagagagaagaggcaccactaaaagatcgcagggagccacggcacccagcctttctctcttaggattacttcttccatccctcggcacttctctgcttggntcgccatcaaatctcccttctctttaagggttctaaatcatttactatccctatgaatcactaggtgctcctagggccatttacattaaattaaaccacagg

SEQ ID NO: 452344 - DNA, 1910 bp, Homo sapiens
cacagaacccagaaaaacaactcattcgctttcatttcctcactgactataaaagaatagagaaggaagggcttcagtgaccggctgcctggctgacttacagcagtcagactctgacaggatcatggctatgatggaggtccaggggggacccagcctgggacagacctgcgtgctgatcgtgatcttcacagtgctcctgcagtctctctgtgtggctgtaacttacgtgtactttaccaacgagctgaagcagatgcaggacaagtactccaaaagtggcattgcttgtttcttaaaagaagatgacagttattgggaccccaatgacgaagagagtatgaacagcccctgctggcaagtcaagtggcaactccgtcagctcgttagaaagaaaagcaacaaaatatttctcccctagtgagagaaagaggtcctcagagagtagcagctcacataactgggaccagaggaagaagcaacacattgtcttctccaaactccaagaatgaaaaggctctgggccgcaaaataaactcctgggaatcatcaaggagtgggcattcattcctgagcaacttgcacttgaggaatggtgaactggtcatccatgaaaaagggttttactacatctattcccaaacatactttcgatttcaggaggaaataaaagaaaacacaaagaacgacaaacaaatggtccaatatatttacaaatacacaagttatcctgaccctatattgttgatgaaaagtgctagaaatagttgttggtctaaagatgcagaatatggactctattccatctatcaagggggaatatttgagcttaaggaaaatgacagaatttttgtttctgtaacaaatgagcacttgatagacatggaccatgaagccagttttttcggggcctttttagttggctaactgacctggaaagaaaaagcaataacctcaaagtgactattcagttttcaggatgatacactatgaagatgtttcaaaaaatctgaccaaaacaaacaaacagaaaacagaaaacaaaaaaacctctatgcaatctgagtagagcagccacaaccaaaaaattctacaacacacactgttctgaaagtgactcacttatcccaagagaatgaaattgctgaaagatctttcaggactctacctcatatcagtttgctagcagaaatctagaagactgtcagcttccaaacattaatgcaatggttaacatcttctgtctttataatctactccttgtaaagactgtagaagaaagcgcaacaatccatctctcaagtagtgtatcacagtagtagcctccaggtttccttaagggacaacatccttaagtcaaaagagagaagaggcaccactaaaagatcgcagtttgcctggtgcagtggctcacacctgtaatcccaacattttgggaacccaaggtgggtagatcacgagatcaagagatcaagaccatagtgaccaacatagtgaaaccccatctctactgaaagtgcaaaaattagctgggtgtgttggcacatgcctgtagtcccagctacttgagaggctgaggcaggagaatcgtttgaacccgggaggcagaggttgcagtgtggtgagatcatgccactacactccagcctggcgacagagcgagacttggtttcaaaaaaaaaaaaaaaaaaaacttcagtaagtacgtgttatttttttcaataaaattctattacagtatgtcatgtttgctgtagtgctcatatttattgttgtttttgttttagtactcacttgtttcataatatcaagattactaaaaatgggggaaaggacttctaatctttttttcataatatctttgacacatattacagaagaaataaatttcttacttttaatttaatatg

SEQ ID NO: 452345 - DNA, 2021 bp, Homo sapiens
ttttgtatttttagtagagatggggtttcaccgtgttagccaggatagtctcaatctcctgaccatctgtttgttggtaccactctgtttatttctgtatgtaattcaaggtggaaatttgccaatacgtagttatttgcacaatttaactcagcaggattattacacagctacagctatttctttatttatatttttggaaaagggatagaatcttcactttgttgtatcttcactttgtttctctttggaccctacccgtgagacactaataaattataatccatgttactgcttattctttccgtgtaaagtacttttcaagttgatcataagctgaggtaggttgatcataatatcaaaatgttatttttatgaaaactcatagaatcaactttggaagcccagtatgcttacaatggctgattgacaacacctatgaagagcaaggtattggagaactagtttggcaagtgttgatgaccctttatcatttctcttttagaaaagcaacaaaatatttctcccctagtgagagaaagaggtcctcagagagtagcagctcacataactgggaccagaggaagaagcaacacattgtcttctccaaactccaagaatgaaaaggctctgggccgcaaaataaactcctgggaatcatcaaggagtgggcattcattcctgagcaacttgcacttgaggaatggtgaactggtcatccatgaaaaagggttttactacatctattcccaaacatactttcgatttcaggaggaaataaaagaaaacacaaagaacgacaaacaaatggtccaatatatttacaaatacacaagttatcctgaccctatattgttgatgaaaagtgctagaaatagttgttggtctaaagatgcagaatatggactctattccatctatcaagggggaatatttgagcttaaggaaaatgacagaatttttgtttctgtaacaaatgagcacttgatagacatggaccatgaagccagttttttcggggcctttttagttggctaactgacctggaaagaaaaagcaataacctcaaagtgactattcagttttcaggatgatacactatgaagatgtttcaaaaaatctgaccaaaacaaacaaacagaaaacagaaaacaaaaaaacctctatgcaatctgagtagagcagccacaaccaaaaaattctacaacacacactgttctgaaagtgactcacttatcccaagagaatgaaattgctgaaagatctttcaggactctacctcatatcagtttgctagcagaaatctagaagactgtcagcttccaaacattaatgcaatggttaacatcttctgtctttataatctactccttgtaaagactgtagaagaaagcgcaacaatccatctctcaagtagtgtatcacagtagtagcctccaggtttccttaagggacaacatccttaagtcaaaagagagaagaggcaccactaaaagatcgcagtttgcctggtgcagtggctcacacctgtaatcccaacattttgggaacccaaggtgggtagatcacgagatcaagagatcaagaccatagtgaccaacatagtgaaaccccatctctactgaaagtgcaaaaattagctgggtgtgttggcacatgcctgtagtcccagctacttgagaggctgaggcaggagaatcgtttgaacccgggaggcagaggttgcagtgtggtgagatcatgccactacactccagcctggcgacagagcgagacttggtttcaaaaaaaaaaaaaaaaaaaacttcagtaagtacgtgttatttttttcaataaaattctattacagtatgtcatgtttgctgtagtgctcatatttattgttgtttttgttttagtactcacttgtttcataatatcaagattactaaaaatgggggaaaggacttctaatctttttttcataatatctttgacacatattacagaagaaataaatttcttacttttaatttaatatg

SEQ ID NO: 452346 - DNA, 1805 bp, Homo sapiens
cacagaacccagaaaaacaactcattcgctttcatttcctcactgactataaaagaatagagaaggaagggcttcagtgaccggctgcctggctgacttacagcagtcagactctgacaggatcatggctatgatggaggtccaggggggacccagcctgggacagacctgcgtgctgatcgtgatcttcacagtgctcctgcagtctctctgtgtggctgtaacttacgtgtactttaccaacgagctgaagcagatgcaggacaagtactccaaaagtggcattgcttgtttcttaaaagaagatgacagttattgggaccccaatgacgaagagagtatgaacagcccctgctggcaagtcaagtggcaactccgtcagctcgttagaaagactccaagaatgaaaaggctctgggccgcaaaataaactcctgggaatcatcaaggagtgggcattcattcctgagcaacttgcacttgaggaatggtgaactggtcatccatgaaaaagggttttactacatctattcccaaacatactttcgatttcaggaggaaataaaagaaaacacaaagaacgacaaacaaatggtccaatatatttacaaatacacaagttatcctgaccctatattgttgatgaaaagtgctagaaatagttgttggtctaaagatgcagaatatggactctattccatctatcaagggggaatatttgagcttaaggaaaatgacagaatttttgtttctgtaacaaatgagcacttgatagacatggaccatgaagccagttttttcggggcctttttagttggctaactgacctggaaagaaaaagcaataacctcaaagtgactattcagttttcaggatgatacactatgaagatgtttcaaaaaatctgaccaaaacaaacaaacagaaaacagaaaacaaaaaaacctctatgcaatctgagtagagcagccacaaccaaaaaattctacaacacacactgttctgaaagtgactcacttatcccaagagaatgaaattgctgaaagatctttcaggactctacctcatatcagtttgctagcagaaatctagaagactgtcagcttccaaacattaatgcaatggttaacatcttctgtctttataatctactccttgtaaagactgtagaagaaagcgcaacaatccatctctcaagtagtgtatcacagtagtagcctccaggtttccttaagggacaacatccttaagtcaaaagagagaagaggcaccactaaaagatcgcagtttgcctggtgcagtggctcacacctgtaatcccaacattttgggaacccaaggtgggtagatcacgagatcaagagatcaagaccatagtgaccaacatagtgaaaccccatctctactgaaagtgcaaaaattagctgggtgtgttggcacatgcctgtagtcccagctacttgagaggctgaggcaggagaatcgtttgaacccgggaggcagaggttgcagtgtggtgagatcatgccactacactccagcctggcgacagagcgagacttggtttcaaaaaaaaaaaaaaaaaaaacttcagtaagtacgtgttatttttttcaataaaattctattacagtatgtcatgtttgctgtagtgctcatatttattgttgtttttgttttagtactcacttgtttcataatatcaagattactaaaaatgggggaaaggacttctaatctttttttcataatatctttgacacatattacagaagaaataaatttcttacttttaatttaatatg

SEQ ID NO: 452347 - DNA, 1074 bp, Homo sapiens
ctttatatagattatattcagggaaggcataacgattctaaacaacgacgctgtattctaaattcctgtactgttacaaagatccctatagtaggcgctcaacaactgtcgacgctttcacatttacccagccgccagagagggcttgtcttgagtgtgtctgaggatgcagcacccaaagggaaaaaccactacatgagattgcggtgtttcaaacaccgcaatctgagtagagcagccacaaccaaaaaattctacaacacacactgttctgaaagtgactcacttatcccaagagaatgaaattgctgaaagatctttcaggactctacctcatatcagtttgctagcagaaatctagaagactgtcagcttccaaacattaatgcaatggttaacatcttctgtctttataatctactccttgtaaagactgtagaagaaagcgcaacaatccatctctcaagtagtgtatcacagtagtagcctccaggtttccttaagggacaacatccttaagtcaaaagagagaagaggcaccactaaaagatcgcagtttgcctggtgcagtggctcacacctgtaatcccaacattttgggaacccaaggtgggtagatcacgagatcaagagatcaagaccatagtgaccaacatagtgaaaccccatctctactgaaagtgcaaaaattagctgggtgtgttggcacatgcctgtagtcccagctacttgagaggctgaggcaggagaatcgtttgaacccgggaggcagaggttgcagtgtggtgagatcatgccactacactccagcctggcgacagagcgagacttggtttcaaaaaaaaaaaaaaaaaaaacttcagtaagtacgtgttatttttttcaataaaattctattacagtatgtcatgtttgctgtagtgctcatatttattgttgtttttgttttagtactcacttgtttcataatatcaagattactaaaaatgggggaaaggacttctaatctttttttcataatatctttgacacatattacagaagaaataaatttcttacttttaatttaatatg

SEQ ID NO: 452348 - DNA, 873 bp, Homo sapiens
cacagaacccagaaaaacaactcattcgctttcatttcctcactgactataaaagaatagagaaggaagggcttcagtgaccggctgcctggctgacttacagcagtcagactctgacaggatcatggctatgatggaggtccaggggggacccagcctgggacagacctgcgtgctgatcgtgatcttcacagtgctcctgcagtctctctgtgtggctgtaacttacgtgtactttaccaacgagctgaagcagatgcaggacaagtactccaaaagtggcattgcttgtttcttaaaagaagatgacagttattgggaccccaatgacgaagagagtatgaacagcccctgctggcaagtcaagtggcaactccgtcagctcgttagaaagatgattttgagaacctctgaggaaaccatttctacagttcaagaaaagcaacaaaatatttctcccctagtgagagaaagaggtcctcagagagtagcagctcacataactgggaccagaggaagaagcaacacattgtcttctccaacaggagaatcgtttgaacccgggaggcagaggttgcagtgtggtgagatcatgccactacactccagcctggcgacagagcgagacttggtttcaaaaaaaaaaaaaaaaaaaacttcagtaagtacgtgttatttttttcaataaaattctattacagtatgtcatgtttgctgtagtgctcatatttattgttgtttttgttttagtactcacttgtttcataatatcaagattactaaaaatgggggaaaggacttctaatctttttttcataatatctttgacacatattacagaagaaataaatttcttacttttaatttaatatg

SEQ ID NO: 452349 - DNA, 1405 bp, Homo sapiens
cacagaacccagaaaaacaactcattcgctttcatttcctcactgactataaaagaatagagaaggaagggcttcagtgaccggctgcctggctgacttacagcagtcagactctgacaggatcatggctatgatggaggtccaggggggacccagcctgggacagacctgcgtgctgatcgtgatcttcacagtgctcctgcagtctctctgtgtggctgtaacttacgtgtactttaccaacgagctgaagcagatgcaggacaagtactccaaaagtggcattgcttgtttcttaaaagaagatgacagttattgggaccccaatgacgaagagagtatgaacagcccctgctggcaagtcaagtggcaactccgtcagctcgttagaaaggtaggtaacctcaccaggtgacctcaccagcaggcggagaaggccagaagaattccttaaagcaaaggaatctttaagataatcaagtctagactcttcattttacaaataagaaaacttaggcccagagtatttaagtaattttccccaaattcatagaactaggaaaatggggcatagcagcaaagggcaggacctggccgactcctggtctagagttcattcctctgccccggacagcctccacatctagtctaaccttttgatctcacattatggaaactgaggcacacacagggtaatgaagagaaggtcacaaagtcataaagaatgtgtggcattgtttttcattcaaaagataaagaagatcaaataatgatattttatattcttcccacattgctgatgtctggaattaaatatttatttttgtatgcatatagagataaagaaagaggaaaataagaggaaagaaagaggaaaggaagggaagggaagaaagagatactttgagaaattgaaggtggttttttcttaatttacagccaataaataacaaattacaaaaagtatctgtttatggaagttgcttaaacaggacctccagcagagacatgttagttaacagtttattttactaaatgtggcagagtgacagatctaatcaagtttcttctcttaggctcttccttctttataagatggcattaaataatatttgcagccgggtgtagtggctcacgcctgtaatcccagcactttgggaggctgaggcaggcggatcacctgaggtcaggagttgaagaccagcctggccaacatggtgaaaccctgtgtctactaaaaatacaaaaattagcaaagtgtggtggtgtgtgcctgtactcccagctacttgggaggctgagacaggagaactgcttgaacctaagaggcagaagttgcagtgagctgagatcatgccactgcactctagcctgggcaacagagcaagactctatctcaaaaacc

SEQ ID NO: 452350 - DNA, 1083 bp, Homo sapiens
cgactactactactaaattcgcggccgcgtcgatggcaagtcaagtggcaactccgtcagctcgttagaaaggtaggtaacctcaccaggtgacctcaccagcaggcggagaaggccagaagaattccttaaagcaaaggaatctttaagataatcaagtctagactcttcattttacaaataagaaaacttaggcccagagtatttaagtaattttccccaaattcatagaactaggaaaatggggcatagcagcaaagggcaggacctggccgactcctggtctagagttcattcctctgccccggacagcctccacatctagtctaaccttttgatctcacattatggaaactgaggcacacacagggtaatgaagagaaggtcacaaagtcataaagaatgtgtggcattgtttttcattcaaaagataaagaagatcaaataatgatattttatattcttcccacattgctgatgtctggaattaaatatttatttttgtatgcatatagagataaagaaagaggaaaataagaggaaagaaagaggaaaggaagggaagggaagaaagagatactttgagaaattgaaggtggttttttcttaatttacagccaataaataacaaattacaaaaagtatctgtttatggaagttgcttaaacaggacctccagcagagacatgttagttaacagtttattttactaaatgtggcagagtgacagatctaatcaagtttcttctcttaggctcttccttctttataagatggcattaaataatatttgcagccgggtgtagtggctcacgcctgtaatcccagcactttgggaggctgaggcaggcggatcacctgaggtcaggagttgaagaccagcctggccaacatggtgaaaccctgtgtctactaaaaatacaaaaattagcaaagtgtggtggtgtgtgcctgtactcccagctacttgggaggctgagacaggagaactgcttgaacctaagaggcagaagttgcagtgagctgagatcatgccactgcactctagcctgggcaacagagcaagactctatctcaaaaacc

SEQ ID NO: 452351 - DNA, 1017 bp, Homo sapiens
cacagaacccagaaaaacaactcattcgctttcatttcctcactgactataaaagaatagagaaggaagggcttcagtgaccggctgcctggctgacttacagcagtcagactctgacaggatcatggctatgatggaggtccaggggggacccagcctgggacagacctgcgtgctgatcgtgatcttcacagtgctcctgcagtctctctgtgtggctgtaacttacgtgtactttaccaacgagctgaagcagatgcaggacaagtactccaaaagtggcattgcttgtttcttaaaagaagatgacagttattgggaccccaatgacgaagagagtatgaacagcccctgctggcaagtcaagtggcaactccgtcagctcgttagaaaggtaggtaacctcaccaggtgacctcaccagcaggcggagaaggccagaagaattccttaaagcaaaggaatctttaagataatcaagtctagactcttcattttacaaataagaaaacttaggcccagagtatttaagtaattttccccaaattcatagaactaggaaaatggggcatagcagcaaagggcaggacctggccgactcctggtctagagttcattcctctgccccggacagcctccacatctagtctaaccttttgatctcacattatggaaactgaggcacacaggagaatcgtttgaacccgggaggcagaggttgcagtgtggtgagatcatgccactacactccagcctggcgacagagcgagacttggtttcaaaaaaaaaaaaaaaaaaaacttcagtaagtacgtgttatttttttcaataaaattctattacagtatgtcatgtttgctgtagtgctcatatttattgttgtttttgttttagtactcacttgtttcataatatcaagattactaaaaatgggggaaaggacttctaatctttttttcataatatctttgacacatattacagaagaaataaatttcttacttttaatttaatatg

SEQ ID NO: 452352 - DNA, 546 bp, Homo sapiens
tgtggcataagcagctgacaaggtataaaaagacaagggactcccaacagttcccaatgtcacaatgatgcaggaacctcccaatttctatgtgactagaatttataatccacattaagattgaaggaggaagaagtttgatattagattgaaatccctggcaagcccaacaaaaatataggctggccacagctgcaaaaaagctccttgctttgctacaaattcccttctgttaacgctctttctctctaaatttcctacagactccaagaatgaaaaggctctgggccgcaaaataaactcctgggaatcatcaaggagtgggcattcattcctgagcaacttgcacttgaggaatggtgaactggtcatccatgaaaaagggttttactacatctattcccaaacatactttcgatttcaggaggaaataaaagaaaacacaaagaacgacaaacaaatggtccaatatatttacaaatacacaagttatcctgaccctatattgttgatgaaaagtgctagaaatagttgttggtctaaaga

SEQ ID NO: 452353 - DNA, 1953 bp, Homo sapiens
cacagaacccagaaaaacaactcattcgctttcatttcctcactgactataaaagaatagagaaggaagggcttcagtgaccggctgcctggctgacttacagcagtcagactctgacaggatcatggctatgatggaggtccaggggggacccagcctgggacagacctgcgtgctgatcgtgatcttcacagtgctcctgcagtctctctgtgtggctgtaacttacgtgtactttaccaacgagctgaagcagatgcaggacaagtactccaaaagtggcattgcttgtttcttaaaagaagatgacagttattgggaccccaatgacgaagagagtatgaacagcccctgctggcaagtcaagtggcaactccgtcagctcgttagaaagatgattttgagaacctctgaggaaaccatttctacagttcaagaaaagcaacaaaatatttctcccctagtgagagaaagaggtcctcagagagtagcagctcacataactgggaccagaggaagaagcaacacattgtcttctccaaactccaagaatgaaaaggctctgggccgcaaaataaactcctgggaatcatcaaggagtgggcattcattcctgagcaacttgcacttgaggaatggtgaactggtcatccatgaaaaagggttttactacatctattcccaaacatactttcgatttcaggaggaaataaaagaaaacacaaagaacgacaaacaaatggtccaatatatttacaaatacacaagttatcctgaccctatattgttgatgaaaagtgctagaaatagttgttggtctaaagatgcagaatatggactctattccatctatcaagggggaatatttgagcttaaggaaaatgacagaatttttgtttctgtaacaaatgagcacttgatagacatggaccatgaagccagttttttcggggcctttttagttggctaactgacctggaaagaaaaagcaataacctcaaagtgactattcagttttcaggatgatacactatgaagatgtttcaaaaaatctgaccaaaacaaacaaacagaaaacagaaaacaaaaaaacctctatgcaatctgagtagagcagccacaaccaaaaaattctacaacacacactgttctgaaagtgactcacttatcccaagagaatgaaattgctgaaagatctttcaggactctacctcatatcagtttgctagcagaaatctagaagactgtcagcttccaaacattaatgcaatggttaacatcttctgtctttataatctactccttgtaaagactgtagaagaaagcgcaacaatccatctctcaagtagtgtatcacagtagtagcctccaggtttccttaagggacaacatccttaagtcaaaagagagaagaggcaccactaaaagatcgcagtttgcctggtgcagtggctcacacctgtaatcccaacattttgggaacccaaggtgggtagatcacgagatcaagagatcaagaccatagtgaccaacatagtgaaaccccatctctactgaaagtgcaaaaattagctgggtgtgttggcacatgcctgtagtcccagctacttgagaggctgaggcaggagaatcgtttgaacccgggaggcagaggttgcagtgtggtgagatcatgccactacactccagcctggcgacagagcgagacttggtttcaaaaaaaaaaaaaaaaaaaacttcagtaagtacgtgttatttttttcaataaaattctattacagtatgtcatgtttgctgtagtgctcatatttattgttgtttttgttttagtactcacttgtttcataatatcaagattactaaaaatgggggaaaggacttctaatctttttttcataatatctttgacacatattacagaagaaataaatttcttacttttaatttaatatg

SEQ ID NO: 452354 - DNA, 1084 bp, Homo sapiens
cacagaacccagaaaaacaactcattcgctttcatttcctcactgactataaaagaatagagaaggaagggcttcagtgaccggctgcctggctgacttacagcagtcagactctgacaggatcatggctatgatggaggtccaggggggacccagcctgggacagacctgcgtgctgatcgtgatcttcacagtgctcctgcagtctctctgtgtggctgtaacttacgtgtactttaccaacgagctgaagcagatgcaggacaagtactccaaaagtggcattgcttgtttcttaaaagaagatgacagttattgggaccccaatgacgaagagagtatgaacagcccctgctggcaagtcaagtggcaactccgtcagctcgttagaaagatgattttgagaacctctgaggaaaccatttctacagttcaagaaaagcaacaaaatatttctcccctagtgagagaaagaggtcctcagagagtagcagctcacataactgggaccagaggaagaagcaacacattgtcttctccaaactccaagaatgaaaaggctctgggccgcaaaataaactcctgggaatcatcaaggagtgggcattcattcctgagcaacttgcacttgaggaatggtgaactggtcatccatgaaaaagggttttactacatctattcccaaacatactttcgatttcaggaggaaataaaagaaaacacaaagaacgacaaacaaatggtccaatatatttacaaatacacaagttatcctgaccctatattgttgatgaaaagtgctagaaatagttgttggtctaaagatgcagaatatggactctattccatctatcaagggggaatatttgagcttaaggaaaatgacagaatttttgtttctgtaacaaatgagcacttgatagacatggaccatgaagccagttttttcggggcctttttagttggctaactgaacctcggttaatgaagatgcaaagatcgctttctgtgattattccgtcggccgagatgatacattacatgcatgctgctctgactttagagcataccaccttaccagcga

SEQ ID NO: 452355 - DNA, 785 bp, Homo sapiens
ggacgcgtgggtcgggggcgctgtgccaggcggcggccgtgcggggcgggcgcgctgctccttccgcctcgcggaccccggaagcgcgcgtggccgccatggcgcggaatgtggtgtaccccctgtaccggctgggtggcccacaacttcgggtgttccgaaccaacttcttcattcagctggtgcggcccggtgtggcccagcccgaggacaccgtgcagttccggatccccatggaaatgacaagggtggacctcaggaattacctcgagggcatctataacgtgcccgtggctgctgtgcggacacgggtgcagcatggctctaacaagagaagagatcacagaaacgtgaggatcaagaagccggactacaaggtcgcctacgtgcagctggcccatggacagaccttcacgttcccagatctgtttcccgagaaagacgagagccctgaaggcagcgctgccgacgacctctacagcatgctcgaggaggagaggcagcagaggcagagcagcgacccgcggcggggcggcgtccccagctggttcgggctgtgacggggtggccagcagggacgcgccccaggtgggcagctgtggcagagcagcgacccgcggcggggcggcatccccagctggttcgggccgtgacggggcggccagcagggacgcgccccaggtgggcagctgtggcagagcagtcccgacacctaaataaaagtcttgctgcaggagaaagaaaaaaaataaaaatcataataaattcttattaaatcaaataaa

SEQ ID NO: 452356 - DNA, 686 bp, Homo sapiens
gtgacgcgtgggcgaccacgcgtccggaccacgcgtccgggaggctctgctggggtagggtaccccctgtaccggctgggtggcccacaacttcgggtgttccgaaccaacttcttcattcagctggtgcggcccggtgtggcccagcccgaggacaccgtgcagttccggatccccatggaaatgacaagggtggacctcaggaattacctcgagggcatctataacgtgcccgtggctgctgtgcggacacgggtgcagcatggctctaacaagagaagagatcacagaaacgtgaggatcaagaagccggactacaaggtcgcctacgtgcagctggcccatggacagaccttcacgttcccagatctgtttcccgagaaagacgagagccctgaaggcagcgctgccgacgacctctacagcatgctcgaggaggagaggcagcagaggcagagcagcgacccgcggcggggcggcgtccccagctggttcgggctgtgacggggtggccagcagggacgcgccccaggtgggcagctgtggcagagcagcgacccgcggcggggcggcatccccagctggttcgggccgtgacggggcggccagcagggacgcgccccaggtgggcagctgtggcagagcagtcccgacacctaaataaaagtcttgctgcaggagaaaga

SEQ ID NO: 452357 - DNA, 913 bp, Homo sapiens
ggacgcgtgggtcgggggcgctgtgccaggcggcggccgtgcggggcgggcgcgctgctccttccgcctcgcggaccccggaagcgcgcgtggccgccatggcgcggaatgtggtgtaccccctgtaccggctgggtggcccacaacttcgggtgttccgaaccaacttcttcattcagctggtgcggcccggtgtggcccagcccgaggacaccgtgcagttccggatccccatggaaatgacaagggtggacctcaggaattacctcgagggcatctataacgtgcccgtggctgctgtgcggacacgggtgcagcatggctctaacaagagaagagatcacagaaacgtgaggatcaagaagccggactacaaggtcgcctacgtgcagctggtccccaaggagcagtatcccctccttctcgtgaacccgagccacatgctgtggcctgggctggggcttggctgacacggacatattctgaactctcagcagaagatgtaagaccagttaattggcagagccggtcctgatttatcagctgccgcacgtgcatgtttcttcgcccatggacagaccttcacgttcccagatctgtttcccgagaaagacgagagccctgaaggcagcgctgccgacgacctctacagcatgctcgaggaggagaggcagcagaggcagagcagcgacccgcggcggggcggcgtccccagctggttcgggctgtgacggggtggccagcagggacgcgccccaggtgggcagctgtggcagagcagcgacccgcggcggggcggcatccccagctggttcgggccgtgacggggcggccagcagggacgcgccccaggtgggcagctgtggcagagcagtcccgacacctaaataaaagtcttgctgcaggagaaaga

SEQ ID NO: 452358 - DNA, 1387 bp, Homo sapiens
ggacgcgtgggtcgggggcgctgtgccaggcggcggccgtgcggggcgggcgcgctgctccttccgcctcgcggaccccggaagcgcgcgtggccgccatggcgcggaatgtggtgtaccccctgtaccggctgggtggcccacaacttcgggtgttccgaaccaacttcttcattcagctggtgcggcccggtgtggcccagcccgaggacaccgtgcagttccggatccccatggaaatgacaagggtggacctcaggaattacctcgagggcatctataacgtgcccgtggctgctgtgcggacacgggtgcagcatggctctaacaagagaagagatcacagaaacgtgaggatcaagaagccggactacaaggtcgcctacgtgcagctggtccccaaggagcagtatcccctccttctcgtgaacccgagccacatgctgtggcctgggctggggcttggctgacacggacatattctgaactctcagcagaagatgtaagaccagttaattggcagagccggtcctgatttatcagctgccgcacgtgcatgtttcttcgtacgtgatgttcactttaattgccaggctctgggctgggaggagggggagctttaatgtgagtagagcctgaggcattttggatggacaggttcagcatggtaccagacgtgatttgtgtcatgtttttccatgccttgtttctgccccccaccaaccaggtggccccgtgctagtaaatgggtgcacccagggcgggggcagacaccaggccctaaagagacaatggtggggaaagcggccctgtcctggagctgtggcctctgctgcagcgtgacagccgggggccggtggccgtgggggtgcttacattccaggcagggacgctgccccaggaggcccagggaggtacctctgagcagttgaatccggcgccggcagaaaggggctgccagaaagcatgaggctcccccacagacccctctgctgaggagtctttgcagctctggctggagcctttgttctcccccttaggcccatggacagaccttcacgttcccagatctgtttcccgagaaagacgagagccctgaaggcagcgctgccgacgacctctacagcatgctcgaggaggagaggcagcagaggcagagcagcgacccgcggcggggcggcgtccccagctggttcgggctgtgacggggtggccagcagggacgcgccccaggtgggcagctgtggcagagcagcgacccgcggcggggcggcatccccagctggttcgggccgtgacggggcggccagcagggacgcgccccaggtgggcagctgtggcagagcagtcccgacacctaaataaaagtcttgctgcaggagaaaga

SEQ ID NO: 452359 - DNA, 1125 bp, Homo sapiens
tccagattcgggtgccatcctcactcctcctccctcttctcttccctctcctctggtctgctctttctgcctcttagctttggagcacttagtaatcattagcaagttaagatggcttcttgtatttgcttaggtccccaaggagcagtatcccctccttctcgtgaacccgagccacatgctgtggcctgggctggggcttggctgacacggacatattctgaactctcagcagaagatgtaagaccagttaattggcagagccggtcctgatttatcagctgccgcacgtgcatgtttcttcgtacgtgatgttcactttaattgccaggctctgggctgggaggagggggagctttaatgtgagtagagcctgaggcattttggatggacaggttcagcatggtaccagacgtgatttgtgtcatgtttttccatgccttgtttctgccccccaccaaccaggtggccccgtgctagtaaatgggtgcacccagggcgggggcagacaccaggccctaaagagacaatggtggggaaagcggccctgtcctggagctgtggcctctgctgcagcgtgacagccgggggccggtggccgtgggggtgcttacattccaggcagggacgctgccccaggaggcccagggaggtacctctgagcagttgaatccggcgccggcagaaaggggctgccagaaagcatgaggctcccccacagacccctctgctgaggagtctttgcagctctggctggagcctttgttctcccccttaggcccatggacagaccttcacgttcccagatctgtttcccgagaaagacgagagccctgaaggcagcgctgccgacgacctctacagcatgctcgaggaggagaggcagcagaggcagagcagcgacccgcggcggggcggcgtccccagctggttcgggctgtgacggggtggccagcagggacgcgccccaggtgggcagctgtggcagagcagcgacccgcggcggggcggcatccccagctggttcgggccgtgacggggcggccagcagggacgcgccccaggtgggcagctgtggcagagcagtcccgacacctaaataaaagtcttgctgcaggagaaaga

SEQ ID NO: 452360 - DNA, 833 bp, Homo sapiens
ggacgcgtgggtcgggggcgctgtgccaggcggcggccgtgcggggcgggcgcgctgctccttccgcctcgcggaccccggaagcgcgcgtggccgccatggcgcggaatgtggtgtaccccctgtaccggctgggtggcccacaacttcgggtgttccgaaccaacttcttcattcagctggtgcggcccggtgtggcccagcccgaggacaccgtgcagttccggatccccatggaaatgacaagggtggacctcaggaattacctcgagggcatctataacgtgcccgtggctgctgtgcggacacgggtgcagcatggctctaacaagagaagagatcacagaaacgtgaggatcaagaagccggactacaaggtcgcctacgtgcagctggcccatggacagaccttcacgttcccagatctgtttcccgagaaagacgagagccctgaaggcagcgctgctgtgcggacacgggtgcagcatggctctaacaagagaagagatcacagaaacgtgaggatcaagaagccggactacaaggtcgcctacgtgcagctggcccatggacagaccttcacgttcccagatctgtttcccgagcagcgacccgcggcggggcggcgtccccagctggttcgggctgtgacggggtggccagcagggacgcgccccaggtgggcagctgtggcagagcagcgacccgcggcggggcggcatccccagctggttcgggccgtgacggggcggccagcagggacgcgccccaggtgggcagctgtggcagagcagtcccgacacctaaataaaagtcttgctgcaggagaaaga

SEQ ID NO: 452361 - DNA, 742 bp, Homo sapiens
ggacgcgtgggtcgggggcgctgtgccaggcggcggccgtgcggggcgggcgcgctgctccttccgcctcgcggaccccggaagcgcgcgtggccgccatggcgcggaatgtggtgtaccccctgtaccggctgggtggcccacaacttcgggtgttccgaaccaacttcttcattcagctggtgcggcccggtgtggcccagcccgaggacaccgtgcagttccggatccccatggaaatgacaagggtggacctcaggaattacctcgagggcatctataacgtgcccgtggctgctgtgcggacacgggtgcagcatggctctaacaagagaagagatcacagaaacgtgaggatcaagaagccggactacaaggtcgcctacgtgcagctggcccatggacagaccttcacgttcccagatctgtttcccgagaaagacgagagccctgaaggcagcgctgccgacgacctctacagcatgctcgaggaggagaggcagcagaggcagagcagcgacccgcggcggggcggcgtccccagctggttcgggctgtgacggggtggccagcagggacgcgccccaggtgggcagctgtggcagagcagcgacccgcggcggggcggcatccccagctggttcgggccgtgacggggcggccagcagggacgcgccccaggtgggcagctgtggcagagcagtcccgacacctaaataaaagtcttgctgcaggagaaaga

SEQ ID NO: 452362 - DNA, 649 bp, Homo sapiens
ggacgcgtgggtcgggggcgctgtgccaggcggcggccgtgcggggcgggcgcgctgctccttccgcctcgcggaccccggaagcgcgcgtggccgccatggcgcggaatgtggtgtaccccctgtaccggctgggtggcccacaacttcgggtgttccgaaccaacttcttcattcagctggtgcggcccggtgtggcccagcccgaggacaccgtgcagttccggatccccatggaaatgacaagggtggacctcaggaattacctcgagggcatctataacgtgcccgtggctgctgtgcggacacgggtgcagcatggctctaacaagagaagagatcacagaaacgtgaggatcaagaagccggactacaaggtcgcctacgtgcagctggcccatggacagaccttcacgttcccagatctgtttcccgagaaagacgagagccctgaaggcagcgctgccgacgacctctacagcatgctcgaggaggagaggcagcagaggcagagcagcgacccgcggcggggcggcgtccccagctggttcgggctgtgacggggtggccagcagggacgcgccccaggtgggcagctgtggcagagcagtcccgacacctaaataaaagtcttgctgcaggagaaaga

SEQ ID NO: 452363 - DNA, 652 bp, Homo sapiens
gggtggcggaggagccccccgccaggtaccccctgtaccggctgggtggcccacaacttcgggtgttccgaaccaacttcttcattcagctggtgcggcccggtgtggcccagcccgaggacaccgtgcagttccggatccccatggaaatgacaagggtggacctcaggaattacctcgagggcatctataacgtgcccgtggctgctgtgcggacacgggtgcagcatggctctaacaagagaagagatcacagaaacgtgaggatcaagaagccggactacaaggtcgcctacgtgcagctggcccatggacagaccttcacgttcccagatctgtttcccgagaaagacgagagccctgaaggcagcgctgccgacgacctctacagcatgctcgaggaggagaggcagcagaggcagagcagcgacccgcggcggggcggcgtccccagctggttcgggctgtgacggggtggccagcagggacgcgccccaggtgggcagctgtggcagagcagcgacccgcggcggggcggcatccccagctggttcgggccgtgacggggcggccagcagggacgcgccccaggtgggcagctgtggcagagcagtcccgacacctaaataaaagtcttgctgcaggagaaaga

SEQ ID NO: 452364 - DNA, 587 bp, Homo sapiens
tccagattcgggtgccatcctcactcctcctccctcttctcttccctctcctctggtctgctctttctgcctcttagctttggagcacttagtaatcattagcaagttaagatggcttcttgtatttgcttaggtccccaaggagcagtatcccctccttctcgtgaacccgagccacatgctgtggcctgggctggggcttggctgacacggacatattctgaactctcagcagaagatgcccatggacagaccttcacgttcccagatctgtttcccgagaaagacgagagccctgaaggcagcgctgccgacgacctctacagcatgctcgaggaggagaggcagcagaggcagagcagcgacccgcggcggggcggcgtccccagctggttcgggctgtgacggggtggccagcagggacgcgccccaggtgggcagctgtggcagagcagcgacccgcggcggggcggcatccccagctggttcgggccgtgacggggcggccagcagggacgcgccccaggtgggcagctgtggcagagcagtcccgacacctaaataaaagtcttgctgcaggagaaaga

SEQ ID NO: 452365 - DNA, 510 bp, Homo sapiens
ccgcccaccactgttgggagtggacactcagggatccgcagtgttagctacccccttttctgcccaccctgttgtgagtggacactcggaggtctgcagggttggtgtgtcgggctgccttggcctaagtgtgtgacatggacccaatctcttctgtacaggtaccccctgtaccggctgggtggcccacaacttcgggtgttccgaaccaacttcttcattcagctggtgcggcccggtgtggcccagcccgaggacaccgtgcagttccggatccccatggagtgagtccgggaggattccggctggggttggggagcaccctcggggggatccccgtggagtgagcccggaagttttcccgctgggttgggagagtgccctcaggggggcctgggtcctgagttaaaacaactctgctcacgtgctagcctcttcctgctgggaaggcacctcaggcggccctgcccggcaagtattgatggagtccctgtaggtgtggagcccggc

SEQ ID NO: 452366 - DNA, 4042 bp, Homo sapiens
gccacgtgacccggcgggcccggcgccctggcgctcctcctcttcgctgccggtgggcaccgccgctcgctcgcacttctgcgcccattggagcttcggagatccctgcggtcccgcgggacggcgcggcagcagctgacctcgcagacaggatcttgctctcttgcccagactggaatacagtggtgtgaacacggctcactgcagcctcaacctcctggactcagagatgtcggcttatttataggaattgcttgaagccagagtcatggtggatgtcggaaagtggcccatcttcactctactctcccctcaagagatcgcgtctattcggaaggtgtgtgtcttcggcacctcagccagtgaagcactgtacgttactgacaatgatgaggtctttgtatttggactgaactatagtaactgtctaggaactggagataaccagagtacacttgtacccaaaaagctagaaggcttatgtggaaagaagattaaaagcctcagttacgggagtggaccacatgttcttctcagcaccgaagatggagtggtttatgcctggggccacaatggatatagccagcttgggaatgggacgaccaaccaaggcattgctcccgtccaggtctgtaccaatctcttgatcaagcaagtggtggaagtagcttgtggctcacatcattcaatggctctggcagctgatggagaggtgtttgcttggggttataacaactgtggccaagtgggatcaggttctacagcaaatcaaccaactcctcgaaaagttacaaactgtttacatattaagagggtagttggcattgcctgtggtcagacttcatccatggctgttctggacaatggcgaggtatatggctggggttacaatggcaacggtcagctgggcttgggaaacaatggcaaccagctgacccctgtgagagtggcagctttgcacagcgtgtgtgtgaaccagattgtctgcggttacgcacatactctagcactaacagatgagggcttgctgtatgcctggggagctaacacatatgggcagctgggaactggcaataaaaataacctgctaagcccagcacacatcatggtggagaaagaaagggtggtagagattgcagcctgtcactctgcccacacgtctgcagccaagacgcagggtgggcacgtgtacatgtggggccagtgccggggtcagtccgtgatcctcccgcacctcacccacttctcctgcaccgacgacgtgtttgcctgctttgccactcccgccgtctcgtggcgcctcctgtctgtggagcatgaagactttttaacagttgcagagtcactgaagaaagaatttgatagtccagaaactgctgatctgaagtttcgaattgatggaaaatatattcatgtccataaagctgttttgaaaatcaggtgtgagcattttcgatccatgttccagtcgtattggaatgaagacatgaaggaagtgatagaaatcgatcagttttcttacccagtgtatcgtgcctttctccagtacctctacacagacacagtcgacctgccgccagaagatgctataggtcttctggatttggcgacatcttactgtgaaaacagactgaaaaaactttgtcagcacattatcaagagaggaattactgtggagaatgccttttcgctattctctgctgcagtcagatatgatgcagaggatttagaagaattctgctttaagttttgcatcaatcatttgacagaagttacacagactgcagcattttggcaaatggatggccctctgctaaaggaattcattgctaaagccagtaaatgtggagcctttaagaactgaagcgcaaggctgctgggttctgtgtgagtgctctggggcactgttgaggatgtgtccagtttgtgctctacgggtgatgtgattctgcaggtaaaagaccatcaggttgtttttttccacatctgggacacagttgtttgtgtaggaacataacaagggtgtacggcttttcttgagcccattttaaacaacccttgtttccagataagtgtattttaaatgtgacctttcgtaaatttgggctggaacatgtaaaagggtgaaagttagtcgtttttggtcttcttttcatttttgattagaggaacttctgaacttggaaaggggaagttggcagcaactctcctgggccatgtatcaacaatcttctgacagcaggagcagtgatagttggggaattgtgagatgaatggagaggccccatcgtgaattaaagatgctgacctggggattgttaagtgctgccttagttgctagtttagtagccttactgtgaaggaataattaagattgtttcagacttttgtttgtgtgcttgcgttgatgacttttttaacttcaagataaatcaaagtaataagtttaacgtatattaaacctgttgaaatgataattatgtaaagataaatattctaggttagtcaagatttctcttaagatttaagtgcataaagaatagtaatttagaagtatccgtgaaaagttgataatgaaagaaatttgatgaaggtgaatattttataaattagaatctccactacttatccaatggtgttttatttcattaaggtagaacttgagaactcaagtttaaattgtcccccaccaccttcttctataaatgcaaacttaagaggaaaataatgacatgtatagtatactgttgccttcctaaattatgactgctgaatcatcatatctactatatatgactagaagaagtggttcttcaagtcaaccctcttacaggacttagtggaatttgctttatctactttaggccaaatccatcacacattggcttatttgaaacttttggttttcctctgtttttaaacatcttaggtataacagcacaatttcaccttgaaaaagcaccaaaattatggtgttcctgaaaagatcctattaaaagacagtagtttatttgaactggttatggaaggtgactttgggatgtaagagtgttcaactgtgagtttcatcatgtgtgtccgttgagcttgcttttaagagcaatgttttgctttgctctctggtccatgaactcatttccatttgagtgagttcccttagtgaattttgtctcctgcttggaaagtctctcttctgaacctggagcctgaatacattttcagagccaaattacaagtgggtgaagacatgctacaactactatttttagcaatgtttttaaatttgtgtctattggggtgggaaggggagtgaggccctaaagataggaattcactgatagctgaaatagatacaagcctaggagccccagcccccttttcttgaccatatcacaagtgattgaagcccagtgaattagtcggttagaattcgttctacaacatgatagaacttttcttactagcttcagaaatgcacattgatttgtgctatgatgggtggtgtttgtaacaatcactgttttataggcttatgatctgagcaaaatgtgaacttcagtatgtttactattgctcttacttgaaaactttttttcaaaaaaagcacaaattaaagtagtaaattcatatccatagatagttcattcattcaacaaatatttaccaagttcctaatataagtgaaggaccacttctcatattagattactaagtcatttgtatgaatatgtgtggcagtgaagagaacaggtctttcaaaaagcatttgattatctttattttttttaaatacactctcttatttttctacttgtttttttgttaatcatagcaggatatgacaactcttatttgaattgattttttcatctaatgtaataatggaagccaaagtattcatatttcttaagatagccctaaatgtactcttgaacttcttactggaacaatgtttgatactctagtatgtaagctgtatttatgtaatatttagaacgacatgttaataaacaaagtaacattaaaacaggaaaaaaaaaaa

SEQ ID NO: 452367 - DNA, 864 bp, Homo sapiens
gccacgtgacccggcgggcccggcgccctggcgctcctcctcttcgctgccggtgggcaccgccgctcgctcgcacttctgcgcccattggagcttcggagatccctgcggtcccgcgggacggcgcggcagcagctgacctcgcagacaggatcttgctctcttgccacgaactaatcctcctcggactcctgcctcactcgattgtacaccaaccacccaactatctataaacctagcgcatggccatccccttatgagcgggcgcagtgattataggctttcgctctaagattaaaaagtgccctagcccacttcttaccacaaggcacacctacacgcccttatccccatactagttattatcgaaaccatcagcctactcattcaaccaatagccctggccgtgacgcctaaccgctaacattactgcaggccatctactcatgcacctaattggaagcgccagcctagcagtatcaaccattaaccttccctctacacttatcatcttcacaattctaattctactgactatcctagaaatcgctgtcgccttaatccaagcctacgttttcacacttctagtaagcctctaactgcacgacaacacataatgagccacaatcacatgctatcatatagtaaaaccagccattacccctaacagggccctctcagcctcctaatgacctccggcctagccatgtgatttccattccactccataagctcctcatataggctactaacaaaaaattaacatattaccatgatgggccgatgtaacacgagaaagccataccaaggccacaaaaacactgttcaaaaggcttcgaaaagggataacctattttacctaga

SEQ ID NO: 452368 - DNA, 3056 bp, Homo sapiens
agacagagtctctgtcacccagactggagtgcaatggcacgatctcggctcactgcaaccttcacttcgtgggttcaagtgattcttctgcctcagcctcctgagtagctgggattacagggtggtagagattgcagcctgtcactctgcccacacgtctgcagccaagacgcagggtgggcacgtgtacatgtggggccagtgccggggtcagtccgtgatcctcccgcacctcacccacttctcctgcaccgacgacgtgtttgcctgctttgccactcccgccgtctcgtggcgcctcctgtctgtggagcatgaagactttttaacagttgcagagtcactgaagaaagaatttgatagtccagaaactgctgatctgaagtttcgaattgatggaaaatatattcatgtccataaagctgttttgaaaatcaggtgtgagcattttcgatccatgttccagtcgtattggaatgaagacatgaaggaagtgatagaaatcgatcagttttcttacccagtgtatcgtgcctttctccagtacctctacacagacacagtcgacctgccgccagaagatgctataggtcttctggatttggcgacatcttactgtgaaaacagactgaaaaaactttgtcagcacattatcaagagaggaattactgtggagaatgccttttcgctattctctgctgcagtcagatatgatgcagaggatttagaagaattctgctttaagttttgcatcaatcatttgacagaagttacacagactgcagcattttggcaaatggatggccctctgctaaaggaattcattgctaaagccagtaaatgtggagcctttaagaactgaagcgcaaggctgctgggttctgtgtgagtgctctggggcactgttgaggatgtgtccagtttgtgctctacgggtgatgtgattctgcaggtaaaagaccatcaggttgtttttttccacatctgggacacagttgtttgtgtaggaacataacaagggtgtacggcttttcttgagcccattttaaacaacccttgtttccagataagtgtattttaaatgtgacctttcgtaaatttgggctggaacatgtaaaagggtgaaagttagtcgtttttggtcttcttttcatttttgattagaggaacttctgaacttggaaaggggaagttggcagcaactctcctgggccatgtatcaacaatcttctgacagcaggagcagtgatagttggggaattgtgagatgaatggagaggccccatcgtgaattaaagatgctgacctggggattgttaagtgctgccttagttgctagtttagtagccttactgtgaaggaataattaagattgtttcagacttttgtttgtgtgcttgcgttgatgacttttttaacttcaagataaatcaaagtaataagtttaacgtatattaaacctgttgaaatgataattatgtaaagataaatattctaggttagtcaagatttctcttaagatttaagtgcataaagaatagtaatttagaagtatccgtgaaaagttgataatgaaagaaatttgatgaaggtgaatattttataaattagaatctccactacttatccaatggtgttttatttcattaaggtagaacttgagaactcaagtttaaattgtcccccaccaccttcttctataaatgcaaacttaagaggaaaataatgacatgtatagtatactgttgccttcctaaattatgactgctgaatcatcatatctactatatatgactagaagaagtggttcttcaagtcaaccctcttacaggacttagtggaatttgctttatctactttaggccaaatccatcacacattggcttatttgaaactttatcatctttcaccttttggttttcctctgtttttaaacatcttaggtataacagcacaatttcaccttgaaaaagcaccaaaattatggtgttcctgaaaagatcctattaaaagacagtagtttatttgaactggttatggaaggtgactttgggatgtaagagtgttcaactgtgagtttcatcatgtgtgtccgttgagcttgcttttaagagcaatgttttgctttgctctctggtccatgaactcatttccatttgagtgagttcccttagtgaattttgtctcctgcttggaaagtctctcttctgaacctggagcctgaatacattttcagagccaaattacaagtgggtgaagacatgctacaactactatttttagcaatgtttttaaatttgtgtctattggggtgggaaggggagtgaggccctaaagataggaattcactgatagctgaaatagatacaagcctaggagccccagcccccttttcttgaccatatcacaagtgattgaagcccagtgaattagtcggttagaattcgttctacaacatgatagaacttttcttactagcttcagaaatgcacattgatttgtgctatgatgggtggtgtttgtaacaatcactgttttataggcttatgatctgagcaaaatgtgaacttcagtatgtttactattgctcttacttgaaaactttttttcaaaaaaagcacaaattaaagtagtaaattcatatccatagatagttcattcattcaacaaatatttaccaagttcctaatataagtgaaggaccacttctcatattagattactaagtcatttgtatgaatatgtgtggcagtgaagagaacaggtctttcaaaaagcatttgattatctttattttttttaaatacactctcttatttttctacttgtttttttgttaatcatagcaggatatgacaactcttatttgaattgattttttcatctaatgtaataatggaagccaaagtattcatatttcttaagatagccctaaatgtactcttgaacttcttactggaacaatgtttgatactctagtatgtaagctgtatttatgtaatatttagaacgacatgttaataaacaaagtaacattaaaacaggaaaaaaaaaaa

SEQ ID NO: 452369 - DNA, 2666 bp, Homo sapiens
accagtgagaacaacctgggcagaggcagatgtctcggctcaagttgctggaaacttcttcctcacttttagctaagatctgtcctaggaagtttacagaaaaagcctctgctgctgcttcctgtgccagcagagctcaacttggggatgctagatgactttgccttcgtgctgtgggccaaaatgctaggaagatggagactacctgcttccaatgtttcttgtctttctacgaaagtacctgaggttcctccatgccccgttttgacaagatagctttgaagcaaatgtacacacattaaagcaacaaaaatgtatggactcagtagttacagggagtttcaaaagatttagaagaattctgctttaagttttgcatcaatcatttgacagaagttacacagactgcagcattttggcaaatggatggccctctgctaaaggaattcattgctaaagccagtaaatgtggagcctttaagaactgaagcgcaaggctgctgggttctgtgtgagtgctctggggcactgttgaggatgtgtccagtttgtgctctacgggtgatgtgattctgcaggtaaaagaccatcaggttgtttttttccacatctgggacacagttgtttgtgtaggaacataacaagggtgtacggcttttcttgagcccattttaaacaacccttgtttccagataagtgtattttaaatgtgacctttcgtaaatttgggctggaacatgtaaaagggtgaaagttagtcgtttttggtcttcttttcatttttgattagaggaacttctgaacttggaaaggggaagttggcagcaactctcctgggccatgtatcaacaatcttctgacagcaggagcagtgatagttggggaattgtgagatgaatggagaggccccatcgtgaattaaagatgctgacctggggattgttaagtgctgccttagttgctagtttagtagccttactgtgaaggaataattaagattgtttcagacttttgtttgtgtgcttgcgttgatgacttttttaacttcaagataaatcaaagtaataagtttaacgtatattaaacctgttgaaatgataattatgtaaagataaatattctaggttagtcaagatttctcttaagatttaagtgcataaagaatagtaatttagaagtatccgtgaaaagttgataatgaaagaaatttgatgaaggtgaatattttataaattagaatctccactacttatccaatggtgttttatttcattaaggtagaacttgagaactcaagtttaaattgtcccccaccaccttcttctataaatgcaaacttaagaggaaaataatgacatgtatagtatactgttgccttcctaaattatgactgctgaatcatcatatctactatatatgactagaagaagtggttcttcaagtcaaccctcttacaggacttagtggaatttgctttatctactttaggccaaatccatcacacattggcttatttgaaacttttggttttcctctgtttttaaacatcttaggtataacagcacaatttcaccttgaaaaagcaccaaaattatggtgttcctgaaaagatcctattaaaagacagtagtttatttgaactggttatggaaggtgactttgggatgtaagagtgttcaactgtgagtttcatcatgtgtgtccgttgagcttgcttttaagagcaatgttttgctttgctctctggtccatgaactcatttccatttgagtgagttcccttagtgaattttgtctcctgcttggaaagtctctcttctgaacctggagcctgaatacattttcagagccaaattacaagtgggtgaagacatgctacaactactatttttagcaatgtttttaaatttgtgtctattggggtgggaaggggagtgaggccctaaagataggaattcactgatagctgaaatagatacaagcctaggagccccagcccccttttcttgaccatatcacaagtgattgaagcccagtgaattagtcggttagaattcgttctacaacatgatagaacttttcttactagcttcagaaatgcacattgatttgtgctatgatgggtggtgtttgtaacaatcactgttttataggcttatgatctgagcaaaatgtgaacttcagtatgtttactattgctcttacttgaaaactttttttcaaaaaaagcacaaattaaagtagtaaattcatatccatagatagttcattcattcaacaaatatttaccaagttcctaatataagtgaaggaccacttctcatattagattactaagtcatttgtatgaatatgtgtggcagtgaagagaacaggtctttcaaaaagcatttgattatctttattttttttaaatacactctcttatttttctacttgtttttttgttaatcatagcaggatatgacaactcttatttgaattgattttttcatctaatgtaataatggaagccaaagtattcatatttcttaagatagccctaaatgtactcttgaacttcttactggaacaatgtttgatactctagtatgtaagctgtatttatgtaatatttagaacgacatgttaataaacaaagtaacattaaaacaggaaaaaaaaaaa

SEQ ID NO: 452370 - DNA, 1312 bp, Homo sapiens
tctctctctctctctctctctctctctctgtctctcctcgtgccggattcggcacgatgtatagtatactgttgccttcctaaattatgactgctgaatcatcatatctactatatatgactagaagaagtggttcttcaagtcaaccctcttacaggacttagtggaatttgctttatctactttaggccaaatccatcacacattggcttatttgaaacttttggttttcctctgtttttaaacatcttaggtataacagcacaatttcaccttgaaaaagcaccaaaattatggtgttcctgaaaagatcctattgtgttcaactgtgagtttcatcatgtgtgtccgttgagcttgcttttaagagcaatgttttgctttgctctctggtccatgaactcatttccatttgagtgagttcccttagtgaattttgtctcctgcttggaaagtctctcttctgaacctggagcctgaatacattttcagagccaaattacaagtgggtgaagacatgctacaactactatttttagcaatgtttttaaatttgtgtctattggggtgggaaggggagtgaggccctaaagataggaattcactgatagctgaaatagatacaagcctaggagccccagcccccttttcttgaccatatcacaagtgattgaagcccagtgaattagtcggttagaattcgttctacaacatgatagaacttttcttactagcttcagaaatgcacattgatttgtgctatgatgggtggtgtttgtaacaatcactgttttataggcttatgatctgagcaaaatgtgaacttcagtatgtttactattgctcttacttgaaaactttttttcaaaaaaagcacaaattaaagtagtaaattcatatccatagatagttcattcattcaacaaatatttaccaagttcctaatataagtgaaggaccacttctcatattagattactaagtcatttgtatgaatatgtgtggcagtgaagagaacaggtctttcaaaaagcatttgattatctttattttttttaaatacactctcttatttttctacttgtttttttgttaatcatagcaggatatgacaactcttatttgaattgattttttcatctaatgtaataatggaagccaaagtattcatatttcttaagatagccctaaatgtactcttgaacttcttactggaacaatgtttgatactctagtatgtaagctgtatttatgtaatatttagaacgacatgttaataaacaaagtaacattaaaacaggaaaaaaaaaaa

SEQ ID NO: 452371 - DNA, 2003 bp, Homo sapiens
gccacgtgacccggcgggcccggcgccctggcgctcctcctcttcgctgccggtgggcaccgccgctcgctcgcacttctgcgcccattggagcttcggagatccctgcggtcccgcgggacggcgcggcagcagctgacctcgcagacaggatcttgctctcttgcccagactggaatacagtggtgtgaacacggctcactgcagcctcaacctcctggactcagagatgtcggcttatttataggaattgcttgaagccagagtcatggtggatgtcggaaagtggcccatcttcactctactctcccctcaagagatcgcgtctattcggaaggtgtgtgtcttcggcacctcagccagtgaagcactgtacgttactgacaatgatgaggtctttgtatttggactgaactatagtaactgtctaggaactggagataaccagagtacacttgtacccaaaaagctagaaggcttatgtggaaagaagattaaaagcctcagttacgggagtggaccacatgttcttctcagcaccgaagatggagtggtttatgcctggggccacaatggatatagccagcttgggaatgggacgaccaaccaaggcattgctcccgtccaggtctgtaccaatctcttgatcaagcaagtggtggaagtagcttgtggctcacatcattcaatggctctggcagctgatggagaggtgtttgcttggggttataacaactgtggccaagtgggatcaggttctacagcaaatcaaccaactcctcgaaaagttacaaactgtttacatattaagagggtagttggcattgcctgtggtcagacttcatccatggctgttctggacaatggcgaggtatatggctggggttacaatggcaacggtcagctgggcttgggaaacaatggcaaccagctgacccctgtgagagtggcagctttgcacagcgtgtgtgtgaaccagattgtctgcggttacgcacatactctagcactaacagatgagggcttgctgtatgcctggggagctaacacatatgggcagctgggaactggcaataaaaataacctgctaagcccagcacacatcatggtggagaaagaaagggtggtagagattgcagcctgtcactctgcccacacgtctgcagccaagacgcagggtgggcacgtgtacatgtggggccagtgccggggtcagtccgtgatcctcccgcacctcacccacttctcctgcaccgacgacgtgtttgcctgctttgccactcccgccgtctcgtggcgcctcctgtctgtggagcatgaagactttttaacagttgcagagtcactgaagaaagaatttgatagtccagaaactgctgatctgaagtttcgaattgatggaaaatatattcatgtccataaagctgttttgaaaatcaggtgtgagcattttcgatccatgttccagtcgtattggaatgaagacatgaaggaagtgatagaaatcgatcagttttcttacccagtgtatcgtgcctttctccagtacctctacacagacacagtcgacctgccgccagaagatgctataggtcttctggatttggcgacatcttactgtgaaaacagactgaaaaaactttgtcagcacattatcaagagaggaattactgtggagaatgccttttcgctattctctgctgcagtcagatatgatgcagaggtaacttaaacaacaaacagaaaccagaccacctttaactccctttgtgctcgtctcccccgcttcttgcgtgaggcatggaaaacgatgagtcactccacttctgtttagggaatcagtgaacccattgaaaactgaaatctgcccttgcttcttaattccctgttcattgtttcaaaagtcgttgttcctctactttcatttctaagtaagacaggaaacgaaccaaggtcctagcagctgtgctgcaggttggaacataagttgcccgccaatcgaa

SEQ ID NO: 452372 - DNA, 391 bp, Homo sapiens
gtccctggaacttggactgttttctgaggtattgcaagcatgaacttttaaattgccttgtgtggtgtgctgtgggcttctgtgatcatgaagtaacatgcatttttcttaaaacttttcagggtggtagagattgcagcctgtcactctgcccacacgtctgcagccaagacgcagggtgggcacgtgtacatgtggggccagtgccggggtcagtccgtgatcctcccgcacctcacccacttctcctgcaccgacgacgtgtttgcctgctttgccactcccgccgtctcgtggcgcctcctgtctgtgggtaagaaagtgcagggccacctccacccaggaagaatggtactaccaactgaccagttttcctgtgtctttgctggtt

SEQ ID NO: 452373 - DNA, 4058 bp, Homo sapiens
gccacgtgacccggcgggcccggcgccctggcgctcctcctcttcgctgccggtgggcaccgccgctcgctcgcacttctgcgcccattggagcttcggagatccctgcggtcccgcgggacggcgcggcagcagctgacctcgcagacaggatcttgctctcttgcccagactggaatacagtggtgtgaacacggctcactgcagcctcaacctcctggactcagagatgtcggcttatttataggaattgcttgaagccagagtcatggtggatgtcggaaagtggcccatcttcactctactctcccctcaagagatcgcgtctattcggaaggtgtgtgtcttcggcacctcagccagtgaagcactgtacgttactgacaatgatgaggtctttgtatttggactgaactatagtaactgtctaggaactggagataaccagagtacacttgtacccaaaaagctagaaggcttatgtggaaagaagattaaaagcctcagttacgggagtggaccacatgttcttctcagcaccgaagatggagtggtttatgcctggggccacaatggatatagccagcttgggaatgggacgaccaaccaaggcattgctcccgtccaggtctgtaccaatctcttgatcaagcaagtggtggaagtagcttgtggctcacatcattcaatggctctggcagctgatggagaggtgtttgcttggggttataacaactgtggccaagtgggatcaggttctacagcaaatcaaccaactcctcgaaaagttacaaactgtttacatattaagagggtagttggcattgcctgtggtcagacttcatccatggctgttctggacaatggcgaggtatatggctggggttacaatggcaacggtcagctgggcttgggaaacaatggcaaccagctgacccctgtgagagtggcagctttgcacagcgtgtgtgtgaaccagattgtctgcggttacgcacatactctagcactaacagatgagggcttgctgtatgcctggggagctaacacatatgggcagctgggaactggcaataaaaataacctgctaagcccagcacacatcatggtggagaaagaaagggtggtagagattgcagcctgtcactctgcccacacgtctgcagccaagacgcagggtgggcacgtgtacatgtggggccagtgccggggtcagtccgtgatcctcccgcacctcacccacttctcctgcaccgacgacgtgtttgcctgctttgccactcccgccgtctcgtggcgcctcctgtctgtggagcatgaagactttttaacagttgcagagtcactgaagaaagaatttgatagtccagaaactgctgatctgaagtttcgaattgatggaaaatatattcatgtccataaagctgttttgaaaatcaggtgtgagcattttcgatccatgttccagtcgtattggaatgaagacatgaaggaagtgatagaaatcgatcagttttcttacccagtgtatcgtgcctttctccagtacctctacacagacacagtcgacctgccgccagaagatgctataggtcttctggatttggcgacatcttactgtgaaaacagactgaaaaaactttgtcagcacattatcaagagaggaattactgtggagaatgccttttcgctattctctgctgcagtcagatatgatgcagaggatttagaagaattctgctttaagttttgcatcaatcatttgacagaagttacacagactgcagcattttggcaaatggatggccctctgctaaaggaattcattgctaaagccagtaaatgtggagcctttaagaactgaagcgcaaggctgctgggttctgtgtgagtgctctggggcactgttgaggatgtgtccagtttgtgctctacgggtgatgtgattctgcaggtaaaagaccatcaggttgtttttttccacatctgggacacagttgtttgtgtaggaacataacaagggtgtacggcttttcttgagcccattttaaacaacccttgtttccagataagtgtattttaaatgtgacctttcgtaaatttgggctggaacatgtaaaagggtgaaagttagtcgtttttggtcttcttttcatttttgattagaggaacttctgaacttggaaaggggaagttggcagcaactctcctgggccatgtatcaacaatcttctgacagcaggagcagtgatagttggggaattgtgagatgaatggagaggccccatcgtgaattaaagatgctgacctggggattgttaagtgctgccttagttgctagtttagtagccttactgtgaaggaataattaagattgtttcagacttttgtttgtgtgcttgcgttgatgacttttttaacttcaagataaatcaaagtaataagtttaacgtatattaaacctgttgaaatgataattatgtaaagataaatattctaggttagtcaagatttctcttaagatttaagtgcataaagaatagtaatttagaagtatccgtgaaaagttgataatgaaagaaatttgatgaaggtgaatattttataaattagaatctccactacttatccaatggtgttttatttcattaaggtagaacttgagaactcaagtttaaattgtcccccaccaccttcttctataaatgcaaacttaagaggaaaataatgacatgtatagtatactgttgccttcctaaattatgactgctgaatcatcatatctactatatatgactagaagaagtggttcttcaagtcaaccctcttacaggacttagtggaatttgctttatctactttaggccaaatccatcacacattggcttatttgaaactttatcatctttcaccttttggttttcctctgtttttaaacatcttaggtataacagcacaatttcaccttgaaaaagcaccaaaattatggtgttcctgaaaagatcctattaaaagacagtagtttatttgaactggttatggaaggtgactttgggatgtaagagtgttcaactgtgagtttcatcatgtgtgtccgttgagcttgcttttaagagcaatgttttgctttgctctctggtccatgaactcatttccatttgagtgagttcccttagtgaattttgtctcctgcttggaaagtctctcttctgaacctggagcctgaatacattttcagagccaaattacaagtgggtgaagacatgctacaactactatttttagcaatgtttttaaatttgtgtctattggggtgggaaggggagtgaggccctaaagataggaattcactgatagctgaaatagatacaagcctaggagccccagcccccttttcttgaccatatcacaagtgattgaagcccagtgaattagtcggttagaattcgttctacaacatgatagaacttttcttactagcttcagaaatgcacattgatttgtgctatgatgggtggtgtttgtaacaatcactgttttataggcttatgatctgagcaaaatgtgaacttcagtatgtttactattgctcttacttgaaaactttttttcaaaaaaagcacaaattaaagtagtaaattcatatccatagatagttcattcattcaacaaatatttaccaagttcctaatataagtgaaggaccacttctcatattagattactaagtcatttgtatgaatatgtgtggcagtgaagagaacaggtctttcaaaaagcatttgattatctttattttttttaaatacactctcttatttttctacttgtttttttgttaatcatagcaggatatgacaactcttatttgaattgattttttcatctaatgtaataatggaagccaaagtattcatatttcttaagatagccctaaatgtactcttgaacttcttactggaacaatgtttgatactctagtatgtaagctgtatttatgtaatatttagaacgacatgttaataaacaaagtaacattaaaacaggaaaaaaaaaaa

SEQ ID NO: 452374 - DNA, 4042 bp, Homo sapiens
gccacgtgacccggcgggcccggcgccctggcgctcctcctcttcgctgccggtgggcaccgccgctcgctcgcacttctgcgcccattggagcttcggagatccctgcggtcccgcgggacggcgcggcagcagctgacctcgcagacaggatcttgctctcttgcccagactggaatacagtggtgtgaacacggctcactgcagcctcaacctcctggactcagagatgtcggcttatttataggaattgcttgaagccagagtcatggtggatgtcggaaagtggcccatcttcactctactctcccctcaagagatcgcgtctattcggaaggtgtgtgtcttcggcacctcagccagtgaagcactgtacgttactgacaatgatgaggtctttgtatttggactgaactatagtaactgtctaggaactggagataaccagagtacacttgtacccaaaaagctagaaggcttatgtggaaagaagattaaaagcctcagttacgggagtggaccacatgttcttctcagcaccgaagatggagtggtttatgcctggggccacaatggatatagccagcttgggaatgggacgaccaaccaaggcattgctcccgtccaggtctgtaccaatctcttgatcaagcaagtggtggaagtagcttgtggctcacatcattcaatggctctggcagctgatggagaggtgtttgcttggggttataacaactgtggccaagtgggatcaggttctacagcaaatcaaccaactcctcgaaaagttacaaactgtttacatattaagagggtagttggcattgcctgtggtcagacttcatccatggctgttctggacaatggcgaggtcttacctcctatgtcctggagtgctgacttctgattatgagaccttacccaagaagcatactactgagaaatatattttcctcggcggtctgtgtgatctatcctaactcacagtgagctgaggatgagaagtgggcatttgggaaaggagaacagtgctcttgccctgatctgttgcttttgttgctgtgacttggcagctagtgtccctggaacttggactgttttctgagggtggtagagattgcagcctgtcactctgcccacacgtctgcagccaagacgcagggtgggcacgtgtacatgtggggccagtgccggggtcagtccgtgatcctcccgcacctcacccacttctcctgcaccgacgacgtgtttgcctgctttgccactcccgccgtctcgtggcgcctcctgtctgtggagcatgaagactttttaacagttgcagagtcactgaagaaagaatttgatagtccagaaactgctgatctgaagtttcgaattgatggaaaatatattcatgtccataaagctgttttgaaaatcaggtgtgagcattttcgatccatgttccagtcgtattggaatgaagacatgaaggaagtgatagaaatcgatcagttttcttacccagtgtatcgtgcctttctccagtacctctacacagacacagtcgacctgccgccagaagatgctataggtcttctggatttggcgacatcttactgtgaaaacagactgaaaaaactttgtcagcacattatcaagagaggaattactgtggagaatgccttttcgctattctctgctgcagtcagatatgatgcagaggatttagaagaattctgctttaagttttgcatcaatcatttgacagaagttacacagactgcagcattttggcaaatggatggccctctgctaaaggaattcattgctaaagccagtaaatgtggagcctttaagaactgaagcgcaaggctgctgggttctgtgtgagtgctctggggcactgttgaggatgtgtccagtttgtgctctacgggtgatgtgattctgcaggtaaaagaccatcaggttgtttttttccacatctgggacacagttgtttgtgtaggaacataacaagggtgtacggcttttcttgagcccattttaaacaacccttgtttccagataagtgtattttaaatgtgacctttcgtaaatttgggctggaacatgtaaaagggtgaaagttagtcgtttttggtcttcttttcatttttgattagaggaacttctgaacttggaaaggggaagttggcagcaactctcctgggccatgtatcaacaatcttctgacagcaggagcagtgatagttggggaattgtgagatgaatggagaggccccatcgtgaattaaagatgctgacctggggattgttaagtgctgccttagttgctagtttagtagccttactgtgaaggaataattaagattgtttcagacttttgtttgtgtgcttgcgttgatgacttttttaacttcaagataaatcaaagtaataagtttaacgtatattaaacctgttgaaatgataattatgtaaagataaatattctaggttagtcaagatttctcttaagatttaagtgcataaagaatagtaatttagaagtatccgtgaaaagttgataatgaaagaaatttgatgaaggtgaatattttataaattagaatctccactacttatccaatggtgttttatttcattaaggtagaacttgagaactcaagtttaaattgtcccccaccaccttcttctataaatgcaaacttaagaggaaaataatgacatgtatagtatactgttgccttcctaaattatgactgctgaatcatcatatctactatatatgactagaagaagtggttcttcaagtcaaccctcttacaggacttagtggaatttgctttatctactttaggccaaatccatcacacattggcttatttgaaactttatcatctttcaccttttggttttcctctgtttttaaacatcttaggtataacagcacaatttcaccttgaaaaagcaccaaaattatggtgttcctgaaaagatcctattaaaagacagtagtttatttgaactggttatggaaggtgactttgggatgtaagagtgttcaactgtgagtttcatcatgtgtgtccgttgagcttgcttttaagagcaatgttttgctttgctctctggtccatgaactcatttccatttgagtgagttcccttagtgaattttgtctcctgcttggaaagtctctcttctgaacctggagcctgaatacattttcagagccaaattacaagtgggtgaagacatgctacaactactatttttagcaatgtttttaaatttgtgtctattggggtgggaaggggagtgaggccctaaagataggaattcactgatagctgaaatagatacaagcctaggagccccagcccccttttcttgaccatatcacaagtgattgaagcccagtgaattagtcggttagaattcgttctacaacatgatagaacttttcttactagcttcagaaatgcacattgatttgtgctatgatgggtggtgtttgtaacaatcactgttttataggcttatgatctgagcaaaatgtgaacttcagtatgtttactattgctcttacttgaaaactttttttcaaaaaaagcacaaattaaagtagtaaattcatatccatagatagttcattcattcaacaaatatttaccaagttcctaatataagtgaaggaccacttctcatattagattactaagtcatttgtatgaatatgtgtggcagtgaagagaacaggtctttcaaaaagcatttgattatctttattttttttaaatacactctcttatttttctacttgtttttttgttaatcatagcaggatatgacaactcttatttgaattgattttttcatctaatgtaataatggaagccaaagtattcatatttcttaagatagccctaaatgtactcttgaacttcttactggaacaatgtttgatactctagtatgtaagctgtatttatgtaatatttagaacgacatgttaataaacaaagtaacattaaaacaggaaaaaaaaaaa

SEQ ID NO: 452375 - DNA, 3375 bp, Homo sapiens
gccacgtgacccggcgggcccggcgccctggcgctcctcctcttcgctgccggtgggcaccgccgctcgctcgcacttctgcgcccattggagcttcggagatccctgcggtcccgcgggacggcgcggcagcagctgacctcgcagacaggatcttgctctcttgcccagactggaatacagtggtgtgaacacggctcactgcagcctcaacctcctggactcagagatgtcggcttatttataggaattgcttgaagccagagtcatggtggatgtcggaaagtggcccatcttcactctactctcccctcaagagatcgcgtctattcggaaggtgtgtgtcttcggcacctcagccagtgaagcactgtacgttactgacaatgatgaggtctttgtatttggactgaactatagtaactgtctaggaactggagataaccagagtacacttgtacccaaaaagctagaaggcttatgtggaaagaagattaaaagcctcagttacgggagtggaccacatgttcttctcagcaccgaagatggagtggtttatgcctggggccacaatggatatagccagcttgggaatgggacgaccaaccaaggcattgctcccgtccaggtctgtaccaatctcttgatcaagcaagtggtggaagtagcttgtggctcacatcattcaatggctctggcagctgatggagaggtgtttgcttggggttataacaactgtggccaagtgggatcaggttctacagcaaatcaaccaactcctcgaaaagttacaaactgtttacatattaagagggtagttggcattgcctgtggtcagacttcatccatggctgttctggacaatggcgaggtatatggctggggttacaatggcaacggtcagctgggcttgggaaacaatggcaaccagctgacccctgtgagagtggcagctttgcacagcgtgtgtgtgaaccagattgtctgcggttacgcacatactctagcactaacagatgagggcttgctgtatgcctggggagctaacacatatgggcagctgggaactggcaataaaaataacctgctaagcccagcacacatcatggtggagaaagaaagggtggtagagattgcagcctgtcactctgcccacacgtctgcagccaagacgcagggtgggcacgtgtacatgtggggccagtgccggggtcagtccgtgatcctcccgcacctcacccacttctcctgcaccgacgacgtgtttgcctgctttgccactcccgccgtctcgtggcgcctcctgtctgtggagcatgaagactttttaacagttgcagagtcactgaagaaagaatttgatagtccagaaactgctgatctgaagtttcgaattgatggaaaatatattcatgtccataaagctgttttgaaaatcaggtgtgagcattttcgatccatgttccagtcgtattggaatgaagacatgaaggaagtgatagaaatcgatcagttttcttacccagtgtatcgtgcctttctccagtacctctacacagacacagtcgacctgccgccagaagatgctataggtcttctggatttggcgacatcttactgtgaaaacagactgaaaaaactttgtcagcacattatcaagagaggaattactgtggagaatgccttttcgctattctctgctgcagtcagatatgatgcagaggatttagaagaattctgctttaagttttgcatcaatcatttgacagaagttacacagactgcagcattttggcaaatggatggccctctgctaaaggaattcattgctaaagccagtaaatgtggagcctttaagaactgaagcgcaaggctgctgggttctgtgtgagtgctctggggcactgttgaggatgtgtccagtttgtgctctacgggtgatgtgattctgcaggtaaaagaccatcaggttgtttttttccacatctgggacacagttgtttgtgtaggaacataacaagggtgtacggcttttcttgagcccattttaaacaacccttgtttccagataagtgtattttaaatgtgacctttcgtaaatttgggctggaacatgtaaaagggtgaaagttagtcgtttttggtcttcttttcatttttgattagaggaacttctgaacttggaaaggggaagttggcagcaactctcctgggccatgtatcaacaatcttctgacagcaggagcagtgatagttggggaattgtgagatgaatggagaggccccatcgtgaattaaagatgctgacctggggattgttaagtgctgccttagttgctagtttagtagccttactgtgaaggaataattaagattgtttcagacttttgtttgtgtgcttgcgttgatgacttttttaacttcaagataaatcaaagtaataagtttaacgtatattaaacctgttgaaatgataattatgtaaagataaatattctaggttagtcaagatttctcttaagatttaagtgcataaagaatagtaatttagaagtatccgtgaaaagttgataatgaaagaaatttgatgaaggtgaatattttataaattagaatctccactacttatccaatggtgttttatttcattaaggtagaacttgagaactcaagtttaaattgtcccccaccaccttcttctataaatgcaaacttaagaggaaaataatgacatgtatagtatactgttgccttcctaaattatgactgctgaatcatcatatctactatatatgactagaagaagtggttcttcaagtcaaccctcttacaggacttagtggaatttgctttatctactttaggccaaatccatcacacattggcttatttgaaacttttggttttcctctgtttttaaacatcttaggtataacagcacaatttcaccttgaaaaagcaccaaaattatggtgttcctgaaaagatcctattaaaagacagtagtttatttgaactggttatggaaggtgactttgggatgtaagagtgttcaactgtgagtttcatcatgtgtgtccgttgagcttgcttttaagagcaatgttttgctttgctctctggtccatgaactcatttccatttgagtgagttcccttagtgaattttgtctcctgcttggaaagtctctcttctgaacctggagcctgaatacattttcagagccaaattacaagtgggtgaagacatgctacaactactatttttagcaatgtttttaaatttgtgatatggtcaagaaaagggggctggggctcctaggcttgtatctatttcagctatcactgaattcctatctttagggcctcactcccc

SEQ ID NO: 452376 - DNA, 1282 bp, Homo sapiens
gccacgtgacccggcgggcccggcgccctggcgctcctcctcttcgctgccggtgggcaccgccgctcgctcgcacttctgcgcccattggagcttcggagatccctgcggtcccgcgggacggcgcggcagcagctgacctcgcagacaggatcttgctctcttgcccagactggaatacagtggtgtgaacacggctcactgcagcctcaacctcctggactcagagatgtcggcttatttataggaattgcttgaagccagagtcatggtggatgtcggaaagtggcccatcttcactctactctcccctcaagagatcgcgtctattcggaaggtgtgtgtcttcggcacctcagccagtgaagcactgtacgttactgacaatgatgaggtctttgtatttggactgaactatagtaactgtctaggaactggagataaccagagtacacttgtacccaaaaagctagaaggcttatgtggaaagaagattaaaagcctcagttacgggagtggaccacatgttcttctcagcaccgaagatggagtggtttatgcctggggccacaatggatatagccagcttgggaatgggacgaccaaccaaggcattgctcccgtccaggtctgtaccaatctcttgatcaagcaagtggtggaagtagcttgtggctcacatcattcaatggctctggcagctgatggagaggtgtttgcttggggttataacaactgtggccaagtgggatcaggttctacagcaaatcaaccaactcctcgaaaagttacaaactgtttacatattaagagggtagttggcattgcctgtggtcagacttcatccatggctgttctggacaatggcgaggtatatggctggggttacaatggcaacggtcagctgggcttgggaaacaatggcaaccagctgacccctgtgagagtggcagctttgcacagcgtgtgtgtgaaccagattgtctgcggttacgcacatactctagcactaacagatgagggcttgctgtatgcctggggagctaacacatatgggcagctgggaactggcaataaaaataacctgctaagcccagcacacatcatggtggagaaagaaaggtaacttggctgtgccacgtcttgggactgtgtgtgcgatgtggccttggggctgtgtgtggcagagctgtggtgtttggctttgtgattcttctgtttattaacattctcattttggacaaaagagataaccttcccttctcccttcccccttcctcct

SEQ ID NO: 452377 - DNA, 1583 bp, Homo sapiens
ccgcccttcctgcctaacctgttgtcttggctgaccccagaactcctgcaccacgagtcggagtccgggcgaggagatcagcaggggttttcgagggagcctggggcccagggcaggggtacgcgggtcaactcaacagatgtaaggcgtggccgaaccccattcagctagcagtacccagcctcagccacagtcgctgcccttacccaagatggcggcccacaccgcttcggtcgctgctgtagtgcgcttcctgcggccaggcccgggttcaatcagcggccgacaactgtctagggctcagacaccaccagccaatgagggagggcacgtggagccgcccgtctgggctcgcggctcctggaccaatggggaagtggcatgtgggagggcgccggggttccccccgccaatggggagctacggcgcgcggccgggacttggaggcggtgcggcgcggcgggtgcggttcagtcggtcggcggcggcagcggaggaggaggaggaggaggaggatgaggaggatgaggaggatgtgggccacgcaggggctggcggtggcgctggctctgagcgtgctgccgggcagccgggcgctgcggccgggcgactgcgaagtttgtatttcttatctgggaagattttaccaggacctcaaagacagagatgtcacattctcaccagccactattgaaaacgaacttataaagttctgccgggaagcaagaggcaaagagaatcggttgtgctactatatcggggccacagatgatgcagccaccaaaatcatcaatgaggtatcaaagcctctggcccaccacatccctgtggagaagatctgtgagaagcttaagaagaaggacagccagatatgtgagcttaagtatgacaagcagatcgacctgagcacagtggacctgaagaagctccgagttaaagagctgaagaagattctggatgactggggggagacatgcaaaggctgtgcagaaaagtctgactacatccggaagataaatgaactgatgcctaaatatgcccccaaggcagccagtgcacggaccgatttgtagtctgctcaatctctgttgcacctgagggggaaaaaacagttcaactgcttactcccaaaacagcctttttgtaatttattttttaagtgggctcctgacaatactgtatcagatgtgaagcctggagctttcctgatgatgctggccctacagtacccccatgaggggattcccttccttctgttgctggtgtactctaggacttcaaagtgtgtctgggatttttttattaaagaaaaaaaatttctagctgtccttgcagaattatagtgaataccaaaatggggttttgccccaggaggctcctaccagtttctgctttccagttgcagagtttggggggttattcattcccatttatctctcaacccaccagtgctgaaaataccagagcaggacataggggctggggccagctgatgtgtgtgggtgtgtaccactagagggcagcaggcactcagcagaaaggaggtggcgggggcggggggtgctgcgcttgataccctgccc

SEQ ID NO: 452378 - DNA, 1220 bp, Homo sapiens
gcggccgcctactactactactactgctcgaattcaagcttctaacgatgtacggggacatgaggggattcccttccttctgttgctggtgtactctaggacttcaaagtgtgtctgggatttttttattaaagaaaaaaaatttctagctgtcaagcacaaaaaaaacaaaaacaacaaacacaaaaaacacggtggggcgccgccacccagcgacccccggaagacaagctaagaagcccaccacgccgggaggggcgggcggacccccaggaaaggcagcggtacaccacgggcccaaagccgggaatcccaaccggagaccccgggaccacaggcacaaagcgagcgcgaaaaccaccacaccacacaaaacaacaacacgccccggcgcagccaacacagcgaggcgaataacaagaaaaccaacaccacacaggcaagaccaacggaagacgcaaaaaaagggagagaataaacgaaaccaagagcacgccaccacggaacacaacgcgaaacaaagcaaaaaacagtcccacaacgcacagaggtgaccaagcgcacaacacaaaccaccacaaccacacaccacaacacaaacagaccaaacccgcgaaaaaaaaaggcgaagagagaaggagacgaaaaaggagaaacggaagagaaagaaagaagaaaagagagcaagggagagaggagagaacgccgcgcgcaaaggcaggagacgacgacgacacagacaagggacaggggagaagagaacgcagaacagacggcgagcgaggggggaggggaggggcgggggggaaggggggcgcggaaacggcggggccaacgaggaggcggggggggggaagaagaggggcagaggaggcgcggggcaaggagggggagggagcgagacagggagccgagaggggggagggaggaggagcggagggcgagggcgccagagcgcggcgaacgcgagaggggaggcaaccagaaggagaggaagcggaggaggacgaggaggggagacgacgagagcgcagggcgacgggaggggaagagacagcagggagagcaggaaacggaaaggggggacgccagaggaccgcgagggagggggccggcgagagaaggcgcagaggcggacgagagaagagaaggagccaggagaacggggaggggggaaaggaacaggaaaagaacacaacgtacgcaaacagaaagccaga

SEQ ID NO: 452379 - DNA, 2394 bp, Homo sapiens
ccgcccttcctgcctaacctgttgtcttggctgaccccagaactcctgcaccacgagtcggagtccgggcgaggagatcagcaggggttttcgagggagcctggggcccagggcaggggtacgcgggtcaactcaacagatgtaaggcgtggccgaaccccattcagctagcagtacccagcctcagccacagtcgctgcccttacccaagatggcggcccacaccgcttcggtcgctgctgtagtgcgcttcctgcggccaggcccgggttcaatcagcggccgacaactgtctagggctcagacaccaccagccaatgagggagggcacgtggagccgcccgtctgggctcgcggctcctggaccaatggggaagtggcatgtgggagggcgccggggttccccccgccaatggggagctacggcgcgcggccgggacttggaggcggtgcggcgcggcgggtgcggttcagtcggtcggcggcggcagcggaggaggaggaggaggaggaggatgaggaggatgaggaggatgtgggccacgcaggggctggcggtggcgctggctctgagcgtgctgccgggcagccgggcgctgcggccgggcgactgcgaagtttgtatttcttatctgggaagattttaccaggacctcaaagacagagatgtcacattctcaccagccactattgaaaacgaacttataaagttctgccgggaagcaagaggcaaagagaatcggttgtgctactatatcggggccacagatgatgcagccaccaaaatcatcaatgaggtatcaaagcctctggcccaccacatccctgtggagaagatctgtgagaagcttaagaagaaggacagccagatatgtgagcttaagtatgacaagcagatcgacctgagcacagtggacctgaagaagctccgagttaaagagctgaagaagattctggatgactggggggagacatgcaaaggctgtgcagaaaagtctgactacatccggaagataaatgaactgatgcctaaatatgcccccaaggcagccagtgcacggaccgatttgtagtctgctcaatctctgttgcacctgagggggaaaaaacagttcaactgcttactcccaaaacagcctttttgtaatttattttttaagtgggctcctgacaatactgtatcagatgtgaagcctggagctttcctgatgatgctggccctacagtacccccatgaggggattcccttccttctgttgctggtgtactctaggacttcaaagtgtgtctgggatttttttattaaagaaaaaaaatttctagctgtcaagcacaaaaaaaacaaaaacaacaaacacaaaaaacacggtggggcgccgccacccagcgacccccggaagacaagctaagaagcccaccacgccgggaggggcgggcggacccccaggaaaggcagcggtacaccacgggcccaaagccgggaatcccaaccggagaccccgggaccacaggcacaaagcgagcgcgaaaaccaccacaccacacaaaacaacaacacgccccggcgcagccaacacagcgaggcgaataacaagaaaaccaacaccacacaggcaagaccaacggaagacgcaaaaaaagggagagaataaacgaaaccaagagcacgccaccacggaacacaacgcgaaacaaagcaaaaaacagtcccacaacgcacagaggtgaccaagcgcacaacacaaaccaccacaaccacacaccacaacacaaacagaccaaacccgcgaaaaaaaaaggcgaagagagaaggagacgaaaaaggagaaacggaagagaaagaaagaagaaaagagagcaagggagagaggagagaacgccgcgcgcaaaggcaggagacgacgacgacacagacaagggacaggggagaagagaacgcagaacagacggcgagcgaggggggaggggaggggcgggggggaaggggggcgcggaaacggcggggccaacgaggaggcggggggggggaagaagaggggcagaggaggcgcggggcaaggagggggagggagcgagacagggagccgagaggggggagggaggaggagcggagggcgagggcgccagagcgcggcgaacgcgagaggggaggcaaccagaaggagaggaagcggaggaggacgaggaggggagacgacgagagcgcagggcgacgggaggggaagagacagcagggagagcaggaaacggaaaggggggacgccagaggaccgcgagggagggggccggcgagagaaggcgcagaggcggacgagagaagagaaggagccaggagaacggggaggggggaaaggaacaggaaaagaacacaacgtacgcaaacagaaagccaga

SEQ ID NO: 452380 - DNA, 1642 bp, Homo sapiens
ccgcccttcctgcctaacctgttgtcttggctgaccccagaactcctgcaccacgagtcggagtccgggcgaggagatcagcaggggttttcgagggagcctggggcccagggcaggggtacgcgggtcaactcaacagatgtaaggcgtggccgaaccccattcagctagcagtacccagcctcagccacagtcgctgcccttacccaagatggcggcccacaccgcttcggtcgctgctgtagtgcgcttcctgcggccaggcccgggttcaatcagcggccgacaactgtctagggctcagacaccaccagccaatgagggagggcacgtggagccgcccgtctgggctcgcggctcctggaccaatggggaagtggcatgtgggagggcgccggggttccccccgccaatggggagctacggcgcgcggccgggacttggaggcggtgcggcgcggcgggtgcggttcagtcggtcggcggcggcagcggaggaggaggaggaggaggaggatgaggaggatgaggaggatgtgggccacgcaggggctggcggtggcgctggctctgagcgtgctgccgggcagccgggcgctgcggccgggcgactgcgaagtttgtatttcttatctgggaagattttaccaggacctcaaagacagagatgtcacattctcaccagccactattgaaaacgaacttataaagttctgccgggaagcaagaggcaaagagaatcggttgtgctactatatcggggccacagatgatgcagccaccaaaatcatcaatgaggtatcaaagcctctggcccaccacatccctgtggagaagatctgtgagaagcttaagaagaaggacagccagatatgtgagcttaagtatgacaagcagatcgacctgagcacagtggacctgaagaagctccgagttaaagagctgaagaagattctggatgactggggggagacatgcaaaggctgtgcagaaaagtctgactacatccggaagataaatgaactgatgcctaaatatgcccccaaggcagccagtgcacggaccgatttgtagtctgctcaatctctgttgcacctgagggggaaaaaacagttcaactgcttactcccaaaacagcctttttgtaatttattttttaagtgggctcctgacaatactgtatcagatgtgaagcctggagctttcctgatgatgctggccctacagtacccccatgaggggattcccttccttctgttgctggtgtactctaggacttcaaagtgtgtctgggatttttttattaaagaaaaaaaatttctagctgtcctcgtgccaattcggcacgaggcggcacgaggaaaaagggtctgtccttcctgggattcctagccgaggccagtctgctgccgtgtgcgtgtgcgtcagggctctccgggcggcaatgggggcttgagagccgggtccccagcgccgggaagggagcgcggtggccgccaccgccaccgccccggagtccggcgccgaagctgcgggcgggcgggcgggcaccagctcggtcaggggctgcttggcgcggcactgtgcggtgcagcggcggcgcggcgcggtgcgggcttttcccaggcgccccggggtcgggt

SEQ ID NO: 452381 - DNA, 861 bp, Homo sapiens
  misc_feature (11)..(11): n is a, c, g, or t
  misc_feature (34)..(34): n is a, c, g, or t
  misc_feature (36)..(36): n is a, c, g, or t
  misc_feature (41)..(42): n is a, c, g, or t
  misc_feature (45)..(45): n is a, c, g, or t
gcgaaggaaanaccaaactaaggctaggtacgangnctggnngtngggctggcggtggcgctggctctgagcgtgctgccgggcagccgggcgctgcggccgggcgactgcgaagtttgtatttcttatctgggaagattttaccaggacctcaaagacagagatgtcacattctcaccagccactattgaaaacgaacttataaagttctgccgggaagcaagaggcaaagagaatcggttgtgctactatatcggggccacagatgatgcagccaccaaaatcatcaatgaggtatcaaagcctctggcccaccacatccctgtggagaagatctgtgagaagcttaagaagaaggacagccagatatgtgagcttaagtatgacaagcagatcgacctgagcacagtggacctgaagaagctccgagttaaagagctgaagaagattctggatgactggggggagacatgcaaaggctgtgcagaaaagtctgactacatccggaagataaatgaactgatgcctaaatatgcccccaaggcagccagtgcacggaccgatttgtagtctgctcaatctctgttgcacctgagggggaaaaaacagttcaactgcttactcccaaaacagcctttttgtaatttattttttaagtgggctcctgacaatactgtatcagatgtgaagcctggagctttcctgatgatgctggccctacagtacccccatgaggggattcccttccttctgttgctggtgtactctaggacttcaaagtgtgtctgggatttttttattaaagaaaaaaaatttctagctgtcaaaaaaaaaaacaaaccacaaaaaacaaacccgcgc

SEQ ID NO: 452382 - DNA, 2075 bp, Homo sapiens
ccgcccttcctgcctaacctgttgtcttggctgaccccagaactcctgcaccacgagtcggagtccgggcgaggagatcagcaggggttttcgagggagcctggggcccagggcaggggtacgcgggtcaactcaacagatgtaaggcgtggccgaaccccattcagctagcagtacccagcctcagccacagtcgctgcccttacccaagatggcggcccacaccgcttcggtcgctgctgtagtgcgcttcctgcggccaggcccgggttcaatcagcggccgacaactgtctagggctcagacaccaccagccaatgagggagggcacgtggagccgcccgtctgggctcgcggctcctggaccaatggggaagtggcatgtgggagggcgccggggttccccccgccaatggggagctacggcgcgcggccgggacttggaggcggtgcggcgcggcgggtgcggttcagtcggtcggcggcggcagcggaggaggaggaggaggaggaggatgaggaggatgaggaggatgtgggccacgcaggggctggcggtggcgctggctctgagcgtgctgccgggcagccgggcgctgcggccgggcgactgcgaagtttgtatttcttatctgggaagattttaccaggacctcaaagacagagatgtcacattctcaccagccactattgaaaacgaacttataaagttctgccgggaagcaagaggcaaagagaatcggttggtaagtagctggtgatcctccccaactggccctggctcatgttaaccctcggcttcaccagccgtttgataaaaggccttgcccacctctctgttcaggaagccagctactctctccataaactaatgtgagaagactgaagtgcttctatgtccttcccaaagcagcatgtgttctgcaactgtgatttttttttatcctgttagtctttattaagcacctactatgtgctaggcactgggaatatcaggggaaagaagtgacagtcggacacacaaataatgcaatgtctgggtgtcatgaagaaaatggaccagcaggtgctgatttagagtggccaagaagtctctgaggaagggttatcattgaagtggggtaagaccatcccatacagggaacagcagtgtgagtgcccagaggcctgaaagagtgtggcatgtatgtggacaggagaaggtgacagggtgcctacaggataggcaagggccgaatccaagacaaaagccctagtgaagcaatgggttttctaacttgaatttctctgacagtctctggcttttctctctgttaaaggtttgaaccctggtgacacttaaattcatttggtggctgtcagcttggactgagcatgtgttaagagtccagggtttacactggctgaatctgactaccagtacaggcagggcaccgaaaaatgccgctgtgggccagtgctactatatcggggccacagatgatgcagccaccaaaatcatcaatgaggtatcaaagcctctggcccaccacatccctgtggagaagatctgtgagaagcttaagaagaaggacagccagatatgtgagcttaagtatgacaagcagatcgacctgagcacagtggacctgaagaagctccgagttaaagagctgaagaagattctggatgactggggggagacatgcaaaggctgtgcagaaaagtctgactacatccggaagataaatgaactgatgcctaaatatgcccccaaggcagccagtgcacggaccgatttgtagtctgctcaatctctgttgcacctgagggggaaaaaacagttcaactgcttactcccaaaacagcctttttgtaatttattttttaagtgggctcctgacaatactgtatcagatgtgaagcctggagctttcctgatgatgctggccctacagtacccccatgaggggattcccttccttctgttgctggtgtactctaggacttcaaagtgtgtctgggatttttttattaaagaaaaaaaatttctagctgtcaaaaaaaaaaacaaaccacaaaaaacaaacccgcgc

SEQ ID NO: 452383 - DNA, 1481 bp, Homo sapiens
gcggccgcctactactactactactgctcgaattcaagcttctaacgatgtacggggaacatgcaaaggctgtgcagaaaagtctgactacatccggaagataaatgaactgatgcctaaatatgcccccaaggcagccagtgcacggaccgatttgtagtctgctcaatctctgttgcacctgagggggaaaaaacagttcaactgcttactcccaaaacagcctttttgtaatttattttttaagtgggctcctgacaatactgtatcagatgtgaagcctggagctttcctgatgatgctggccctacagtacccccatgaggggattcccttccttctgttgctggtgtactctaggacttcaaagtgtgtctgggatttttttattaaagaaaaaaaatttctagctgtcaagcacaaaaaaaacaaaaacaacaaacacaaaaaacacggtggggcgccgccacccagcgacccccggaagacaagctaagaagcccaccacgccgggaggggcgggcggacccccaggaaaggcagcggtacaccacgggcccaaagccgggaatcccaaccggagaccccgggaccacaggcacaaagcgagcgcgaaaaccaccacaccacacaaaacaacaacacgccccggcgcagccaacacagcgaggcgaataacaagaaaaccaacaccacacaggcaagaccaacggaagacgcaaaaaaagggagagaataaacgaaaccaagagcacgccaccacggaacacaacgcgaaacaaagcaaaaaacagtcccacaacgcacagaggtgaccaagcgcacaacacaaaccaccacaaccacacaccacaacacaaacagaccaaacccgcgaaaaaaaaaggcgaagagagaaggagacgaaaaaggagaaacggaagagaaagaaagaagaaaagagagcaagggagagaggagagaacgccgcgcgcaaaggcaggagacgacgacgacacagacaagggacaggggagaagagaacgcagaacagacggcgagcgaggggggaggggaggggcgggggggaaggggggcgcggaaacggcggggccaacgaggaggcggggggggggaagaagaggggcagaggaggcgcggggcaaggagggggagggagcgagacagggagccgagaggggggagggaggaggagcggagggcgagggcgccagagcgcggcgaacgcgagaggggaggcaaccagaaggagaggaagcggaggaggacgaggaggggagacgacgagagcgcagggcgacgggaggggaagagacagcagggagagcaggaaacggaaaggggggacgccagaggaccgcgagggagggggccggcgagagaaggcgcagaggcggacgagagaagagaaggagccaggagaacggggaggggggaaaggaacaggaaaagaacacaacgtacgcaaacagaaagccaga

SEQ ID NO: 452384 - DNA, 1271 bp, Homo sapiens
ccgcccttcctgcctaacctgttgtcttggctgaccccagaactcctgcaccacgagtcggagtccgggcgaggagatcagcaggggttttcgagggagcctggggcccagggcaggggtacgcgggtcaactcaacagatgtaaggcgtggccgaaccccattcagctagcagtacccagcctcagccacagtcgctgcccttacccaagatggcggcccacaccgcttcggtcgctgctgtagtgcgcttcctgcggccaggcccgggttcaatcagcggccgacaactgtctagggctcagacaccaccagccaatgagggagggcacgtggagccgcccgtctgggctcgcggctcctggaccaatggggaagtggcatgtgggagggcgccggggttccccccgccaatggggagctacggcgcgcggccgggacttggaggcggtgcggcgcggcgggtgcggttcagtcggtcggcggcggcagcggaggaggaggaggaggaggaggatgaggaggatgaggaggatgtgggccacgcaggggctggcggtggcgctggctctgagcgtgctgccgggcagccgggcgctgcggccgggcgactgcgaaggtgcgggatagggggccgggggccgcgctccgtgaccgttctggcggcggcgctgaaccccacaacatcaccagacggccggggccaagagggcgagggcgggggcgggggcgggggcgacagcaggtccccgcggggcctgcatgaggaggctccggcgcccgccctagtaaatctttcttgggcctagaaaacattggtccgacgaagaaaagttgagactagatcccgttgaaaacttgtcctgaaatctccatcactcctgagttattgtccccaccaccatctagaggttaccgctccccgttcggcgtcgggagctccagggctggccgtgggtgctgcgccctgtctgttgggatcacgaagctgcacctctgggtccgctgttgtatttggaaattagcagcagcattttgatcatttttctcttcaccttccagtctctccatttatgaggtcacagtgagtcccgtctcaaggacacgtgttcaccatgggcttaaacttgatgaaaggagcagggagaagtcgtttataggtcattgggtgatgcttggtcctttgatgccctgggtgtaccaggggacccccgccacttggaaccgggttctgtctacctgtagacacctgagaaaaatcggtgatggaaa

SEQ ID NO: 452385 - DNA, 152 bp, Homo sapiens
gggaggatcaccacccaacagattgaagctgcagggagccgtgatcatgccactgcattccagcctgggtgacagggagccctatctcaaaacacaagtaaggccctacagagagatgatgtttcaaggtgtcagtatgtttggaggagatg

SEQ ID NO: 452386 - DNA, 398 bp, Homo sapiens
agcatctcccgtccctctcttttccagtttgtatttcttatctgggaagattttaccaggacctcaaagacagagatgtcacattctcaccagccactattgaaaacgaacttataaagttctgccgggaagcaagaggcaaagagaatcggttggtaagtagctggtgatcctccccaactggccctggctcatgttaaccctcggcttcaccagccgtttgataaaaggccttgcccacctctctgttcaggaagccagctactctctccataaactaatgtgagaagactgaagtgcttctatgtccttcccaaagcagcatgtgttctgcaactgtgatttttttttatcctgttagtctttattaagcacctactatgtgctaggcactggga

SEQ ID NO: 452387 - DNA, 1364 bp, Homo sapiens
ccgcccttcctgcctaacctgttgtcttggctgaccccagaactcctgcaccacgagtcggagtccgggcgaggagatcagcaggggttttcgagggagcctggggcccagggcaggggtacgcgggtcaactcaacagatgtaaggcgtggccgaaccccattcagctagcagtacccagcctcagccacagtcgctgcccttacccaagatggcggcccacaccgcttcggtcgctgctgtagtgcgcttcctgcggccaggcccgggttcaatcagcggccgacaactgtctagggctcagacaccaccagccaatgagggagggcacgtggagccgcccgtctgggctcgcggctcctggaccaatggggaagtggcatgtgggagggcgccggggttccccccgccaatggggagctacggcgcgcggccgggacttggaggcggtgcggcgcggcgggtgcggttcagtcggtcggcggcggcagcggaggaggaggaggaggaggaggatgaggaggatgaggaggatgtgggccacgcaggggctggcggtggcgctggctctgagcgtgctgccgggcagccgggcgctgcggccgggcgactgcgaagtttgtatttcttatctgggaagattttaccaggacctcaaagacagagatgtcacattctcaccagccactattgaaaacgaacttataaagttctgccgggaagcaagaggcaaagagaatcggttgtgctactatatcggggccacagatgatgcagccaccaaaatcatcaatgaggtatcaaagcctctggcccaccacatccctgtggagaagatctgtgagaagcttaagaagaaggacagccagatatgtgagcttaagtatgacaagcagatcgacctgagcacagtggacctgaagaagctccgagttaaagagctgaagaagattctggatgactggggggagacatgcaaaggctgtgcagaaaagtctgactacatccggaagataaatgaactgatgcctaaatatgcccccaaggcagccagtgcacggaccgatttgtagtctgctcaatctctgttgcacctgagggggaaaaaacagttcaactgcttactcccaaaacagcctttttgtaatttattttttaagtgggctcctgacaatactgtatcagatgtgaagcctggagctttcctgatgatgctggccctacagtacccccatgaggggattcccttccttctgttgctggtgtactctaggacttcaaagtgtgtctgggatttttttattaaagaaaaaaaatttctagctgtcaaaaaaaaaaacaaaccacaaaaaacaaacccgcgc

SEQ ID NO: 452388 - DNA, 872 bp, Homo sapiens
acataacggtcaggtacgaggctggtgtgaatcggcagaggatgtgggccacgcaggggctggcggtggcgctggctctgagcgtgctgccgggcagccgggcgctgcggccgggcgactgcgaagtttgtatttcttatctgggaagattttaccaggacctcaaagacagagatgtcacattctcaccagccactattgaaaacgaacttataaagttctgccgggaagcaagaggcaaagagaatcggttgtgctactatatcggggccacagatgatgcagccaccaaaatcatcaatgaggtatcaaagcctctggcccaccacatccctgtggagaagatctgtgagaagcttaagaagaaggacagccagatatgtgagcttaagtatgacaagcagatcgacctgagcacagtggacctgaagaagctccgagttaaagagctgaagaagattctggatgactggggggagacatgcaaaggctgtgcagaaaagtctgactacatccggaagataaatgaactgatgcctaaatatgcccccaaggcagccagtgcacggaccgatttgtagtctgctcaatctctgttgcacctgagggggaaaaaacagttcaactgcttactcccaaaacagcctttttgtaatttattttttaagtgggctcctgacaatactgtatcagatgtgaagcctggagctttcctgatgatgctggccctacagtacccccatgaggggattcccttccttctgttgctggtgtactctaggacttcaaagtgtgtctgggatttttttattaaagaaaaaaaatttctagctgtcaaaaaaaaaaacaaaccacaaaaaacaaacccgcgc

SEQ ID NO: 452389 - DNA, 1502 bp, Homo sapiens
ccgcccttcctgcctaacctgttgtcttggctgaccccagaactcctgcaccacgagtcggagtccgggcgaggagatcagcaggggttttcgagggagcctggggcccagggcaggggtacgcgggtcaactcaacagatgtaaggcgtggccgaaccccattcagctagcagtacccagcctcagccacagtcgctgcccttacccaagatggcggcccacaccgcttcggtcgctgctgtagtgcgcttcctgcggccaggcccgggttcaatcagcggccgacaactgtctagggctcagacaccaccagccaatgagggagggcacgtggagccgcccgtctgggctcgcggctcctggaccaatggggaagtggcatgtgggagggcgccggggttccccccgccaatggggagctacggcgcgcggccgggacttggaggcggtgcggcgcggcgggtgcggttcagtcggtcggcggcggcagcggaggaggaggaggaggaggaggatgaggaggatgaggaggatgtgggccacgcaggggctggcggtggcgctggctctgagcgtgctgccgggcagccgggcgctgcggccgggcgactgcgaagtttgtatttcttatctgggaagattttaccaggacctcaaagacagagatgtcacattctcaccagccactattgaaaacgaacttataaagttctgccgggaagcaagaggcaaagagaatcggttggtttgaaccctggtgacacttaaattcatttggtggctgtcagcttggactgagcatgtgttaagagtccagggtttacactggctgaatctgactaccagtacaggcagggcaccgaaaaatgccgctgtgggccagtgctactatatcggggccacagatgatgcagccaccaaaatcatcaatgaggtatcaaagcctctggcccaccacatccctgtggagaagatctgtgagaagcttaagaagaaggacagccagatatgtgagcttaagtatgacaagcagatcgacctgagcacagtggacctgaagaagctccgagttaaagagctgaagaagattctggatgactggggggagacatgcaaaggctgtgcagaaaagtctgactacatccggaagataaatgaactgatgcctaaatatgcccccaaggcagccagtgcacggaccgatttgtagtctgctcaatctctgttgcacctgagggggaaaaaacagttcaactgcttactcccaaaacagcctttttgtaatttattttttaagtgggctcctgacaatactgtatcagatgtgaagcctggagctttcctgatgatgctggccctacagtacccccatgaggggattcccttccttctgttgctggtgtactctaggacttcaaagtgtgtctgggatttttttattaaagaaaaaaaatttctagctgtcaaaaaaaaaaacaaaccacaaaaaacaaacccgcgc

SEQ ID NO: 452390 - DNA, 1533 bp, Homo sapiens
ccgcccttcctgcctaacctgttgtcttggctgaccccagaactcctgcaccacgagtcggagtccgggcgaggagatcagcaggggttttcgagggagcctggggcccagggcaggggtacgcgggtcaactcaacagatgtaaggcgtggccgaaccccattcagctagcagtacccagcctcagccacagtcgctgcccttacccaagatggcggcccacaccgcttcggtcgctgctgtagtgcgcttcctgcggccaggcccgggttcaatcagcggccgacaactgtctagggctcagacaccaccagccaatgagggagggcacgtggagccgcccgtctgggctcgcggctcctggaccaatggggaagtggcatgtgggagggcgccggggttccccccgccaatggggagctacggcgcgcggccgggacttggaggcggtgcggcgcggcgggtgcggttcagtcggtcggcggcggcagcggaggaggaggaggaggaggaggatgaggaggatgaggaggatgtgggccacgcaggggctggcggtggcgctggctctgagcgtgctgccgggcagccgggcgctgcggccgggcgactgcgaagtttgtatttcttatctgggaagattttaccaggacctcaaagacagagatgtcacattctcaccagccactattgaaaacgaacttataaagttctgccgggaagcaagaggcaaagagaatcggttgtgctactatatcggggccacagatgatgcagccaccaaaatcatcaatgaggtatcaaagcctctggcccaccacatccctgtggagaagatctgtgagaagcttaagaagaaggacagccagatatgtgagcttaagtatgacaagcagatcgacctgagcacagtggacctgaagaagctccgagttaaagagctgaagaagattctggatgactggggggagacatgcaaaggctgtgcagaaaagtctgactacatccggaagataaatgaactgatgcctaaatatgcccccaaggcagccagtgcacggaccgatttgtagtctgctcaatctctgttgcacctgagggggaaaaaacagttcaactgcttactcccaaaacagcctttttgtaatttattttttaagtgggctcctgacaatactgtatcagatgtgaagcctggagctttcgttgctggtgtactctaggacttcaaagtgtgtctgggatttttttattaaagaaaaaaaatttctagctgtccttgcagaattatagtgaataccaaaatggggttttgccccaggaggctcctaccagtttctgctttccagttgcagagtttggggggttattcattcccatttatctctcaacccaccagtgctgaaaataccagagcaggacataggggctggggccagctgatgtgtgtgggtgtgtaccactagagggcagcaggcactcagcagaaaggaggtggcgggggcggggggtgctgcgcttgataccctgccc

SEQ ID NO: 452391 - DNA, 3382 bp, Homo sapiens
tccggtcttgcgcgctcaggccgggcaacgtccgtgcgttctttttgggtcctgaaccccggaagagaaactgcgttgtacccttttacgtgaggcggtgacggcggttcggaagtcgtctggcctccccgcggccgctcgcagcttgctggcctctcccgcgcctcacgtcggactccgtctccgcggcagggaagcagcatggaagctgaggacatccaggaggagttgacctgccccatctgcctggactatttccaggacccggtgtccatcgagtgcggccacaacttctgccgcggctgcctgcaccgcaactgggcgccgggcggcggcccgttcccctgccccgaatgtcggcacccatcggcgcccgccgcgctgcgacccaactgggccctggccaggctgactgagaagacgcagcgccggcgcctgggccccgtgcccccgggcctgtgcggccgccactgggagccgctgcggctcttctgcgaggacgaccagcggccagtgtgcctggtgtgcagggagtcccaggagcaccagactcacgccatggcacccatcgacgaggccttcgagagctaccgggagaaacttcttaagtctcagcgtaatctcgtggccaagatgaagaaagtcatgcatttacaggatgtagaagtgaagaacgccacacagtggaaggataagataaagagtcagcgaatgagaatcagcacggagttttcaaagctgcacaacttcctggttgaagaagaggacctgtttcttcagagattgaacaaagaagaagaagagacgaagaagaagctgaatgagaacacgttaaaactcaatcaaactatcgcttcattgaagaagctcatcttagaggtgggggagaagagccaggctcccaccctggagctgcttcagaatccaaaagaagtgttgaccaggagtgagatccaggatgtgaactattcccttgaagctgtgaaggtgaagacagtgtgccagataccattgatgaaggaaatgctaaagcgattccaagtggctgtaaacctagctgaagacacagctcatcccaaactcgtcttctcccaggaagggagatacgtgaaaaatacagcatcagccagttcttggccagtgttttcttcagcatggaactactttgctggatggaggaatcctcagaagactgcttttgtagagagatttcagcacttaccctgtgttctgggaaaaaacgttttcacctcagggaaacattactgggaagttgagagtagagatagtctggaggttgctgttggggtgtgtcgggaggacgtcatgggaattactgatcgttcaaaaatgtccccagatgtgggcatctgggcgatttattggagtgctgctggctattggcccttgataggcttccctggaactcccacccagcaagagccagctctccaccgagtgggggtttacctggatcgtgggactgggaatgtctccttctacagcgctgtggacggagtgcacctgcacaccttttcttgttcttctgtctcacgcctccggccatttttttggttgagtccattagcatctttagtcattccaccagtgactgataggaaatgaggcttttcttcccctgaccaaaactccttccctgtagtccagctgagggacacacatccctgggccctcttctgcccttcatgtctctatcctggatggtccatcttctgggtctccctaacggtaccgtttggtatctgccctttgtgtgcttcacaagaggcagtcccatgggaggtgggtctggccaatggagatgggacaggaaattttccaagacgcttttgggaaatctttttgtagcttttaaagagatgtgcggggaagacatatggatgttagcagccatattggaactgagaacacaggaatggtggaaaggtagaagaaacagagtttttgttgccgttgtgaaattgttgaaatttccttcatgccaagcttcttgttatatgagataattacgcccttattgtataagacaattttagttgtatttggttacttgcagcctgaagtaccgtaactgcactaaagggacgtagtgtgaacatcccgcagtataggcttaagtcacttttgtgaaatttgacaaaggcatagaatctttttctatccagtcaggcattgcctattctttccagtaactactgattcccccacttttctgtcttagaaaattgtgggaatcccccctcactctgcctatgttgcactctctctcttcccaaccataactctgccctcagctattaactgtgctgtgtatttatcaagttggtatgttgtatgtacagtgttattcatgtcatcatgagaatgttgaacgcttgttaaataccttttgctagcctcttcatatgctgttgcatatgactctcatcacaactcagtgagatggaaagacaaatcctatttgtacaaatgagaaaactgaactctttagagtaactagctcagtattggccagctggtaaatggcagtgttgggattaaaatccagttcttatctactctccctttattcagaagcatttattggatgttgatctttgtttcaggttttgattttgttacttttttatactgtgtatattttcctcagtctacccttctgctctagattgtctggactcaggagattgtggcagttactggatagttatttttaagataatgattgcttttctctgtttatataagtcatgtgtacttattgtagaaagtttgtaagatgcaaaaagtataaaaattaaagttatgcactactaacatttcaatatattttctcccagattttcaataaagactttcaggcagtgatttaacgaggattttattttaacttatattttagtttaaggggaacacgtgcaggtttgttctatagatcaattacatgtcacaggggtttggtgtacatattatttcattacccaggtaataagcatagtacccaatagatacttttttgataccccaccctcctccaccctctaccctcaagtagtccctggtgtctgttgttcccttttttgtgtccatgggtactcaatgtttagctctcccttatacgtgagaacatgtgatgtttggttttctgttcatgtgttggtttgcttagggtaatggcctccagctccatccatgttgctgcaaagacatgatctcattctttttttatggctgcatagtattccatggtgtatatgtactatgttttctttatccagtctactgttgatgggcatttaggttgattccatgtctttgctattgtgaatagtgctgcaatgaatatatacatgcatatgtc

SEQ ID NO: 452392 - DNA, 872 bp, Homo sapiens
tccggtcttgcgcgctcaggccgggcaacgtccgtgcgttctttttgggtcctgaaccccggaagagaaactgcgttgtacccttttacgtgaggcggtgacggcggttcggaagtcgtctggcctccccgcggccgctcgcagcttgctggcctctcccgcgcctcacgtcggactccgtctccgcggcagggaagcagcatggaagctgaggacatccaggaggagttgacctgccccatctgcctggactatttccaggacccggtgtccatcgagtgcggccacaacttctgccgcggctgcctgcaccgcaactgggcgccgggcggcggcccgttcccctgccccgaatgtcggcacccatcggcgcccgccgcgctgcgacccaactgggccctggccaggctgactgagaagacgcagcgccggcgcctgggccccgtgcccccgggcctgtgcggccgccactgggagccgctgcggctcttctgcgaggacgaccagcggccagtgtgcctggtgtgcagggagtcccaggagcaccagactcacgccatggcacccatcgacgaggccttcgagagctaccgggtgagctggccgtcgcggtgactatgacggggctgtcagtgttgcccgataaagtttacttaatgctcctaaaagagccacgaagtggctgtcattcctactggaagcatgaaaagcccctgaaactcaaagaagttaagcaaaacacgaatttcagagctagggttaaaactggaatgagaggaggggaggtgcaaacctcagcaatcattgtgcagaattttcaataaactggcccttggggagctcataataaagaaaaacacctcgtgccgagt

SEQ ID NO: 452393 - DNA, 2633 bp, Homo sapiens
tccggtcttgcgcgctcaggccgggcaacgtccgtgcgttctttttgggtcctgaaccccggaagagaaactgcgttgtacccttttacgtgaggcggtgacggcggttcggaagtcgtctggcctccccgcggccgctcgcagcttgctggcctctcccgcgcctcacgtcggactccgtctccgcggcagggaagcagcatggaagctgaggacatccaggaggagttgacctgccccatctgcctggactatttccaggacccggtgtccatcgagtgcggccacaacttctgccgcggctgcctgcaccgcaactgggcgccgggcggcggcccgttcccctgccccgaatgtcggcacccatcggcgcccgccgcgctgcgacccaactgggccctggccaggctgactgagaagacgcagcgccggcgcctgggccccgtgcccccgggcctgtgcggccgccactgggagccgctgcggctcttctgcgaggacgaccagcggccagtgtgcctggtgtgcagggagtcccaggagcaccagactcacgccatggcacccatcgacgaggccttcgagagctaccgggagaaacttcttaagtctcagcgtaatctcgtggccaagatgaagaaagtcatgcatttacaggatgtagaagtgaagaacgccacacagtggaaggataagataaagagtcagcgaatgagaatcagcacggagttttcaaagctgcacaacttcctggttgaagaagaggacctgtttcttcagagattgaacaaagaagaagaagagacgaagaagaagctgaatgagaacacgttaaaactcaatcaaactatcgcttcattgaagaagctcatcttagaggtgggggagaagagccaggctcccaccctggagctgcttcagaatccaaaagaagtgttgaccaggagtgagatccaggatgtgaactattcccttgaagctgtgaaggtgaagacagtgtgccagataccattgatgaaggaaatgctaaagcgattccaagcaactaaaataaaaacacaaaaacaaaacaggcacaatatgtgaaacaaccgttttcaaagcaccagacgtcaggcagtgaagggcggtgattcctgagaaatgtgaaacaaatgaggtcagcctatgattgccctaccctctgcctgagggagtttccagaccatgtaaggctgaggtaactgaggtagagccagggagacttgctgagttgaggaatagacctgggagttcacggagaacaaagtagtgagagttcgcaaagtactgggcagtatcctggagcggagagagccggacacagagagaaccctcgccatctatggaggagcttcctagttgtttggcagagttctgatcagcacatgcctgtgaaaatctactcaaggctggagatagaagcttctaaaacgattagagggaacggttcctggtgctcacacagggccaggaacagtgccagttcctatcagccacaccagaaaactcgtagttcacgggcactgagtagcgtactcaggaaaatcttgcctcattagcagaaaatatttagcccttgactgggtgctgctccacacccaccttacaaatcatgaaagcaagacccaaaggggtcaaactctttccaactaacttaactgcatcccaggataaagccctagaaaattggtagaaataaacaaaaaaagagcacctaacaatataaattcacaatgtctggcatccagtcaaatatgcatgcaaaaagataggaaagcagtgacccataatggaggaaaataatcaactgaaactgacctagaattgacacagatgttagaataagcatggaaggactttaaaacatttattatgagtgtattctgtaaagaggtacatagagaccagatcaaagttttaaagatgaaaaatgtgattaaggcgaagaatgcactggatgggattaatagttgattaaatattacaaaagaaaaaattggtgaacttgaagacagagcaatggaaactacaaaaaaatgaaacatacacagaataaaacaatttacaaaaacacaaagagcatcagtgacctgtgggacaactttatgcagccttattatctatggtgattggcgtccctgaaagagaggagtggggagggagatggaataggaaaaatacttgaagacataatggccaaagattttctgaatataataaaaactaagtccacagatccaagatgctcaacaaaccctgagtatgagaaatatgaagaaaaatatgccaaggctcatcataacttgctggaaaccagtgttaaaaagaaaatcttaaatgcaaccaggggagaggatagttacttgcagtggaacaaagacgaagttgacattacacttctcattggaaacaatgccagtaagcaaactctttaaagtcctgaaagaaaaaaactgttaactctttcttttaagctttagtttacctccaaacttatttatttcacctttgtttttgaaggatatttttttgccagctctagaactctaggttaacagtttttttctttcaggactttaaagagtttgcttactggcattgtttccaatgag

SEQ ID NO: 452394 - DNA, 1868 bp, Homo sapiens
tgacacaggggctaggcatgccctgtgatgggagcagaatagtgaagcgattccctattgactaatgcctaggtgtattaagttcattgctttgcgaaaggtaaggaaatgaggcttttcttcccctgaccaaaactccttccctgtagtccagctgagggacacacatccctgggccctcttctgcccttcatgtctctatcctggatggtccatcttctgggtctccctaacggtaccgtttggtatctgccctttgtgtgcttcacaagaggcagtcccatgggaggtgggtctggccaatggagatgggacaggaaattttccaagacgcttttgggaaatctttttgtagcttttaaagagatgtgcggggaagacatatggatgttagcagccatattggaactgagaacacaggaatggtggaaaggtagaagaaacagagtttttgttgccgttgtgaaattgttgaaatttccttcatgccaagcttcttgttatatgagataattacgcccttattgtataagacaattttagttgtatttggttacttgcagcctgaagtaccgtaactgcactaaagggacgtagtgtgaacatcccgcagtataggcttaagtcacttttgtgaaatttgacaaaggcatagaatctttttctatccagtcaggcattgcctattctttccagtaactactgattcccccacttttctgtcttagaaaattgtgggaatcccccctcactctgcctatgttgcactctctctcttcccaaccataactctgccctcagctattaactgtgctgtgtatttatcaagttggtatgttgtatgtacagtgttattcatgtcatcatgagaatgttgaacgcttgttaaataccttttgctagcctcttcatatgctgttgcatatgactctcatcacaactcagtgagatggaaagacaaatcctatttgtacaaatgagaaaactgaactctttagagtaactagctcagtattggccagctggtaaatggcagtgttgggattaaaatccagttcttatctactctccctttattcagaagcatttattggatgttgatctttgtttcaggttttgattttgttacttttttatactgtgtatattttcctcagtctacccttctgctctagattgtctggactcaggagattgtggcagttactggatagttatttttaagataatgattgcttttctctgtttatataagtcatgtgtacttattgtagaaagtttgtaagatgcaaaaagtataaaaattaaagttatgcactactaacatttcaatatattttctcccagattttcaataaagactttcaggcagtgatttaacgaggattttattttaacttatattttagtttaaggggaacacgtgcaggtttgttctatagatcaattacatgtcacaggggtttggtgtacatattatttcattacccaggtaataagcatagtacccaatagatacttttttgataccccaccctcctccaccctctaccctcaagtagtccctggtgtctgttgttcccttttttgtgtccatgggtactcaatgtttagctctcccttatacgtgagaacatgtgatgtttggttttctgttcatgtgttggtttgcttagggtaatggcctccagctccatccatgttgctgcaaagacatgatctcattctttttttatggctgcatagtattccatggtgtatatgtactatgttttctttatccagtctactgttgatgggcatttaggttgattccatgtctttgctattgtgaatagtgctgcaatgaatatatacatgcatatgtc

SEQ ID NO: 452395 - DNA, 1257 bp, Homo sapiens
tccggtcttgcgcgctcaggccgggcaacgtccgtgcgttctttttgggtcctgaaccccggaagagaaactgcgttgtacccttttacgtgaggcggtgacggcggttcggaagtcgtctggcctccccgcggccgctcgcagcttgctggcctctcccgcgcctcacgtcggactccgtctccgcggcagggaagcagcatggaagctgaggacatccaggaggagttgacctgccccatctgcctggactatttccaggacccggtgtccatcgagtgcggccacaacttctgccgcggctgcctgcaccgcaactgggcgccgggcggcggcccgttcccctgccccgaatgtcggcacccatcggcgcccgccgcgctgcgacccaactgggccctggccaggctgactgagaagacgcagcgccggcgcctgggccccgtgcccccgggcctgtgcggccgccactgggagccgctgcggctcttctgcgaggacgaccagcggccagtgtgcctggtgtgcagggagtcccaggagcaccagactcacgccatggcacccatcgacgaggccttcgagagctaccgggagaaacttcttaagtctcagcgtaatctcgtggccaagatgaagaaagtcatgcatttacaggatgtagaagtgaagaacgccacacagtggaaggataagataaagagtcagcgaatgagaatcagcacggagttttcaaagctgcacaacttcctggttgaagaagaggacctgtttcttcagagattgaacaaagaagaagaagagacgaagaagaagctgaatgagaacacgttaaaactcaatcaaactatcgcttcattgaagaagctcatcttagaggtgggggagaagagccaggctcccaccctggagctgcttcaggtgagacagttacgagtgggggtgatctcatcttcactaactgaactctctcttgtctttagagctgaatgtccttcctggtgagtgggtttcatagacatgtcttatctcttgctagttctgtgctgtcacataactaaaaagccaaagattcaccattcaaaggaaattaatgtgaaatgtaggtatgctgagctcagctcataggagataagttgattcacacagtctcatagttcatctaggatctgagacttagcacatataagatttttttcattcatcttatgtgtacatttataattattaaacaataaaacaaagcaagcataaaac

SEQ ID NO: 452396 - DNA, 1150 bp, Homo sapiens
agcacctaacaatataaattcacaatgtctggcatccagtcaaatatgcatgcaaaaagataggaaagcagtgacccataatggaggaaaataatcaactgaaactgacctagaattgacacagatgttagaaataaacaaaaaaagagcacctaacaatataaattcacaatgtctggcatccagtcaaatatgcatgcaaaaagataggaaagcagtgacccataatggaggaaaataatcaactgaaactgacctagaattgacacagatgttagaataagcatggaaggactttaaaacatttattatgagtgtattctgtaaagaggtacatagagaccagatcaaagttttaaagatgaaaaatgtgattaaggcgaagaatgcactggatgggattaatagttgattaaatattacaaaagaaaaaattggtgaacttgaagacagagcaatggaaactacaaaaaaatgaaacatacacagaataaaacaatttacaaaaacacaaagagcatcagtgacctgtgggacaactttatgcagccttattatctatggtgattggcgtccctgaaagagaggagtggggagggagatggaataggaaaaatacttgaagacataatggccaaagattttctgaatataataaaaactaagtccacagatccaagatgctcaacaaaccctgagtatgagaaatatgaagaaaaatatgccaaggctcatcataacttgctggaaaccagtgttaaaaagaaaatcttaaatgcaaccaggggagaggatagttacttgcagtggaacaaagacgaagttgacattacacttctcattggaaacaatgccagtaagcaaactctttaaagtcctgaaagaaaaaaactgttaacctagagttctagaactggcaaaaaatatccttcaaaaacaaaggtgaaataaataagtttggaggtaaactaaagcttaaaagaaagagtttacagcagactgacacttcaagaaaggaagtcttaaaggaagtccttcagacagaaggaaaatgccagatggaaatctctctacacaaaggaataaaagagcaccagaaatggtaatgacacgaataaatatatattattgtcattatttattcctttaa

SEQ ID NO: 452397 - DNA, 799 bp, Homo sapiens
tgagatccaggatgtgaactattcccttgaagctgtgaaggtgaagacagtgtgccagataccattgatgaaggaaatgctaaagcgattccaaggtgagcagaatttctaggacttggggctccttagaaatctttcaaataggagaataaagagagaagtctggagaggaaagaggaaacagcatgcagctaatagagtgtcaggaaaggtggttaataaatgggtatacacttcattcaagaaacatttatttaacgcactgttacaaggtgctagtgatacaaaaagaagagacctgttcacttcttcatgagttcgtaagcacattggagagacagacacacagcactcacagtgatatagtaggagccagtgtttgctggtggtaggaataaaatgttacagaaattcagaggaagggctctgttgggggcgagatgggaaagttttcacagcagaggcgacagttttgagatttgagggattagtaggagtttggcaggtggaaaacagggatgactgtttcaagcagaagcagcagcatgagctaaggtgtggagaacatggaggggtgggtatccaaagaggctaaagaacaaggtgtattttgaggaaaggtagaggttgaggttgagaagaagagtgtaggacagactgaaaataaactcattggatctccagggaggcaccaaggcaggtacatgctctagaagctgtgctggtgattcttatgtgcacatgtttgattaagaaccatgttgtaggccgggcacgaaggctcatgtctgtaatccca

SEQ ID NO: 452398 - DNA, 3460 bp, Homo sapiens
tccggtcttgcgcgctcaggccgggcaacgtccgtgcgttctttttgggtcctgaaccccggaagagaaactgcgttgtacccttttacgtgaggcggtgacggcggttcggaagtcgtctggcctccccgcggccgctcgcagcttgctggcctctcccgcgcctcacgtcggactccgtctccgcggcagggaagcagcatggaagctgaggacatccaggaggagttgacctgccccatctgcctggactatttccaggacccggtgtccatcgagtgcggccacaacttctgccgcggctgcctgcaccgcaactgggcgccgggcggcggcccgttcccctgccccgaatgtcggcacccatcggcgcccgccgcgctgcgacccaactgggccctggccaggctgactgagaagacgcagcgccggcgcctgggccccgtgcccccgggcctgtgcggccgccactgggagccgctgcggctcttctgcgaggacgaccagcggccagtgtgcctggtgtgcagggagtcccaggagcaccagactcacgccatggcacccatcgacgaggccttcgagagctaccggacaggtaactttgacatccacgtggatgaatggaagagaagactaattaggctgctcttgtaccattctaagcaggaggagaaacttcttaagtctcagcgtaatctcgtggccaagatgaagaaagtcatgcatttacaggatgtagaagtgaagaacgccacacagtggaaggataagataaagagtcagcgaatgagaatcagcacggagttttcaaagctgcacaacttcctggttgaagaagaggacctgtttcttcagagattgaacaaagaagaagaagagacgaagaagaagctgaatgagaacacgttaaaactcaatcaaactatcgcttcattgaagaagctcatcttagaggtgggggagaagagccaggctcccaccctggagctgcttcagaatccaaaagaagtgttgaccaggagtgagatccaggatgtgaactattcccttgaagctgtgaaggtgaagacagtgtgccagataccattgatgaaggaaatgctaaagcgattccaagtggctgtaaacctagctgaagacacagctcatcccaaactcgtcttctcccaggaagggagatacgtgaaaaatacagcatcagccagttcttggccagtgttttcttcagcatggaactactttgctggatggaggaatcctcagaagactgcttttgtagagagatttcagcacttaccctgtgttctgggaaaaaacgttttcacctcagggaaacattactgggaagttgagagtagagatagtctggaggttgctgttggggtgtgtcgggaggacgtcatgggaattactgatcgttcaaaaatgtccccagatgtgggcatctgggcgatttattggagtgctgctggctattggcccttgataggcttccctggaactcccacccagcaagagccagctctccaccgagtgggggtttacctggatcgtgggactgggaatgtctccttctacagcgctgtggacggagtgcacctgcacaccttttcttgttcttctgtctcacgcctccggccatttttttggttgagtccattagcatctttagtcattccaccagtgactgataggaaatgaggcttttcttcccctgaccaaaactccttccctgtagtccagctgagggacacacatccctgggccctcttctgcccttcatgtctctatcctggatggtccatcttctgggtctccctaacggtaccgtttggtatctgccctttgtgtgcttcacaagaggcagtcccatgggaggtgggtctggccaatggagatgggacaggaaattttccaagacgcttttgggaaatctttttgtagcttttaaagagatgtgcggggaagacatatggatgttagcagccatattggaactgagaacacaggaatggtggaaaggtagaagaaacagagtttttgttgccgttgtgaaattgttgaaatttccttcatgccaagcttcttgttatatgagataattacgcccttattgtataagacaattttagttgtatttggttacttgcagcctgaagtaccgtaactgcactaaagggacgtagtgtgaacatcccgcagtataggcttaagtcacttttgtgaaatttgacaaaggcatagaatctttttctatccagtcaggcattgcctattctttccagtaactactgattcccccacttttctgtcttagaaaattgtgggaatcccccctcactctgcctatgttgcactctctctcttcccaaccataactctgccctcagctattaactgtgctgtgtatttatcaagttggtatgttgtatgtacagtgttattcatgtcatcatgagaatgttgaacgcttgttaaataccttttgctagcctcttcatatgctgttgcatatgactctcatcacaactcagtgagatggaaagacaaatcctatttgtacaaatgagaaaactgaactctttagagtaactagctcagtattggccagctggtaaatggcagtgttgggattaaaatccagttcttatctactctccctttattcagaagcatttattggatgttgatctttgtttcaggttttgattttgttacttttttatactgtgtatattttcctcagtctacccttctgctctagattgtctggactcaggagattgtggcagttactggatagttatttttaagataatgattgcttttctctgtttatataagtcatgtgtacttattgtagaaagtttgtaagatgcaaaaagtataaaaattaaagttatgcactactaacatttcaatatattttctcccagattttcaataaagactttcaggcagtgatttaacgaggattttattttaacttatattttagtttaaggggaacacgtgcaggtttgttctatagatcaattacatgtcacaggggtttggtgtacatattatttcattacccaggtaataagcatagtacccaatagatacttttttgataccccaccctcctccaccctctaccctcaagtagtccctggtgtctgttgttcccttttttgtgtccatgggtactcaatgtttagctctcccttatacgtgagaacatgtgatgtttggttttctgttcatgtgttggtttgcttagggtaatggcctccagctccatccatgttgctgcaaagacatgatctcattctttttttatggctgcatagtattccatggtgtatatgtactatgttttctttatccagtctactgttgatgggcatttaggttgattccatgtctttgctattgtgaatagtgctgcaatgaatatatacatgcatatgtc

SEQ ID NO: 452399 - DNA, 2733 bp, Homo sapiens
tccggtcttgcgcgctcaggccgggcaacgtccgtgcgttctttttgggtcctgaaccccggaagagaaactgcgttgtacccttttacgtgaggcggtgacggcggttcggaagtcgtctggcctccccgcggccgctcgcagcttgctggcctctcccgcgcctcacgtcggactccgtctccgcggcagggaagcagcatggaagctgaggacatccaggaggagttgacctgccccatctgcctggactatttccaggacccggtgtccatcgagtgcggccacaacttctgccgcggctgcctgcaccgcaactgggcgccgggcggcggcccgttcccctgccccgaatgtcggcacccatcggcgcccgccgcgctgcgacccaactgggccctggccaggctgactgagaagacgcagcgccggcgcctgggccccgtgcccccgggcctgtgcggccgccactgggagccgctgcggctcttctgcgaggacgaccagcggccagtgtgcctggtgtgcagggagtcccaggagcaccagactcacgccatggcacccatcgacgaggccttcgagagctaccgggagaaacttcttaagtctcagcgtaatctcgtggccaagatgaagaaagtcatgcatttacaggatgtagaagtgaagaacgccacacagtggaaggataagataaagagtcagcgaatgagaatcagcacggagttttcaaagctgcacaacttcctggttgaagaagaggacctgtttcttcagagattgaacaaagaagaagaagagacgaagaagaagctgaatgagaacacgttaaaactcaatcaaactatcgcttcattgaagaagctcatcttagaggtgggggagaagagccaggctcccaccctggagctgcttcagaatccaaaagaagtgttgaccaggagtgagatccaggatgtgaactattcccttgaagctgtgaaggtgaagacagtgtgccagataccattgatgaaggaaatgctaaagcgattccaagcaactaaaataaaaacacaaaaacaaaacaggcacaatatgtgaaacaaccgttttcaaagcaccagacgtcaggcagtgaagggcggtgattcctgagaaatgtgaaacaaatgaggtcagcctatgattgccctaccctctgcctgagggagtttccagaccatgtaaggctgaggtaactgaggtagagccagggagacttgctgagttgaggaatagacctgggagttcacggagaacaaagtagtgagagttcgcaaagtactgggcagtatcctggagcggagagagccggacacagagagaaccctcgccatctatggaggagcttcctagttgtttggcagagttctgatcagcacatgcctgtgaaaatctactcaaggctggagatagaagcttctaaaacgattagagggaacggttcctggtgctcacacagggccaggaacagtgccagttcctatcagccacaccagaaaactcgtagttcacgggcactgagtagcgtactcaggaaaatcttgcctcattagcagaaaatatttagcccttgactgggtgctgctccacacccaccttacaaatcatgaaagcaagacccaaaggggtcaaactctttccaactaacttaactgcatcccaggataaagccctagaaaattggtagaaataaacaaaaaaagagcacctaacaatataaattcacaatgtctggcatccagtcaaatatgcatgcaaaaagataggaaagcagtgacccataatggaggaaaataatcaactgaaactgacctagaattgacacagatgttagaataagcatggaaggactttaaaacatttattatgagtgtattctgtaaagaggtacatagagaccagatcaaagttttaaagatgaaaaatgtgattaaggcgaagaatgcactggatgggattaatagttgattaaatattacaaaagaaaaaattggtgaacttgaagacagagcaatggaaactacaaaaaaatgaaacatacacagaataaaacaatttacaaaaacacaaagagcatcagtgacctgtgggacaactttatgcagccttattatctatggtgattggcgtccctgaaagagaggagtggggagggagatggaataggaaaaatacttgaagacataatggccaaagattttctgaatataataaaaactaagtccacagatccaagatgctcaacaaaccctgagtatgagaaatatgaagaaaaatatgccaaggctcatcataacttgctggaaaccagtgttaaaaagaaaatcttaaatgcaaccaggggagaggatagttacttgcagtggaacaaagacgaagttgacattacacttctcattggaaacaatgccagtaagcaaactctttaaagtcctgaaagaaaaaaactgttaacctagagttctagaactggcaaaaaatatccttcaaaaacaaaggtgaaataaataagtttggaggtaaactaaagcttaaaagaaagagtttacagcagactgacacttcaagaaaggaagtcttaaaggaagtccttcagacagaaggaaaatgccagatggaaatctctctacacaaaggaataaaagagcaccagaaatggtaatgacacgaataaatatatattattgtcattatttattcctttaa

SEQ ID NO: 452400 - DNA, 2413 bp, Homo sapiens
tccggtcttgcgcgctcaggccgggcaacgtccgtgcgttctttttgggtcctgaaccccggaagagaaactgcgttgtacccttttacgtgaggcggtgacggcggttcggaagtcgtctggcctccccgcggccgctcgcagcttgctggcctctcccgcgcctcacgtcggactccgtctccgcggcagggaagcagcatggaagctgaggacatccaggaggagttgacctgccccatctgcctggactatttccaggacccggtgtccatcgagtgcggccacaacttctgccgcggctgcctgcaccgcaactgggcgccgggcggcggcccgttcccctgccccgaatgtcggcacccatcggcgcccgccgcgctgcgacccaactgggccctggccaggctgactgagaagacgcagcgccggcgcctgggccccgtgcccccgggcctgtgcggccgccactgggagccgctgcggctcttctgcgaggacgaccagcggccagtgtgcctggtgtgcagggagtcccaggagcaccagactcacgccatggcacccatcgacgaggccttcgagagctaccgggagaaacttcttaagtctcagcgtaatctcgtggccaagatgaagaaagtcatgcatttacaggatgtagaagtgaagaacgccacacagtggaaggataagataaagagtcagcgaatgagaatcagcacggagttttcaaagctgcacaacttcctggttgaagaagaggacctgtttcttcagagattgaacaaagaagaagaagagacgaagaagaagctgaatgagaacacgttaaaactcaatcaaactatcgcttcattgaagaagctcatcttagaggtgggggagaagagccaggctcccaccctggagctgcttcagaatccaaaagaagtgttgaccaggagtgagatccaggatgtgaactattcccttgaagctgtgaaggtgaagacagtgtgccagataccattgatgaaggaaatgctaaagcgattccaagtggctgtaaacctagctgaagacacagctcatcccaaactcgtcttctcccaggaagggagatacgtgaaaaatacagcatcagccagttcttggccagtgttttcttcagcatggaactactttgctggatggaggaatcctcagaagactgcttttgtagagagatttcagcacttaccctgtgttctgggaaaaaacgttttcacctcagggaaacattactgggaagttgagagtagagatagtctggaggttgctgttggggtgtgtcgggaggacgtcatgggaattactgatcgttcaaaaatgtccccagatgtgggcatctgggcgatttattggagtgctgctggctattggcccttgataggcttccctggaactcccacccagcaagagccagctctccaccgagtgggggtttacctggatcgtgggactgggaatgtctccttctacagcgctgtggacggagtgcacctgcacaccttttcttgttcttctgtctcacgcctccggccatttttttggttgagtccattagcatctttagtcattccaccagtgactgataggaaatgaggcttttcttcccctgaccaaaactccttccctgtagtccagctgagggacacacatccctgggccctcttctgcccttcatgtctctatcctggatggtccatcttctgggtctccctaacggtaccgtttggtatctgccctttgtgtgcttcacaagaggcagtcccatgggaggtgggtctggccaatggagatgggacaggaaattttccaagacgcttttgggaaatctttttgtagcttttaaagagatgtgcggggaagacatatggatgttagcagccatattggaactgagaacacaggaatggtggaaaggtagaagaaacagagtttttgttgccgttgtgaaattgttgaaatttccttcatgccaagcttcttgttatatgagataattacgcccttattgtataagacaattttagttgtatttggttacttgcagcctgaagtaccgtaactgcactaaagggacgtagtgtgaacatcccgcagtataggcttaagtcacttttgtgaaatttgacaaaggcatagaatctttttctatccagtcaggcattgcctattctttccagtaactactgattcccccacttttctgtcttagaaaattgtgggaatcccccctcactctgcctatgttgcactctctctcttcccaaccataactctgcccttgcacaatcttcactcttaggcataggctgtgccatcttagccaactcaaacggtctctaggttttatatcctatctgttttagttactcctacattttta

SEQ ID NO: 452401 - DNA, 896 bp, Homo sapiens
  misc_feature (865)..(865): n is a, c, g, or t
  misc_feature (872)..(872): n is a, c, g, or t
cgcggcacagtggcccttaagcgaggagcggcggcgcccgcagcaatcacagcagtgccgacgtcgtgggtgtttggtgtgaggctgcgagccgccgcgagttctcacggtcccgccggcgccaccaccgcggtcactcaccgccgccgccgccaccactgccaccacggtcgcctgccacaggtgtctgcaattgaactccaaggtgcagaatggtttggaaagtagctgtattcctcagtgtggccctgggcattggtgccgttcctatagatgatcctgaagatggaggcaagcactgggtggtgatcgtggcaggttcaaatggctggtataattataggcaccaggcagacgcgtgccatgcctaccagatcattcaccgcaatgggattcctgacgaacagatcgttgtgatgatgtacgatgacattgcttactctgaagacaatcccactccaggaattgtgatcaacaggcccaatggcacagatgtctatcagggagtcccgaaggactacactggagaggatgttaccccacaaaatttccttgctgtgttgagaggcgatgcagaagcagtgaagggcataggatccggcaaagtcctgaagagtggcccccaggatcacgtgttcatttacttcactgaccatggatctactggaatactggtttttcccaatgaagatcttcatgtaaaggacctgaatgagaccatccattacatgtacaaacacaaaatgtaccgaaagatggtgttctacattgaagcctgtgagtctgggtccatgatgaaccacctgccggataacatcaatggttatgcaactactggttgccaaccccaaaacaagttcttgtnccaaaanaagccccggttaacggggcacaaa

SEQ ID NO: 452402 - DNA, 490 bp, Homo sapiens
ctggctttactgcaccagactctcagtagatcttgtgggtacagatcctccacacttctgtaatcacttggctcatagtctgctgtcctgatgataagatgccattgggcctgttgatcacaattcctggagtgggattgtcttcagagtaagcaatgtcatcgtacatcatcacaacgatctgttcgtcaggaatcccattgcggtgaatgatctggtaggcatggcacgcgtctgcctgggagaaatgatttggagaagcagtgaagggcataggatccggcaaagtcctgaagaggtaatgtctgtttatggatactacacttctctcaatggcttgggacccccgtatagagaattgaaacaggtgttgttctgtgcccctagcctgtttacctgtgagaaattacagagtggagagttttgttctgacttaggacaggtgcttagggctgttgtttcagtggcttctcttggtggcccatttctg

SEQ ID NO: 452403 - DNA, 1982 bp, Homo sapiens
  misc_feature (10)..(10): n is a, c, g, or t
  misc_feature (18)..(18): n is a, c, g, or t
  misc_feature (51)..(51): n is a, c, g, or t
  misc_feature (53)..(53): n is a, c, g, or t
gccgcagacncgtgcganacaggggaccactgtcgctcgggcccgggcgtngncggcgccaccaccgcggtcactcaccgccgccgccgccaccactgccaccacggtcgcctgccacaggtgtctgcaattgaactccaaggtgcagaatggtttggaaagtagctgtattcctcagtgtggccctgggcattggtgccgttcctatagatgatcctgaagatggaggcaagcactgggtggtgatcgtggcaggttcaaatggctggtataattataggcaccaggcagacgcgtgccatgcctaccagatcattcaccgcaatgggattcctgacgaacagatcgttgtgatgatgtacgatgacattgcttactctgaagacaatcccactccaggaattgtgatcaacaggcccaatggcacagatgtctatcagggagtcccgaaggactacactggagaggatgttaccccacaaaatttccttgctgtgttgagaggcgatgcagaagcagtgaagggcataggatccggcaaagtcctgaagagtggcccccaggatcacgtgttcatttacttcactgaccatggatctactggaatactggtttttcccaatgaagatcttcatgtaaaggacctgaatgagaccatccattacatgtacaaacacaaaatgtaccgaaagatggtgttctacattgaagcctgtgagtctgggtccatgatgaaccacctgccggataacatcaatgtttatgcaactactgctgccaaccccagagagtcgtcctacgcctgttactatgatgagaagaggtccacgtacctgggggactggtacagcgtcaactggatggaagactcggacgtggaagatctgactaaagagaccctgcacaagcagtaccacctggtaaaatcgcacaccaacaccagccacgtcatgcagtatggaaacaaaacaatctccaccatgaaagtgatgcagtttcagggtatgaaacgcaaagccagttctcccgtccccctacctccagtcacacaccttgacctcacccccagccctgatgtgcctctcaccatcatgaaaaggaaactgatgaacaccaatgatctggaggagtccaggcagctcacggaggagatccagcggcatctggatgccaggcacctcattgagaagtcagtgcgtaagatcgtctccttgctggcagcgtccgaggctgaggtggagcagctcctgtccgagagagccccgctcacggggcacagctgctacccagaggccctgctgcacttccggacccactgcttcaactggcactcccccacgtacgagtatgcgttgagacatttgtacgtgctggtcaacctttgtgagaagccgtatccgcttcacaggataaaattgtccatggaccacgtgtgccttggtcactactgaagagctgcctcctggaagcttttccaagtgtgagcgccccaccgactgtgtgctgatcagagactggagaggtggagtgagaagtctccgctgctcgggccctcctggggagcccccgctccagggctcgctccaggaccttcttcacaagatgacttgctcgctgttacctgcttccccagtcttttctgaaaaactacaaattagggtgggaaaagctctgtattgagaagggtcatatttgctttctaggaggtttgttgttttgcctgttagttttgaggagcaggaagctcatgggggcttctgtagcccctctcaaaaggagtctttattctgagaatttgaagctgaaacctctttaaatcttcagaatgattttattgaagagggccgcaagccccaaatggaaaactgtttttagaaaatatgatgatttttgattgcttttgtatttaattctgcaggtgttcaagtcttaaaaaataaagatttataacagaacccaaatattaacgtccgacactgact

SEQ ID NO: 452404 - DNA, 1974 bp, Homo sapiens
cgcggcacagtggcccttaagcgaggagcggcggcgcccgcagcaatcacagcagtgccgacgtcgtgggtgtttggtgtgaggctgcgagccgccgcgagttctcacggtcccgccggcgccaccaccgcggtcactcaccgccgccgccgccaccactgccaccacggtcgcctgccacaggtgtctgcaattgaactccaaggtgcagaatggtttggaaagtagctgtattcctcagtgtggccctgggcattggtgccgttcctatagatgatcctgaagatggaggcaagcactgggtggtgatcgtggcaggttcaaatggctggtataattataggcaccaggcagacgcgtgccatgcctaccagatcattcaccgcaatgggattcctgacgaacagatcgttgtgatgatgtacgatgacattgcttactctgaagacaatcccactccaggaattgtgatcaacaggcccaatggcacagatgtctatcagggagtcccgaaggactacactggagaggatgttaccccacaaaatttccttgctgtgttgagaggcgatgcagaagcagtgaagggcataggatccggcaaagtcctgaagagtggcccccaggatcacgtgttcatttacttcactgaccatggatctactggaatactggtttttcccaatgaagatcttcatgtaaaggacctgaatgagaccatccattacatgtacaaacacaaaatgtaccgaaagatggtgttctacattgaagcctgtgagtctgggtccatgatgaaccacctgccggataacatcaatgtttatgcaactactgctgccaaccccagagagtcgtcctacgcctgttactatgatgagaagaggtccacgtacctgggggactggtacagcgtcaactggatggaagactcggacgtggaagatctgactaaagagaccctgcacaagcagtaccacctggtaaaatcgcacaccaacaccagccacgtcatgcagtatggaaacaaaacaatctccaccatgaaagtgatgcagtttcagggtatgaaacgcaaagccagttctcccgtccccctacctccagtcacacaccttgacctcacccccagccctgatgtgcctctcaccatcatgggatgccaggcacctcattgagaagtcagtgcgtaagatcgtctccttgctggcagcgtccgaggctgaggtggagcagctcctgtccgagagagccccgctcacggggcacagctgctacccagaggccctgctgcacttccggacccactgcttcaactggcactcccccacgtacgagtatgcgttgagacatttgtacgtgctggtcaacctttgtgagaagccgtatccgcttcacaggataaaattgtccatggaccacgtgtgccttggtcactactgaagagctgcctcctggaagcttttccaagtgtgagcgccccaccgactgtgtgctgatcagagactggagaggtggagtgagaagtctccgctgctcgggccctcctggggagcccccgctccagggctcgctccaggaccttcttcacaagatgacttgctcgctgttacctgcttccccagtcttttctgaaaaactacaaattagggtgggaaaagctctgtattgagaagggtcatatttgctttctaggaggtttgttgttttgcctgttagttttgaggagcaggaagctcatgggggcttctgtagcccctctcaaaaggagtctttattctgagaatttgaagctgaaacctctttaaatcttcagaatgattttattgaagagggccgcaagccccaaatggaaaactgtttttagaaaatatgatgatttttgattgcttttgtatttaattctgcaggtgttcaagtcttaaaaaataaagatttataacagaacccaaatattaacgtccgacactgact

SEQ ID NO: 452405 - DNA, 1990 bp, Homo sapiens
cgcggcacagtggcccttaagcgaggagcggcggcgcccgcagcaatcacagcagtgccgacgtcgtgggtgtttggtgtgaggctgcgagccgccgccaccactgccaccacggtcgcctgccacaggtgtctgcaattgaactccaaggtgcagaatggtttggaaagtagctgtattcctcagtgtggccctgggcattggtgccgttcctatagatgatcctgaagatggaggcaagcactgggtggtgatcgtggcaggttcaaatggctggtataattataggcaccaggcagacgcgtgccatgcctaccagatcattcaccgcaatgggattcctgacgaacagatcgttgtgatgatgtacgatgacattgcttactctgaagacaatcccactccaggaattgtgatcaacaggcccaatggcacagatgtctatcagggagtcccgaaggactacactggagaggatgttaccccacaaaatttccttgctgtgttgagaggcgatgcagaagcagtgaagggcataggatccggcaaagtcctgaagagtggcccccaggatcacgtgttcatttacttcactgaccatggatctactggaatactggtttttcccaatgaagatcttcatgtaaaggacctgaatgagaccatccattacatgtacaaacacaaaatgtaccgaaagatggtgttctacattgaagcctgtgagtctgggtccatgatgaaccacctgccggataacatcaatgtttatgcaactactgctgccaaccccagagagtcgtcctacgcctgttactatgatgagaagaggtccacgtacctgggggactggtacagcgtcaactggatggaagactcggacgtggaagatctgactaaagagaccctgcacaagcagtaccacctggtaaaatcgcacaccaacaccagccacgtcatgcagtatggaaacaaaacaatctccaccatgaaagtgatgcagtttcagggtatgaaacgcaaagccagttctcccgtccccctacctccagtcacacaccttgacctcacccccagccctgatgtgcctctcaccatcatgaaaaggaaactgatgaacaccaatgatctggaggagtccaggcagctcacggaggagatccagcggcatctggatgccaggcacctcattgagaagtcagtgcgtaagatcgtctccttgctggcagcgtccgaggctgaggtggagcagctcctgtccgagagagccccgctcacggggcacagctgctacccagaggccctgctgcacttccggacccactgcttcaactggcactcccccacgtacgagtatgcgttgagacatttgtacgtgctggtcaacctttgtgagaagccgtatccgcttcacaggataaaattgtccatggaccacgtgtgccttggtcactactgaagagctgcctcctggaagcttttccaagtgtgagcgccccaccgactgtgtgctgatcagagactggagaggtggagtgagaagtctccgctgctcgggccctcctggggagcccccgctccagggctcgctccaggaccttcttcacaagatgacttgctcgctgttacctgcttccccagtcttttctgaaaaactacaaattagggtgggaaaagctctgtattgagaagggtcatatttgctttctaggaggtttgttgttttgcctgttagttttgaggagcaggaagctcatgggggcttctgtagcccctctcaaaaggagtctttattctgagaatttgaagctgaaacctctttaaatcttcagaatgattttattgaagagggccgcaagccccaaatggaaaactgtttttagaaaatatgatgatttttgattgcttttgtatttaattctgcaggtgttcaagtcttaaaaaataaagatttataacagaacccaaatattaacgtccgacactgact

SEQ ID NO: 452406 - DNA, 2207 bp, Homo sapiens
ctgtaatgactacagccacttcctccaaaggaaccctgcttccctggggttcagggacctggggtcatcacatataagccagtggagctcctctcccaggctcacctcacagggcctccacggagaggtaagccaaagcagaatgggggcaggagggtctctataagatagaaacccctaagaaacaccatttaaacacaaaggctttttttttcctcctgagacgaggtcttactctgttgcccaggctggagtgcagtggcacaatcttggctcactgcaacctctgcctcccgggttcaagcaattctcctgcctcagcctcccgagtagctgggattacaggtgtctgcaattgaactccaaggtgcagaatggtttggaaagtagctgtattcctcagtgtggccctgggcattggtgccgttcctatagatgatcctgaagatggaggcaagcactgggtggtgatcgtggcaggttcaaatggctggtataattataggcaccaggcagacgcgtgccatgcctaccagatcattcaccgcaatgggattcctgacgaacagatcgttgtgatgatgtacgatgacattgcttactctgaagacaatcccactccaggaattgtgatcaacaggcccaatggcacagatgtctatcagggagtcccgaaggactacactggagaggatgttaccccacaaaatttccttgctgtgttgagaggcgatgcagaagcagtgaagggcataggatccggcaaagtcctgaagagtggcccccaggatcacgtgttcatttacttcactgaccatggatctactggaatactggtttttcccaatgaagatcttcatgtaaaggacctgaatgagaccatccattacatgtacaaacacaaaatgtaccgaaagatggtgttctacattgaagcctgtgagtctgggtccatgatgaaccacctgccggataacatcaatgtttatgcaactactgctgccaaccccagagagtcgtcctacgcctgttactatgatgagaagaggtccacgtacctgggggactggtacagcgtcaactggatggaagactcggacgtggaagatctgactaaagagaccctgcacaagcagtaccacctggtaaaatcgcacaccaacaccagccacgtcatgcagtatggaaacaaaacaatctccaccatgaaagtgatgcagtttcagggtatgaaacgcaaagccagttctcccgtccccctacctccagtcacacaccttgacctcacccccagccctgatgtgcctctcaccatcatgaaaaggaaactgatgaacaccaatgatctggaggagtccaggcagctcacggaggagatccagcggcatctggatgccaggcacctcattgagaagtcagtgcgtaagatcgtctccttgctggcagcgtccgaggctgaggtggagcagctcctgtccgagagagccccgctcacggggcacagctgctacccagaggccctgctgcacttccggacccactgcttcaactggcactcccccacgtacgagtatgcgttgagacatttgtacgtgctggtcaacctttgtgagaagccgtatccgcttcacaggataaaattgtccatggaccacgtgtgccttggtcactactgaagagctgcctcctggaagcttttccaagtgtgagcgccccaccgactgtgtgctgatcagagactggagaggtggagtgagaagtctccgctgctcgggccctcctggggagcccccgctccagggctcgctccaggaccttcttcacaagatgacttgctcgctgttacctgcttccccagtcttttctgaaaaactacaaattagggtgggaaaagctctgtattgagaagggtcatatttgctttctaggaggtttgttgttttgcctgttagttttgaggagcaggaagctcatgggggcttctgtagcccctctcaaaaggagtctttattctgagaatttgaagctgaaacctctttaaatcttcagaatgattttattgaagagggccgcaagccccaaatggaaaactgtttttagaaaatatgatgatttttgattgcttttgtatttaattctgcaggtgttcaagtcttaaaaaataaagatttataacagaacccaaatattaacgtccgacactgact

SEQ ID NO: 452407 - DNA, 1874 bp, Homo sapiens
cgcggcacagtggcccttaagcgaggagcggcggcgcccgcagcaatcacagcagtgccgacgtcgtgggtgtttggtgtgaggctgcgagccgccgcgagttctcacggtcccgccggcgccaccaccgcggtcactcaccgccgccgccgccaccactgccaccacggtcgcctgccacaggtgtctgcaattgaactccaaggtgcagaatggtttggaaagtagctgtattcctcagtgtggccctgggcattggtgccgttcctatagatgatcctgaagatggaggcaagcactgggtggtgatcgtggcaggttcaaatggctggtataattataggcaccaggcagacgcgtgccatgcctaccagatcattcaccgcaatgggattcctgacgaacagatcgttgtgatgatgtacgatgacattgcttactctgaagacaatcccactccaggaattgtgatcaacaggcccaatggcacagatgtctatcagggagtcccgaaggactacactggagaggatgttaccccacaaaatttccttgctgtgttgagaggcgatgcagaagcagtgaagggcataggatccggcaaagtcctgaagagtggcccccaggatcacgtgttcatttacttcactgaccatggatctactggaatactggtttttcccaatgaagatcttcatgtaaaggacctgaatgagaccatccattacatgtacaaacacaaaatgtaccgaaagatggtgttctacattgaagcctgtgagtctgggtccatgatgaaccacctgccggataacatcaatgtttatgcaactactgctgccaaccccagagagtcgtcctacgcctgttactatgatgagaagaggtccacgtacctgggggactggtacagcgtcaactggatggaagactcggacgtggaagatctgactaaagagaccctgcacaagcagtaccacctggtaaaatcgcacaccaacaccagccacgtcatgcagtatggaaacaaaacaatctccaccatgaaagtgatgcagtttcagggtatgaaacgcaaagccagttctcccgtccccctacctccagtcacacaccttgacctcacccccagccctgatgtgcctctcaccatcatgaaaaggaaactgatgaacaccaatgatctggaggagtccaggcagctcacggaggagatccagcggcatctggattacgagtatgcgttgagacatttgtacgtgctggtcaacctttgtgagaagccgtatccgcttcacaggataaaattgtccatggaccacgtgtgccttggtcactactgaagagctgcctcctggaagcttttccaagtgtgagcgccccaccgactgtgtgctgatcagagactggagaggtggagtgagaagtctccgctgctcgggccctcctggggagcccccgctccagggctcgctccaggaccttcttcacaagatgacttgctcgctgttacctgcttccccagtcttttctgaaaaactacaaattagggtgggaaaagctctgtattgagaagggtcatatttgctttctaggaggtttgttgttttgcctgttagttttgaggagcaggaagctcatgggggcttctgtagcccctctcaaaaggagtctttattctgagaatttgaagctgaaacctctttaaatcttcagaatgattttattgaagagggccgcaagccccaaatggaaaactgtttttagaaaatatgatgatttttgattgcttttgtatttaattctgcaggtgttcaagtcttaaaaaataaagatttataacagaacccaaatattaacgtccgacactgact

SEQ ID NO: 452408 - DNA, 1981 bp, Homo sapiens
cgcggcacagtggcccttaagcgaggagcggcggcgcccgcagcaatcacagcagtgccgacgtcgtgggtgtttggtgtgaggctgcgagccgccgcgagttctcacggtcccgccggcgccaccaccgcggtcactcaccgccgccgccgccaccactgccaccacggtcgcctgccacaggtgtctgcaattgaactccaaggtgcagaatggtttggaaagtagctgtattcctcagtgtggccctgggcattggtgccgttcctatagatgatcctgaagatggaggcaagcactgggtggtgatcgtggcaggttcaaatggctggtataattataggcaccaggcagacgcgtgccatgcctaccagatcattcaccgcaatgggattcctgacgaacagatcgttgtgatgatgtacgatgacattgcttactctgaagacaatcccactccaggaattgtgatcaacaggcccaatggcacagatgtctatcagggagtcccgaaggactacactggagaggatgttaccccacaaaatttccttgctgtgttgagaggcgatgcagaagcagtgaagggcataggatccggcaaagtcctgaagagtggcccccaggatcacgtgttcatttacttcactgaccatggatctactggaatactggtttttcccaatgaagatcttcatgtaaaggacctgaatgagaccatccattacatgtacaaacacaaaatgtaccgaaagatggtgttctacattgaagcctgtgagtctgggtccatgatgaaccacctgccggataacatcaatgtttatgcaactactgctgccaaccccagagagtcgtcctacgcctgttactatgatgagaagaggtccacgtacctgggggactggtacagcgtcaactggatggaagactcggacgtggaagatctgactaaagagaccctgcacaagcagtaccacctggtaaaatcgcacaccaacaccagccacgtcatgcagtatggaaacaaaacaatctccaccatgaaagtgatgcagtttcagggtatgaaacgcaaagccagttctcccgtccccctacctccagtcacacaccttgacctcacccccagccctgatgtgcctctcaccatcatgaaaaggaaactgatgaacaccaatgatctggaggagtccaggcagctcacggaggagatccagcggcatctggatggatgccaggcacctcattgagaagtcagtgcgtaagatcgtctccttgctggcagcgtccgaggctgaggtggagcagctcctgtccgagagagccccgctcacggggcacagctgctacccagaggccctgctgcacttccggacccactgcttcaactggcactcccccacggataaaattgtccatggaccacgtgtgccttggtcactactgaagagctgcctcctggaagcttttccaagtgtgagcgccccaccgactgtgtgctgatcagagactggagaggtggagtgagaagtctccgctgctcgggccctcctggggagcccccgctccagggctcgctccaggaccttcttcacaagatgacttgctcgctgttacctgcttccccagtcttttctgaaaaactacaaattagggtgggaaaagctctgtattgagaagggtcatatttgctttctaggaggtttgttgttttgcctgttagttttgaggagcaggaagctcatgggggcttctgtagcccctctcaaaaggagtctttattctgagaatttgaagctgaaacctctttaaatcttcagaatgattttattgaagagggccgcaagccccaaatggaaaactgtttttagaaaatatgatgatttttgattgcttttgtatttaattctgcaggtgttcaagtcttaaaaaataaagatttataacagaacccaaatattaacgtccgacactgact

SEQ ID NO: 452409 - DNA, 2212 bp, Homo sapiens
ctgtaatgactacagccacttcctccaaaggaaccctgcttccctggggttcagggacctggggtcatcacatataagccagtggagctcctctcccaggctcacctcacagggcctccacggagaggtaagccaaagcagaatgggggcaggagggtctctataagatagaaacccctaagaaacaccatttaaacacaaaggctttttttttcctcctgagacgaggtcttactctgttgcccaggctggagtgcagtggcacaatcttggctcactgcaacctctgcctcccgggttcaagcaattctcctgcctcagcctcccgagtagctgggattacaggtgtctgcaattgaactccaaggtgcagaatggtttggaaagtagctgtattcctcagtgtggccctgggcattggtgccgttcctatagatgatcctgaagatggaggcaagcactgggtggtgatcgtggcaggttcaaatggctggtataattataggcaccagcttttagacactgcctgcagctgttggctcatggccccttcttccatcctcaatgccaacaagggcagacgcgtgccatgcctaccagatcattcaccgcaatgggattcctgacgaacagatcgttgtgatgatgtacgatgacattgcttactctgaagacaatcccactccaggaattgtgatcaacaggcccaatggcacagatgtctatcagggagtcccgaaggactacactggagaggatgttacccccccggcttcttggcagtggcccccaggatcacgtgttcatttacttcactgaccatggatctactggaatactggtttttcccaatgaagatcttcatgtaaaggacctgaatgagaccatccattacatgtacaaacacaaaatgtaccgaaagatggtgttctacattgaagcctgtgagtctgggtccatgatgaaccacctgccggataacatcaatgtttatgcaactactgctgccaaccccagagagtcgtcctacgcctgttactatgatgagaagaggtccacgtacctgggggactggtacagcgtcaactggatggaagactcggacgtggaagatctgactaaagagaccctgcacaagcagtaccacctggtaaaatcgcacaccaacaccagccacgtcatgcagtatggaaacaaaacaatctccaccatgaaagtgatgcagtttcagggtatgaaacgcaaagccagttctcccgtccccctacctccagtcacacaccttgacctcacccccagccctgatgtgcctctcaccatcatgaaaaggaaactgatgaacaccaatgatctggaggagtccaggcagctcacggaggagatccagcggcatctggatgccaggcacctcattgagaagtcagtgcgtaagatcgtctccttgctggcagcgtccgaggctgaggtggagcagctcctgtccgagagagccccgctcacggggcacagctgctacccagaggccctgctgcacttccggacccactgcttcaactggcactcccccacgtacgagtatgcgttgagacatttgtacgtgctggtcaacctttgtgagaagccgtatccgcttcacaggataaaattgtccatggaccacgtgtgccttggtcactactgaagagctgcctcctggaagcttttccaagtgtgagcgccccaccgactgtgtgctgatcagagactggagaggtggagtgagaagtctccgctgctcgggccctcctggggagcccccgctccagggctcgctccaggaccttcttcacaagatgacttgctcgctgttacctgcttccccagtcttttctgaaaaactacaaattagggtgggaaaagctctgtattgagaagggtcatatttgctttctaggaggtttgttgttttgcctgttagttttgaggagcaggaagctcatgggggcttctgtagcccctctcaaaaggagtctttattctgagaatttgaagctgaaacctctttaaatcttcagaatgattttattgaagagggccgcaagccccaaatggaaaactgtttttagaaaatatgatgatttttgattgcttttgtatttaattctgcaggtgttcaagtcttaaaaaataaagatttataacagaacccaaatattaacgtccgacactgact

SEQ ID NO: 452410 - DNA, 2081 bp, Homo sapiens
cgcggcacagtggcccttaagcgaggagcggcggcgcccgcagcaatcacagcagtgccgacgtcgtgggtgtttggtgtgaggctgcgagccgccgcgagttctcacggtcccgccggcgccaccaccgcggtcactcaccgccgccgccgccaccactgccaccacggtcgcctgccacaggtgtctgcaattgaactccaaggtgcagaatggtttggaaagtagctgtattcctcagtgtggccctgggcattggtgccgttcctatagatgatcctgaagatggaggcaagcactgggtggtgatcgtggcaggttcaaatggctggtataattataggcaccaggcagacgcgtgccatgcctaccagatcattcaccgcaatgggattcctgacgaacagatcgttgtgatgatgtacgatgacattgcttactctgaagacaatcccactccaggaattgtgatcaacaggcccaatggcacagatgtctatcagggagtcccgaaggactacactggagaggatgttaccccacaaaatttccttgctgtgttgagaggcgatgcagaagcagtgaagggcataggatccggcaaagtcctgaagagtggcccccaggatcacgtgttcatttacttcactgaccatggatctactggaatactggtttttcccaatgaagatcttcatgtaaaggacctgaatgagaccatccattacatgtacaaacacaaaatgtaccgaaagatggtgttctacattgaagcctgtgagtctgggtccatgatgaaccacctgccggataacatcaatgtttatgcaactactgctgccaaccccagagagtcgtcctacgcctgttactatgatgagaagaggtccacgtacctgggggactggtacagcgtcaactggatggaagactcggacgtggaagatctgactaaagagaccctgcacaagcagtaccacctggtaaaatcgcacaccaacaccagccacgtcatgcagtatggaaacaaaacaatctccaccatgaaagtgatgcagtttcagggtatgaaacgcaaagccagttctcccgtccccctacctccagtcacacaccttgacctcacccccagccctgatgtgcctctcaccatcatgaaaaggaaactgatgaacaccaatgatctggaggagtccaggcagctcacggaggagatccagcggcatctggatgccaggcacctcattgagaagtcagtgcgtaagatcgtctccttgctggcagcgtccgaggctgaggtggagcagctcctgtccgagagagccccgctcacggggcacagctgctacccagaggccctgctgcacttccggacccactgcttcaactggcactcccccacgtacgagtatgcgttgagacatttgtacgtgctggtcaacctttgtgagaagccgtatccgcttcacaggataaaattgtccatggaccacgtgtgccttggtcactactgaagagctgcctcctggaagcttttccaagtgtgagcgccccaccgactgtgtgctgatcagagactggagaggtggagtgagaagtctccgctgctcgggccctcctggggagcccccgctccagggctcgctccaggaccttcttcacaagatgacttgctcgctgttacctgcttccccagtcttttctgaaaaactacaaatttaaaaccccaataaataaatttttttaaagcgggggagggtgggaaaagctctgtattgagaagggtcatatttgctttctaggaggtttgttgttttgcctgttagttttgaggagcaggaagctcatgggggcttctgtagcccctctcaaaaggagtctttattctgagaatttgaagctgaaacctctttaaatcttcagaatgattttattgaagagggccgcaagccccaaatggaaaactgtttttagaaaatatgatgatttttgattgcttttgtatttaattctgcaggtgttcaagtcttaaaaaataaagatttataacagaacccaaatattaacgtccgacactgact

SEQ ID NO: 452411 - DNA, 1390 bp, Homo sapiens
cgcggcacagtggcccttaagcgaggagcggcggcgcccgcagcaatcacagcagtgccgacgtcgtgggtgtttggtgtgaggctgcgagccgccgcgagttctcacggtcccgccggcgccaccaccgcggtcactcaccgccgccgccgccaccactgccaccacggtcgcctgccacaggtgtctgcaattgaactccaaggtgcagaatggtttggaaagtagctgtattcctcagtgtggccctgggcattggtgccgttcctatagatgatcctgaagatggaggcaagcactgggtggtgatcgtggcaggttcaaatggctggtataattataggcaccaggcagacgcgtgccatgcctaccagatcattcaccgcaatgggattcctgacgaacagatcgttgtgatgatgtacgatgacattgcttactctgaagacaatcccactccaggaattgtgatcaacaggctgatgtgcctctcaccatcatgaaaaggaaactgatgaacaccaatgatctggaggagtccaggcagctcacggaggagatccagcggcatctggatgccaggcacctcattgagaagtcagtgcgtaagatcgtctccttgctggcagcgtccgaggctgaggtggagcagctcctgtccgagagagccccgctcacggggcacagctgctacccagaggccctgctgcacttccggacccactgcttcaactggcactcccccacgtacgagtatgcgttgagacatttgtacgtgctggtcaacctttgtgagaagccgtatccgcttcacaggataaaattgtccatggaccacgtgtgccttggtcactactgaagagctgcctcctggaagcttttccaagtgtgagcgccccaccgactgtgtgctgatcagagactggagaggtggagtgagaagtctccgctgctcgggccctcctggggagcccccgctccagggctcgctccaggaccttcttcacaagatgacttgctcgctgttacctgcttccccagtcttttctgaaaaactacaaattagggtgggaaaagctctgtattgagaagggtcatatttgctttctaggaggtttgttgttttgcctgttagttttgaggagcaggaagctcatgggggcttctgtagcccctctcaaaaggagtctttattctgagaatttgaagctgaaacctctttaaatcttcagaatgattttattgaagagggccgcaagccccaaatggaaaactgtttttagaaaatatgatgatttttgattgcttttgtatttaattctgcaggtgttcaagtcttaaaaaataaagatttataacagaacccaaatattaacgtccgacactgact

SEQ ID NO: 452412 - DNA, 1104 bp, Homo sapiens
ccatactgtttcttctagtggaagactcggacgtggaagatctgactaaagagaccctgcacaagcagtaccacctggtaaaatcgcacaccaacaccagccacgtcatgcagtatggaaacaaaacaatctccaccatgaaagtgatgcagtttcagggtatgaaacgcaaagccagttctcccgtccctgatgtgcctctcaccatcatgaaaaggaaactgatgaacaccaatgatctggaggagtccaggcagctcacggaggagatccagcggcatctggatggatgccaggcacctcattgagaagtcagtgcgtaagatcgtctccttgctggcagcgtccgaggctgaggtggagcagctcctgtccgagagagccccgctcacggggcacagctgctacccagaggccctgctgcacttccggacccactgcttcaactggcactcccccacgtacgagtatgcgttgagacatttgtacgtgctggtcaacctttgtgagaagccgtatccgcttcacaggataaaattgtccatggaccacgtgtgccttggtcactactgaagagctgcctcctggaagcttttccaagtgtgagcgccccaccgactgtgtgctgatcagagactggagaggtggagtgagaagtctccgctgctcgggccctcctggggagcccccgctccagggctcgctccaggaccttcttcacaagatgacttgctcgctgttacctgcttccccagtcttttctgaaaaactacaaattagggtgggaaaagctctgtattgagaagggtcatatttgctttctaggaggtttgttgttttgcctgttagttttgaggagcaggaagctcatgggggcttctgtagcccctctcaaaaggagtctttattctgagaatttgaagctgaaacctctttaaatcttcagaatgattttattgaagagggccgcaagccccaaatggaaaactgtttttagaaaatatgatgatttttgattgcttttgtatttaattctgcaggtgttcaagtcttaaaaaataaagatttataacagaacccaaatattaacgtccgacactgact

SEQ ID NO: 452413 - DNA, 1168 bp, Homo sapiens
cgcggcacagtggcccttaagcgaggagcggcggcgcccgcagcaatcacagcagtgccgacgtcgtgggtgtttggtgtgaggctgcgagccgccgcgagttctcacggtcccgccggcgccaccaccgcggtcactcaccgccgccgccgccaccactgccaccacggtcgcctgccacaggtgtctgcaattgaactccaaggtgcagaatggtttggaaagtagctgtattcctcagtgtggccctgggctgatgtgcctctcaccatcatgaaaaggaaactgatgaacaccaatgatctggaggagtccaggcagctcacggaggagatccagcggcatctggatggatgccaggcacctcattgagaagtcagtgcgtaagatcgtctccttgctggcagcgtccgaggctgaggtggagcagctcctgtccgagagagccccgctcacggggcacagctgctacccagaggccctgctgcacttccggacccactgcttcaactggcactcccccacgtacgagtatgcgttgagacatttgtacgtgctggtcaacctttgtgagaagccgtatccgcttcacaggataaaattgtccatggaccacgtgtgccttggtcactactgaagagctgcctcctggaagcttttccaagtgtgagcgccccaccgactgtgtgctgatcagagactggagaggtggagtgagaagtctccgctgctcgggccctcctggggagcccccgctccagggctcgctccaggaccttcttcacaagatgacttgctcgctgttacctgcttccccagtcttttctgaaaaactacaaattagggtgggaaaagctctgtattgagaagggtcatatttgctttctaggaggtttgttgttttgcctgttagttttgaggagcaggaagctcatgggggcttctgtagcccctctcaaaaggagtctttattctgagaatttgaagctgaaacctctttaaatcttcagaatgattttattgaagagggccgcaagccccaaatggaaaactgtttttagaaaatatgatgatttttgattgcttttgtatttaattctgcaggtgttcaagtcttaaaaaataaagatttataacagaacccaaatattaacgtccgacactgact

SEQ ID NO: 452414 - DNA, 840 bp, Homo sapiens
aaaccctggcatgtgtgcctctttcctgagggatcgtccataaatatcaccagattatctaaaggttgggaaaggatccatgaaccaaaatagggcaagagccactggtcaagatgcttcccctctgcaattgcaaaagtggagtggattgtgtggtgagatgaggaagtttcattcttctcgtttgttttctcccagtacgagtatgcgttgagacatttgtacgtgctggtcaacctttgtgagaagccgtatccgcttcacaggataaaattgtccatggaccacgtgtgccttggtcactactgaagagctgcctcctggaagcttttccaagtgtgagcgccccaccgactgtgtgctgatcagagactggagaggtggagtgagaagtctccgctgctcgggccctcctggggagcccccgctccagggctcgctccaggaccttcttcacaagatgacttgctcgctgttacctgcttccccagtcttttctgaaaaactacaaattagggtgggaaaagctctgtattgagaagggtcatatttgctttctaggaggtttgttgttttgcctgttagttttgaggagcaggaagctcatgggggcttctgtagcccctctcaaaaggagtctttattctgagaatttgaagctgaaacctctttaaatcttcagaatgattttattgaagagggccgcaagccccaaatggaaaactgtttttagaaaatatgatgatttttgattgcttttgtatttaattctgcaggtgttcaagtcttaaaaaataaagatttataacagaacccaaatattaacgtccgacactgact

SEQ ID NO: 452415 - DNA, 1118 bp, Homo sapiens
aaaccctggcatgtgtgcctctttcctgagggatcgtccataaatatcaccagattatctaaaggttgggaaaggatccatgaaccaaaatagggcaagagccactggtcaagatgcttcccctctgcaattgcaaaagtggagtggattgtgtggtgagatgaggaagtttcattcttctcgtttgttttctcccagtacgagtatgcgttgagacatttgtacgtgctggtcaacctttgtgagaagccgtatccgcttcacaggtaactaatgcagcggtgacgcttgaaaggtcgatgtcattctgaaagcagaaggggctgccatcctcttctgcaagtgggcattttcacttctgccaggagctccctccagctttcctctacagccatttgtcagcagggtccagaagccacgttctcagtgacagctgctgggcgggcctgtcataactgcctgcctgccgcatgtgggtttgcgtttgtctgcctttcttcagagttgacacggttcaccaagttctccttcctgtctctcgcaggataaaattgtccatggaccacgtgtgccttggtcactactgaagagctgcctcctggaagcttttccaagtgtgagcgccccaccgactgtgtgctgatcagagactggagaggtggagtgagaagtctccgctgctcgggccctcctggggagcccccgctccagggctcgctccaggaccttcttcacaagatgacttgctcgctgttacctgcttccccagtcttttctgaaaaactacaaattagggtgggaaaagctctgtattgagaagggtcatatttgctttctaggaggtttgttgttttgcctgttagttttgaggagcaggaagctcatgggggcttctgtagcccctctcaaaaggagtctttattctgagaatttgaagctgaaacctctttaaatcttcagaatgattttattgaagagggccgcaagccccaaatggaaaactgtttttagaaaatatgatgatttttgattgcttttgtatttaattctgcaggtgttcaagtcttaaaaaataaagatttataacagaacccaaatattaacgtccgacactgact

SEQ ID NO: 452416 - DNA, 1034 bp, Homo sapiens
cgcggcacagtggcccttaagcgaggagcggcggcgcccgcagcaatcacagcagtgccgacgtcgtgggtgtttggtgtgaggctgcgagccgccgcgagttctcacggtcccgccggcgccaccaccgcggtcactcaccgccgccgccgccaccactgccaccacggtcgcctgccacaggtgtctgcaattgaactccaaggtgcagaatggtttggaaagtagctgtattcctcagtgtggccctgggcattggtgccgttcctatagatgatcctgaagatggaggcaagcactgggtggtgatcgtggcaggttcaaatggctggtataattataggcaccaggcagacgcgtgccatgcctaccagatcattcaccgcaatgggattcctgacgaacagatcgttgtgatgatgtacgatgacattgcttactctgaagacaatcccactccaggaattgtgatcaacaggcccaatggcacagatgtctatcagggagtcccgaaggactacactggagaggatgttaccccacaaaatttccttgctgtgttgagaggcgatgcgtggagtgagaagtctccgctgctcgggccctcctggggagcccccgctccagggctcgctccaggaccttcttcacaagatgacttgctcgctgttacctgcttccccagtcttttctgaaaaactacaaattagggtgggaaaagctctgtattgagaagggtcatatttgctttctaggaggtttgttgttttgcctgttagttttgaggagcaggaagctcatgggggcttctgtagcccctctcaaaaggagtctttattctgagaatttgaagctgaaacctctttaaatcttcagaatgattttattgaagagggccgcaagccccaaatggaaaactgtttttagaaaatatgatgatttttgattgcttttgtatttaattctgcaggtgttcaagtcttaaaaaataaagatttataacagaacccaaatattaacgtccgacactgact

SEQ ID NO: 452417 - DNA, 487 bp, Homo sapiens
  misc_feature (147)..(147): n is a, c, g, or t
  misc_feature (155)..(155): n is a, c, g, or t
  misc_feature (263)..(263): n is a, c, g, or t
  misc_feature (266)..(266): n is a, c, g, or t
  misc_feature (283)..(283): n is a, c, g, or t
  misc_feature (308)..(308): n is a, c, g, or t
  misc_feature (318)..(318): n is a, c, g, or t
  misc_feature (333)..(333): n is a, c, g, or t
  misc_feature (377)..(377): n is a, c, g, or t
  misc_feature (451)..(451): n is a, c, g, or t
cgcggcacagtggcccttaagcgaggagcggcggcgcccgcagcaatcacagcagtgccgacgtcgtgggtgtttggtgtgaggctgcgagccgccgcgagttctcacggtcccgccggcgccaccaccgcggtcactcaccgccgncggcttcntctcctaggcgacgagacccagtggctagaagttcaccatgtctattctcaagatcatgccagggagatctttgactctcgcgggaatccacttgttgaggttgatcnctnacctcaaaaggtctctncagagctgctgtgccagtggtgctncaactggtanctatgaggcctaganctccgggacaatgataagactcgctatatggggaagggtgtctnaaaggctgttgagcacatcaataaaactattgcggctgccctggttagcaagaaactgaacgtcacagaacaanagaagattgacaaactgatgatcgagatggatggac

SEQ ID NO: 452418 - DNA, 362 bp, Homo sapiens
gtacatcctcttgccctttttaaatgcgtgcataaaacatgtgacgacattctggggttatgttcttcaccatgattacttctagggattggtagaaaagagtttatgaaggatcatcagaactttactagtggcttatccagcaaatagtttctcttgatgtgttggtctgacaatattctcacctttcagcttcatgtaaaggacctgaatgagaccatccattacatgtacaaacacaaaatgtaccgaaaggtaattcagcccttggggcagccttgtgggggcggggggtgtgaggaaagccgtgagtgcagagcccacagtcccgtgaccgtcctccaactgtgggtgctgtgttt

SEQ ID NO: 452419 - DNA, 408 bp, Homo sapiens
aatgtcaagatgttttccagagtggagtgccaattacactatacttccatcatagctgtattagtttactatcactgcttaaacagattgccacagacttcatggcttgaaacaatacaaatttattatcttacagttctggaggtaagaaatgtgaaatggctgtcactgggttaaatcacggtgttgcctgggctgtgttccttggtggctgtagtggaggctccactttctcgtcttttccagcttttagacactgcctgcagctgttggctcatggccccttcttccatcctcaatgccaacaagggtcagttgaatctttcttacactgcatcacttggacactgactcctgcctctgtctccacatacaaaagcctttgtgattacattaggcccactgaag

SEQ ID NO: 452420 - DNA, 2957 bp, Homo sapiens
actgaacccagccactgcccctgggcgtgaggacagggacccaggggcagtggctgggttcagtgttctcacgctcagaggaagaaaaggcagtggctgggttcagtgttctcacgctcagaggaagaaaaggcagtggtgaacacccgcctgactgccttaccctgatctaaacgacaccatctcctcccccaaggaagacacagccctggatgtgaacctaggagggtgggaatggcttatgtcactcggtctttgaggcagagcttgggctggggttgcaggggcatcagccaatctgctctcaaggagcaaaacttgggcgtaaaaggaacgggcagtggggctagccggctgtctggaggtctgggtgacctggcagcacggctgcttctcccccgccaccccgccccactccttgacacttccaggtgattttatctttataaataagatgaaaatccaagcagcattaatttaggggaacaaaagatggaaaaaaaagggggggaggcagaaggagctgatgagcatccaggagaggaggaagtaggaagagcagtgtccactgtgtgccccagggcagtggagtgtctctgtggctgcaaggcccttccttctggctccctggcagacggccagacagcagagggaactctgtattgactgggacaagccctggagccctgtctggctgttgacatggggagtgcctggatttgccccaatcaacctcccaccttcaccattgcccaagtgaagcagcttttaactctcttgcccaaagtcctctgagaatttcttcactttcaggaggtcgtctgcattcaccgtgggccgggtggtggccagagaccgcagcatgtccgacatgcaaaccacaggctctaagagtttgtccccagggacatccatccaagtcatctccatggctcctgggtcccctggtgagcatggagtcaggaggtcatcaatcatcatgctggggttggtgcgaggcgagccgccgcgagttctcacggtcccgccggcgccaccaccgcggtcactcaccgccgccgccgccaccactgccaccacggtcgcctgccacaggtgtctgcaattgaactccaaggtgcagaatggtttggaaagtagctgtattcctcagtgtggccctgggcattggtgccgttcctatagatgatcctgaagatggaggcaagcactgggtggtgatcgtggcaggttcaaatggctggtataattataggcaccaggcagacgcgtgccatgcctaccagatcattcaccgcaatgggattcctgacgaacagatcgttgtgatgatgtacgatgacattgcttactctgaagacaatcccactccaggaattgtgatcaacaggcccaatggcacagatgtctatcagggagtcccgaaggactacactggagaggatgttaccccacaaaatttccttgctgtgttgagaggcgatgcagaagcagtgaagggcataggatccggcaaagtcctgaagagtggcccccaggatcacgtgttcatttacttcactgaccatggatctactggaatactggtttttcccaatgaagatcttcatgtaaaggacctgaatgagaccatccattacatgtacaaacacaaaatgtaccgaaagatggtgttctacattgaagcctgtgagtctgggtccatgatgaaccacctgccggataacatcaatgtttatgcaactactgctgccaaccccagagagtcgtcctacgcctgttactatgatgagaagaggtccacgtacctgggggactggtacagcgtcaactggatggaagactcggacgtggaagatctgactaaagagaccctgcacaagcagtaccacctggtaaaatcgcacaccaacaccagccacgtcatgcagtatggaaacaaaacaatctccaccatgaaagtgatgcagtttcagggtatgaaacgcaaagccagttctcccgtccccctacctccagtcacacaccttgacctcacccccagccctgatgtgcctctcaccatcatgaaaaggaaactgatgaacaccaatgatctggaggagtccaggcagctcacggaggagatccagcggcatctggatgccaggcacctcattgagaagtcagtgcgtaagatcgtctccttgctggcagcgtccgaggctgaggtggagcagctcctgtccgagagagccccgctcacggggcacagctgctacccagaggccctgctgcacttccggacccactgcttcaactggcactcccccacgtacgagtatgcgttgagacatttgtacgtgctggtcaacctttgtgagaagccgtatccgcttcacaggataaaattgtccatggaccacgtgtgccttggtcactactgaagagctgcctcctggaagcttttccaagtgtgagcgccccaccgactgtgtgctgatcagagactggagaggtggagtgagaagtctccgctgctcgggccctcctggggagcccccgctccagggctcgctccaggaccttcttcacaagatgacttgctcgctgttacctgcttccccagtcttttctgaaaaactacaaattagggtgggaaaagctctgtattgagaagggtcatatttgctttctaggaggtttgttgttttgcctgttagttttgaggagcaggaagctcatgggggcttctgtagcccctctcaaaaggagtctttattctgagaatttgaagctgaaacctctttaaatcttcagaatgattttattgaagagggccgcaagccccaaatggaaaactgtttttagaaaatatgatgatttttgattgcttttgtatttaattctgcaggtgttcaagtcttaaaaaataaagatttataacagaacccaaatattaacgtccgacactgact

SEQ ID NO: 452421 - DNA, 2045 bp, Homo sapiens
cgcggcacagtggcccttaagcgaggagcggcggcgcccgcagcaatcacagcagtgccgacgtcgtgggtgtttggtgtgaggctgcgagccgccgcgagttctcacggtcccgccggcgccaccaccgcggtcactcaccgccgccgccgccaccactgccaccacggtcgcctgccacaggtgtctgcaattgaactccaaggtgcagaatggtttggaaagtagctgtattcctcagtgtggccctgggcattggtgccgttcctatagatgatcctgaagatggaggcaagcactgggtggtgatcgtggcaggttcaaatggctggtataattataggcaccaggcagacgcgtgccatgcctaccagatcattcaccgcaatgggattcctgacgaacagatcgttgtgatgatgtacgatgacattgcttactctgaagacaatcccactccaggaattgtgatcaacaggcccaatggcacagatgtctatcagggagtcccgaaggactacactggagaggatgttaccccacaaaatttccttgctgtgttgagaggcgatgcagaagcagtgaagggcataggatccggcaaagtcctgaagagtggcccccaggatcacgtgttcatttacttcactgaccatggatctactggaatactggtttttcccaatgaagatcttcatgtaaaggacctgaatgagaccatccattacatgtacaaacacaaaatgtaccgaaagatggtgttctacattgaagcctgtgagtctgggtccatgatgaaccacctgccggataacatcaatgtttatgcaactactgctgccaaccccagagagtcgtcctacgcctgttactatgatgagaagaggtccacgtacctgggggactggtacagcgtcaactggatggaagactcggacgtggaagatctgactaaagagaccctgcacaagcagtaccacctggtaaaatcgcacaccaacaccagccacgtcatgcagtatggaaacaaaacaatctccaccatgaaagtgatgcagtttcagggtatgaaacgcaaagccagttctcccgtccccctacctccagtcacacaccttgacctcacccccagccctgatgtgcctctcaccatcatgaaaaggaaactgatgaacaccaatgatctggaggagtccaggcagctcacggaggagatccagcggcatctggatgccaggcacctcattgagaagtcagtgcgtaagatcgtctccttgctggcagcgtccgaggctgaggtggagcagctcctgtccgagagagccccgctcacggggcacagctgctacccagaggccctgctgcacttccggacccactgcttcaactggcactcccccacgtacgagtatgcgttgagacatttgtacgtgctggtcaacctttgtgagaagccgtatccgcttcacaggataaaattgtccatggaccacgtgtgccttggtcactactgaagagctgcctcctggaagcttttccaagtgtgagcgccccaccgactgtgtgctgatcagagactggagaggtggagtgagaagtctccgctgctcgggccctcctggggagcccccgctccagggctcgctccaggaccttcttcacaagatgacttgctcgctgttacctgcttccccagtcttttctgaaaaactacaaattagggtgggaaaagctctgtattgagaagggtcatatttgctttctaggaggtttgttgttttgcctgttagttttgaggagcaggaagctcatgggggcttctgtagcccctctcaaaaggagtctttattctgagaatttgaagctgaaacctctttaaatcttcagaatgattttattgaagagggccgcaagccccaaatggaaaactgtttttagaaaatatgatgatttttgattgcttttgtatttaattctgcaggtgttcaagtcttaaaaaataaagatttataacagaacccaaatattaacgtccgacactgact

SEQ ID NO: 452422 - DNA, 2049 bp, Homo sapiens
cgcggcacagtggcccttaagcgaggagcggcggcgcccgcagcaatcacagcagtgccgacgtcgtgggtgtttggtgtgaggctgcgagccgccgcgagttctcacggtcccgccggcgccaccaccgcggtcactcaccgccgccgccgccaccactgccaccacggtcgcctgccacaggtgtctgcaattgaactccaaggtgcagaatggtttggaaagtagctgtattcctcagtgtggccctgggcattggtgccgttcctatagatgatcctgaagatggaggcaagcactgggtggtgatcgtggcaggttcaaatggctggtataattataggcaccaggcagacgcgtgccatgcctaccagatcattcaccgcaatgggattcctgacgaacagatcgttgtgatgatgtacgatgacattgcttactctgaagacaatcccactccaggaattgtgatcaacaggcccaatggcacagatgtctatcagggagtcccgaaggactacactggagaggatgttaccccacaaaatttccttgctgtgttgagaggcgatgcagaagcagtgaagggcataggatccggcaaagtcctgaagagtggcccccaggatcacgtgttcatttacttcactgaccatggatctactggaatactggtttttcccaatgaagatcttcatgtaaaggacctgaatgagaccatccattacatgtacaaacacaaaatgtaccgaaagatggtgttctacattgaagcctgtgagtctgggtccatgatgaaccacctgccggataacatcaatgtttatgcaactactgctgccaaccccagagagtcgtcctacgcctgttactatgatgagaagaggtccacgtacctgggggactggtacagcgtcaactggatggaagactcggacgtggaagatctgactaaagagaccctgcacaagcagtaccacctggtaaaatcgcacaccaacaccagccacgtcatgcagtatggaaacaaaacaatctccaccatgaaagtgatgcagtttcagggtatgaaacgcaaagccagttctcccgtccccctacctccagtcacacaccttgacctcacccccagccctgatgtgcctctcaccatcatgaaaaggaaactgatgaacaccaatgatctggaggagtccaggcagctcacggaggagatccagcggcatctggatggatgccaggcacctcattgagaagtcagtgcgtaagatcgtctccttgctggcagcgtccgaggctgaggtggagcagctcctgtccgagagagccccgctcacggggcacagctgctacccagaggccctgctgcacttccggacccactgcttcaactggcactcccccacgtacgagtatgcgttgagacatttgtacgtgctggtcaacctttgtgagaagccgtatccgcttcacaggataaaattgtccatggaccacgtgtgccttggtcactactgaagagctgcctcctggaagcttttccaagtgtgagcgccccaccgactgtgtgctgatcagagactggagaggtggagtgagaagtctccgctgctcgggccctcctggggagcccccgctccagggctcgctccaggaccttcttcacaagatgacttgctcgctgttacctgcttccccagtcttttctgaaaaactacaaattagggtgggaaaagctctgtattgagaagggtcatatttgctttctaggaggtttgttgttttgcctgttagttttgaggagcaggaagctcatgggggcttctgtagcccctctcaaaaggagtctttattctgagaatttgaagctgaaacctctttaaatcttcagaatgattttattgaagagggccgcaagccccaaatggaaaactgtttttagaaaatatgatgatttttgattgcttttgtatttaattctgcaggtgttcaagtcttaaaaaataaagatttataacagaacccaaatattaacgtccgacactgact

SEQ ID NO: 452423 - DNA, 2163 bp, Homo sapiens
cgcggcacagtggcccttaagcgaggagcggcggcgcccgcagcaatcacagcagtgccgacgtcgtgggtgtttggtgtgaggctgcgagccgccgcgagttctcacggtcccgccggcgccaccaccgcggtcactcaccgccgccgccgccaccactgccaccacggtcgcctgccacagggtcttactctgttgcccaggctggagtgcagtggcacaatcttggctcactgcaacctctgcctcccgggttcaagcaattctcctgcctcagcctcccgagtagctgggattacaggtgtctgcaattgaactccaaggtgcagaatggtttggaaagtagctgtattcctcagtgtggccctgggcattggtgccgttcctatagatgatcctgaagatggaggcaagcactgggtggtgatcgtggcaggttcaaatggctggtataattataggcaccaggcagacgcgtgccatgcctaccagatcattcaccgcaatgggattcctgacgaacagatcgttgtgatgatgtacgatgacattgcttactctgaagacaatcccactccaggaattgtgatcaacaggcccaatggcacagatgtctatcagggagtcccgaaggactacactggagaggatgttaccccacaaaatttccttgctgtgttgagaggcgatgcagaagcagtgaagggcataggatccggcaaagtcctgaagagtggcccccaggatcacgtgttcatttacttcactgaccatggatctactggaatactggtttttcccaatgaagatcttcatgtaaaggacctgaatgagaccatccattacatgtacaaacacaaaatgtaccgaaagatggtgttctacattgaagcctgtgagtctgggtccatgatgaaccacctgccggataacatcaatgtttatgcaactactgctgccaaccccagagagtcgtcctacgcctgttactatgatgagaagaggtccacgtacctgggggactggtacagcgtcaactggatggaagactcggacgtggaagatctgactaaagagaccctgcacaagcagtaccacctggtaaaatcgcacaccaacaccagccacgtcatgcagtatggaaacaaaacaatctccaccatgaaagtgatgcagtttcagggtatgaaacgcaaagccagttctcccgtccccctacctccagtcacacaccttgacctcacccccagccctgatgtgcctctcaccatcatgaaaaggaaactgatgaacaccaatgatctggaggagtccaggcagctcacggaggagatccagcggcatctggatgccaggcacctcattgagaagtcagtgcgtaagatcgtctccttgctggcagcgtccgaggctgaggtggagcagctcctgtccgagagagccccgctcacggggcacagctgctacccagaggccctgctgcacttccggacccactgcttcaactggcactcccccacgtacgagtatgcgttgagacatttgtacgtgctggtcaacctttgtgagaagccgtatccgcttcacaggataaaattgtccatggaccacgtgtgccttggtcactactgaagagctgcctcctggaagcttttccaagtgtgagcgccccaccgactgtgtgctgatcagagactggagaggtggagtgagaagtctccgctgctcgggccctcctggggagcccccgctccagggctcgctccaggaccttcttcacaagatgacttgctcgctgttacctgcttccccagtcttttctgaaaaactacaaattagggtgggaaaagctctgtattgagaagggtcatatttgctttctaggaggtttgttgttttgcctgttagttttgaggagcaggaagctcatgggggcttctgtagcccctctcaaaaggagtctttattctgagaatttgaagctgaaacctctttaaatcttcagaatgattttattgaagagggccgcaagccccaaatggaaaactgtttttagaaaatatgatgatttttgattgcttttgtatttaattctgcaggtgttcaagtcttaaaaaataaagatttataacagaacccaaatattaacgtccgacactgact

SEQ ID NO: 452424 - DNA, 1948 bp, Homo sapiens
cgcggcacagtggcccttaagcgaggagcggcggcgcccgcagcaatcacagcagtgccgacgtcgtgggtgtttggtgtgaggctgcgagccgccgcgagttctcacggtcccgccggcgccaccaccgcggtcactcaccgccgccgccgccaccactgccaccacggtcgcctgccacaggtgtctgcaattgaactccaaggtgcagaatggtttggaaagtagctgtattcctcagtgtggccctggggcagacgcgtgccatgcctaccagatcattcaccgcaatgggattcctgacgaacagatcgttgtgatgatgtacgatgacattgcttactctgaagacaatcccactccaggaattgtgatcaacaggcccaatggcacagatgtctatcagggagtcccgaaggactacactggagaggatgttaccccacaaaatttccttgctgtgttgagaggcgatgcagaagcagtgaagggcataggatccggcaaagtcctgaagagtggcccccaggatcacgtgttcatttacttcactgaccatggatctactggaatactggtttttcccaatgaagatcttcatgtaaaggacctgaatgagaccatccattacatgtacaaacacaaaatgtaccgaaagatggtgttctacattgaagcctgtgagtctgggtccatgatgaaccacctgccggataacatcaatgtttatgcaactactgctgccaaccccagagagtcgtcctacgcctgttactatgatgagaagaggtccacgtacctgggggactggtacagcgtcaactggatggaagactcggacgtggaagatctgactaaagagaccctgcacaagcagtaccacctggtaaaatcgcacaccaacaccagccacgtcatgcagtatggaaacaaaacaatctccaccatgaaagtgatgcagtttcagggtatgaaacgcaaagccagttctcccgtccccctacctccagtcacacaccttgacctcacccccagccctgatgtgcctctcaccatcatgaaaaggaaactgatgaacaccaatgatctggaggagtccaggcagctcacggaggagatccagcggcatctggatgccaggcacctcattgagaagtcagtgcgtaagatcgtctccttgctggcagcgtccgaggctgaggtggagcagctcctgtccgagagagccccgctcacggggcacagctgctacccagaggccctgctgcacttccggacccactgcttcaactggcactcccccacgtacgagtatgcgttgagacatttgtacgtgctggtcaacctttgtgagaagccgtatccgcttcacaggataaaattgtccatggaccacgtgtgccttggtcactactgaagagctgcctcctggaagcttttccaagtgtgagcgccccaccgactgtgtgctgatcagagactggagaggtggagtgagaagtctccgctgctcgggccctcctggggagcccccgctccagggctcgctccaggaccttcttcacaagatgacttgctcgctgttacctgcttccccagtcttttctgaaaaactacaaattagggtgggaaaagctctgtattgagaagggtcatatttgctttctaggaggtttgttgttttgcctgttagttttgaggagcaggaagctcatgggggcttctgtagcccctctcaaaaggagtctttattctgagaatttgaagctgaaacctctttaaatcttcagaatgattttattgaagagggccgcaagccccaaatggaaaactgtttttagaaaatatgatgatttttgattgcttttgtatttaattctgcaggtgttcaagtcttaaaaaataaagatttataacagaacccaaatattaacgtccgacactgact

SEQ ID NO: 452425 - DNA, 2323 bp, Homo sapiens
cgcggcacagtggcccttaagcgaggagcggcggcgcccgcagcaatcacagcagtgccgacgtcgtgggtgtttggtgtgaggctgcgagccgccgcgagttctcacggtcccgccggcgccaccaccgcggtcactcaccgccgccgccgccaccactgccaccacggtcgcctgccacaggtgtctgcaattgaactccaaggtgcagaatggtttggaaagtagctgtattcctcagtgtggccctgggcattggtgccgttcctatagatgatcctgaagatggaggcaagcactgggtggtgatcgtggcaggttcaaatggctggtataattataggcaccaggcagacgcgtgccatgcctaccagatcattcaccgcaatgggattcctgacgaacagatcgttgtgatgatgtacgatgacattgcttactctgaagacaatcccactccaggaattgtgatcaacaggcccaatggcacagatgtctatcagggagtcccgaaggactacactggagaggatgttaccccacaaaatttccttgctgtgttgagaggcgatgcagaagcagtgaagggcataggatccggcaaagtcctgaagagtggcccccaggatcacgtgttcatttacttcactgaccatggatctactggaatactggtttttcccaatgaagatcttcatgtaaaggacctgaatgagaccatccattacatgtacaaacacaaaatgtaccgaaagatggtgttctacattgaagcctgtgagtctgggtccatgatgaaccacctgccggataacatcaatgtttatgcaactactgctgccaaccccagagagtcgtcctacgcctgttactatgatgagaagaggtccacgtacctgggggactggtacagcgtcaactggatggaagactcggacgtggaagatctgactaaagagaccctgcacaagcagtaccacctggtaaaatcgcacaccaacaccagccacgtcatgcagtatggaaacaaaacaatctccaccatgaaagtgatgcagtttcagggtatgaaacgcaaagccagttctcccgtccccctacctccagtcacacaccttgacctcacccccagccctgatgtgcctctcaccatcatgaaaaggaaactgatgaacaccaatgatctggaggagtccaggcagctcacggaggagatccagcggcatctggatgccaggcacctcattgagaagtcagtgcgtaagatcgtctccttgctggcagcgtccgaggctgaggtggagcagctcctgtccgagagagccccgctcacggggcacagctgctacccagaggccctgctgcacttccggacccactgcttcaactggcactcccccacgtacgagtatgcgttgagacatttgtacgtgctggtcaacctttgtgagaagccgtatccgcttcacaggtaactaatgcagcggtgacgcttgaaaggtcgatgtcattctgaaagcagaaggggctgccatcctcttctgcaagtgggcattttcacttctgccaggagctccctccagctttcctctacagccatttgtcagcagggtccagaagccacgttctcagtgacagctgctgggcgggcctgtcataactgcctgcctgccgcatgtgggtttgcgtttgtctgcctttcttcagagttgacacggttcaccaagttctccttcctgtctctcgcaggataaaattgtccatggaccacgtgtgccttggtcactactgaagagctgcctcctggaagcttttccaagtgtgagcgccccaccgactgtgtgctgatcagagactggagaggtggagtgagaagtctccgctgctcgggccctcctggggagcccccgctccagggctcgctccaggaccttcttcacaagatgacttgctcgctgttacctgcttccccagtcttttctgaaaaactacaaattagggtgggaaaagctctgtattgagaagggtcatatttgctttctaggaggtttgttgttttgcctgttagttttgaggagcaggaagctcatgggggcttctgtagcccctctcaaaaggagtctttattctgagaatttgaagctgaaacctctttaaatcttcagaatgattttattgaagagggccgcaagccccaaatggaaaactgtttttagaaaatatgatgatttttgattgcttttgtatttaattctgcaggtgttcaagtcttaaaaaataaagatttataacagaacccaaatattaacgtccgacactgact

SEQ ID NO: 452426 - DNA, 1810 bp, Homo sapiens
cgcggcacagtggcccttaagcgaggagcggcggcgcccgcagcaatcacagcagtgccgacgtcgtgggtgtttggtgtgaggctgcgagccgccgcgagttctcacggtcccgccggcgccaccaccgcggtcactcaccgccgccgccgccaccactgccaccacggtcgcctgccacaggtgtctgcaattgaactccaaggtgcagaatggtttggaaagtagctgtattcctcagtgtggccctgggcattggtgccgttcctatagatgatcctgaagatggaggcaagcactgggtggtgatcgtggcaggttcaaatggctggtataattataggcaccaggcagacgcgtgccatgcctaccagatcattcaccgcaatgggattcctgacgaacagatcgttgtgatgatgtacgatgacattgcttactctgaagacaatcccactccaggaattgtgatcaacaggcccaatggcacagatgtctatcagggagtcccgaaggactacactggagaggatgttaccccacaaaatttccttgctgtgttgagaggcgatgcagaagcagtgaagggcataggatccggcaaagtcctgaagagtggcccccaggatcacgtgttcatttacttcactgaccatggatctactggaatactggtttttcccaatgaagatcttcatgtaaaggacctgaatgagaccatccattacatgtacaaacacaaaatgtaccgaaagatggtgttctacattgaagcctgtgagtctgggtccatgatgaaccacctgccggataacatcaatgtttatgcaactactgctgccaaccccagagagtcgtcctacgcctgttactatgatgagaagaggtccacgtacctgggggactggtacagcgtcaactggatggaagactcggacgtggaagatctgactaaagagaccctgcacaagcagtaccacctggtaaaatcgcacaccaacaccagccacgtcatgcagtatggaaacaaaacaatctccaccatgaaagtgatgcagtttcagggtatgaaacgcaaagccagttctcccgtccccctacctccagtcacacaccttgacctcacccccagccctgatgtgcctctcaccatcatgaaaaggaaactgatgaacaccaatgatctggaggagtccaggcagctcacggaggagatccagcggcatctggatggatgataaaattgtccatggaccacgtgtgccttggtcactactgaagagctgcctcctggaagcttttccaagtgtgagcgccccaccgactgtgtgctgatcagagactggagaggtggagtgagaagtctccgctgctcgggccctcctggggagcccccgctccagggctcgctccaggaccttcttcacaagatgacttgctcgctgttacctgcttccccagtcttttctgaaaaactacaaattagggtgggaaaagctctgtattgagaagggtcatatttgctttctaggaggtttgttgttttgcctgttagttttgaggagcaggaagctcatgggggcttctgtagcccctctcaaaaggagtctttattctgagaatttgaagctgaaacctctttaaatcttcagaatgattttattgaagagggccgcaagccccaaatggaaaactgtttttagaaaatatgatgatttttgattgcttttgtatttaattctgcaggtgttcaagtcttaaaaaataaagatttataacagaacccaaatattaacgtccgacactgact

SEQ ID NO: 452427 - DNA, 2032 bp, Homo sapiens
cgcggcacagtggcccttaagcgaggagcggcggcgcccgcagcaatcacagcagtgccgacgtcgtgggtgtttggtgtgaggctgcgagccgccgcgagttctcacggtcccgccggcgccaccaccgcggtcactcaccgccgccgccgccaccactgccaccacggtcgcctgccacaggtgtctgcaattgaactccaaggtgcagaatggtttggaaagtagctgtattcctcagtgtggccctgggcattggtgccgttcctatagatgatcctgaagatggaggcaagcactgggtggtgatcgtggcaggttcaaatggctggtataattataggcaccaggcagacgcgtgccatgcctaccagatcattcaccgcaatgggattcctgacgaacagatcgttgtgatgatgtacgatgacattgcttactctgaagacaatcccactccaggaattgtgatcaacaggcccaatggcacagatgtctatcagggagtcccgaaggactacactggagaggatgttaccccacaaaatttccttgctgtgttgagaggcgatgcagaagcagtgaagggcataggatccggcaaagtcctgaagagtggcccccaggatcacgtgttcatttacttcactgaccatggatctactggaatactggtttttcccaatgaagatcttcatgtaaaggacctgaatgagaccatccattacatgtacaaacacaaaatgtaccgaaagatggtgttctacattgaagcctgtgagtctgggtccatgatgaaccacctgccggataacatcaatgtttatgcaactactgctgccaaccccagagagtcgtcctacgcctgttactatgatgagaagaggtccacgtacctgggggactggtacagcgtcaactggatggaagactcggacgtggaagatctgactaaagagaccctgcacaagcagtaccacctggtaaaatcgcacaccaacaccagccacgtcatgcagtatggaaacaaaacaatctccaccatgaaagtgatgcagtttcagggtatgaaacgcaaagccagttctcccgtccccctacctccagtcacacaccttgacctcacccccagccctgatgtgcctctcaccatcatgaaaaggaaactgatgaacaccaatgatctggaggagtccaggcagctcacggaggagatccagcggcatctggatgccaggcacctcattgagaagtcagtgcgtaagatcgtctccttgctggcagcgtccgaggctgaggtggagcagctcctgtccgagagagccccgctcacggggcacagctgctacccagaggccctgctgcacttccggacccactgcttcaactggcactcccccacgtacgagtatgcgttgagacatttgtacgtgctggtcaacctttgtgagaagccgtatccgcttcacaggataaaattgtccatggaccacgtgtgccttggtcactactgaagagctgcctcctggaagcttttccaagtgtgagcgccccaccgactgtgtgctgatcagagactggagaggtggagtgagaagtctccgctgctcgggccctcctggggagcccccgctccagggctcgctccaggaccttcttcacaagatgacttgctcgctgttacctgcttccccagtcttttctgaaaaactacaaattagggtgggaaaagctctgtattgagaagggtcatatttgctttctaggaggtttgttgttttgcctgttagttttgaggagcaggaagctcatgggggcttctgtagcccctctcaaaaggagtctttattctgagaatttgaagctgaaacctctttaaatcttcagaatgattttattgaagagggccgcaagccccaaatggaaaactgtttttagaaaatatgatgatttttgattgcttttgtatttccgcaactcatccagcaggtgtacaattttttaacattttttaattaaaatagtacccaaa

SEQ ID NO: 452428 - DNA, 1177 bp, Homo sapiens
gcatgtctagtcaagtctcctgtcttggacaatgttcagcagtccactgcatatagacacacagaagaggaagatctgactaaagagaccctgcacaagcagtaccacctggtaaaatcgcacaccaacaccagccacgtcatgcagtatggaaacaaaacaatctccaccatgaaagtgatgcagtttcagggtatgaaacgcaaagccagttctcccgtccccctacctccagtcacacaccttgacctcacccccagccctgatgtgcctctcaccatcatgaaaaggaaactgatgaacaccaatgatctggaggagtccaggcagctcacggaggagatccagcggcatctggatggatgccaggcacctcattgagaagtcagtgcgtaagatcgtctccttgctggcagcgtccgaggctgaggtggagcagctcctgtccgagagagccccgctcacggggcacagctgctacccagaggccctgctgcacttccggacccactgcttcaactggcactcccccacgtacgagtatgcgttgagacatttgtacgtgctggtcaacctttgtgagaagccgtatccgcttcacaggataaaattgtccatggaccacgtgtgccttggtcactactgaagagctgcctcctggaagcttttccaagtgtgagcgccccaccgactgtgtgctgatcagagactggagaggtggagtgagaagtctccgctgctcgggccctcctggggagcccccgctccagggctcgctccaggaccttcttcacaagatgacttgctcgctgttacctgcttccccagtcttttctgaaaaactacaaattagggtgggaaaagctctgtattgagaagggtcatatttgctttctaggaggtttgttgttttgcctgttagttttgaggagcaggaagctcatgggggcttctgtagcccctctcaaaaggagtctttattctgagaatttgaagctgaaacctctttaaatcttcagaatgattttattgaagagggccgcaagccccaaatggaaaactgtttttagaaaatatgatgatttttgattgcttttgtatttaattctgcaggtgttcaagtcttaaaaaataaagatttataacagaacccaaatattaacgtccgacactgact

SEQ ID NO: 452429 - DNA, 1317 bp, Homo sapiens
cgcggcacagtggcccttaagcgaggagcggcggcgcccgcagcaatcacagcagtgccgacgtcgtgggtgtttggtgtgaggctgcgagccgccgcgagttctcacggtcccgccggcgccaccaccgcggtcactcaccgccgccgccgccaccactgccaccacggtcgcctgccacaggtgtctgcaattgaactccaaggtgcagaatggtttggaaagtagctgtattcctcagtgtggccctgggcattggtgccgttcctatagatgatcctgaagatggaggcaagcactgggtggtgatcgtggcaggttcaaatggctggtataattataggcaccaggcagacgcgtgccatgcctaccagatcattcaccgcaatgggattcctgacgaacagatcgttgtgatgatgtacgatgacattgcttactctgaagacaatcccactccaggaattgtgatcaacaggcccaatggcacagatgtctatcagggagtcccgaaggactacactggagaggatgttaccccacaaaatttccttgctgtgttgagaggcgatgcagaagcagtgaagggcataggatccggcaaagtcctgaagagtggcccccaggatcacgtgttcatttacttcactgaccatggatctactggaatactggtttttcccaatgaagatcttcatgtaaaggacctgaatgagaccatccattacatgtacaaacacaaaatgtaccgaaagatggtgttctacattgaagcctgtgagtctgggtccatgatgaaccacctgccggataacatcaatgtttatgcaactactgctgccaaccccagagagtcgtcctacgcctgttactatgatgagaagaggtccacgtacctgggggactggtacagcgtcaactggatggaagactcggacgtggaagatctgactaaagagaccctgcacaagcagtaccacctggtaaaatcgcacaccaacaccagccacgtcatgcagtatggaaacaaaacaatctccaccatgaaagtgatgcagtttcagggtatgaaacgcaaagccagttctcccgtccccctacctccagtcacacaccttgacctcacccccagccctgatgtgcctctcaccatcatgaaaaggaaactgatgaacaccaatgatctggaggagtccaggcagctcacggaggagatccagcggcatctggatatgacagacatatagttgaactcatttggtctgaggttaaaggtctccactaacccgtaggtctctttccgatcagtagcgtaga

SEQ ID NO: 452430 - DNA, 983 bp, Homo sapiens
cgcggcacagtggcccttaagcgaggagcggcggcgcccgcagcaatcacagcagtgccgacgtcgtgggtgtttggtgtgaggctgcgagccgccgcgagttctcacggtcccgccggcgccaccaccgcggtcactcaccgccgccgccgccaccactgccaccacggtcgcctgccacaggtgtctgcaattgaactccaaggtgcagaatggtttggaaagtagctgtattcctcagtgtggccctgggcattggtgccgttcctatagatgatcctgaagatggaggcaagcactgggtggtgatcgtggcaggttcaaatggctggtataattataggcaccaggcagacgcgtgccatgcctaccagatcattcaccgcaatgggattcctgacgaacagatcgttgtgatgatgtacgatgacattgcttactctgaagacaatcccactccaggaattgtgatcaacaggcccaatggcacagatgtctatcagggagtcccgaaggactacactggagaggatgttaccccacaaaatttccttgctgtgttgagaggcgatgcagaagcagtgaagggcataggatccggcaaagtcctgaagagtggcccccaggatcacgtgttcatttacttcactgaccatggatctactggaatactggtttttcccaatgaagatcttcatgtaaaggacctgaatgagaccatccattacatgtacaaacacaaaatgtaccgaaagatggtgttctacattgaagcctgtgagtctgggtccatgatgaaccacctgccggataacatcaatgtttatgcaactactgctgccaaccccagagagtcgtcctacgcctgttactatgatgagaagagggaggggatttaattttaattttaaaatgtttaggaaatttatacaaagaaactttttaataaagtatattgaaagtttcaaaaaaaaatcaaaaaa

SEQ ID NO: 452431 - DNA, 912 bp, Homo sapiens
aacgagtcagaggtcgcgcaggcgctggtaccccgttggtccgcgcgttgctgcgttgtgaggggtgtcagctcagtgcatcccaggcagctcttagtgtggagcagtgaactgtgtgtggttccttctacttggggatcatgcagagagcttcacgtctgaagagagagctgcacatgttagccacagagccacccccaggcatcacatgttggcaagataaagaccaaatggatgacctgcgagctcaaatattaggtggagccaacacaccttatgagaaaggtgtttttaagctagaagttatcattcctgagaggtacccatttgaacctcctcagatccgatttctcactccaatttatcatccaaacattgattctgctggaaggatttgtctggatgttctcaaattgccaccaaaaggtgcttggagaccatccctcaacatcgcaactgtgttgacctctattcagctgctcatgtcagaacccaaccctgatgacccgctcatggctgacatatcctcagaatttaaatataataagccagccttcctcaagaatgccagacagtggacagagaagcatgcaagacagaaacaaaaggctgatgaggaagagatgcttgataatctaccagaggctggtgactccagagtacacaactcaacacagaaaaggaaggccagtcagctagtaggcatagaaaagaaatttcatcctgatgtttaggggacttgtcctggttcatcttagttaatgtgttctttgccaaggtgatctaagttgcctaccttgaatttttttttaaatatatttgatgacataatttttgtgtagtttatttatcttgtacatatgtattttgaaatcttttaaacctgaaaaataaatagtcatttaatgttga

SEQ ID NO: 452432 - DNA, 537 bp, Homo sapiens
aacgagtcagaggtcgcgcaggcgctggtaccccgttggtccgcgcgttgctgcgttgtgaggggtgtcagctcagtgcatcccaggcagctcttagtgtggagcagtgaactgtgtgtggttccttctacttggggatcatgcagagagcttcacgtctgaagagagagctgcacatgttagccacagagccacccccaggcatcacatgttggcaagataaagaccaaatggatgacctgcgagctcaaatattaggtggagccaacacaccttatgagaaaggtgtttttaagctagaagttatcattcctgagaggtacccatttgaacctcctcagatccgatttctcactccaatttatcatccaaacattgattctgctggaaggatttgtctggatgttctcaaattgccaccaaaatcctcagaatttaaatataataagccagccttcctcaagaatgccagacagtggacagagaagcatgcaagacagaaacaaaagcggctgatgagggagatgcttgatctcc

SEQ ID NO: 452433 - DNA, 442 bp, Homo sapiens
gagagaatatcgtatgcataatactgtatttaaatcttgcaacaaagaagtacatggaaataatattacagagcttcatttttctccatcctggcatttgtgtgaaccttactgtgtttcaccctgtctcctctttaggctgatgaggaagagatgcttgataatctaccagaggctggtgactccagagtacacaactcaacacagaaaaggaaggccagtcagctagtaggcatagaaaagaaatttcatcctgatgtttaggggacttgtcctggttcatcttagttaatgtgttctttgccaaggtgatctaagttgcctaccttgaatttttttttaaatatatttgatgacataatttttgtgtagtttatttatcttgtacatatgtattttgaaatcttttaaacctgaaaaataaatagtcatttaatgttga

SEQ ID NO: 452434 - DNA, 844 bp, Homo sapiens
aacgagtcagaggtcgcgcaggcgctggtaccccgttggtccgcgcgttgctgcgttgtgaggggtgtcagctcagtgcatcccaggcagctcttagtgtggagcagtgaactgtgtgtggttccttctacttggggatcatgcagagagcttcacgtctgaagagagagctgcacatgttagccacagagccacccccaggcatcacatgttggcaagataaagaccaaatggatgacctgcgagctcaaatattaggtggagccaacacaccttatgagaaaggtgtttttaagctagaagttatcattcctgagaggtacccatttgaacctcctcagatccgatttctcactccaatttatcatccaaacattgattctgctggaaggatttgtctggatgttctcaaattgccaccaaaaggtgcttggagaccatccctcaacatcgcaactgtgttgacctctattcagctgctcatgtcagaacccaaccctgatgacccgctcatggctgacatatcctcagaatttaaatataataagccagccttcctcaagaatgccagacagtggacagagaagcatgcaagacagaaacaaaaggctgatgaggaagagatgcttgataatctaccagaggctggtgactccagagtacacaactcaacacagaaaaggaaggccagtcagctagtaggcatagaaaagaaatttcatcctgatgtttaggggacttgtcctggttcatcttagttaatgtgttctttgccaaggtgatctaagttgcctaccttgaatttttttttaaatatatttgatcccttcccccaaaaaaaaaa

SEQ ID NO: 452435 - DNA, 842 bp, Homo sapiens
aacgagtcagaggtcgcgcaggcgctggtaccccgttggtccgcgcgttgctgcgttgtgaggggtgtcagctcagtgcatcccaggcagctcttagtgtggagcagtgaactgtgtgtggttccttctacttggggatcatgcagagagcttcacgtctgaagagagagctgcacatgttagccacagagccacccccaggcatcacatgttggcaagataaagaccaaatggatgacctgcgagctcgtacccatttgaacctcctcagatccgatttctcactccaatttatcatccaaacattgattctgctggaaggatttgtctggatgttctcaaattgccaccaaaaggtgcttggagaccatccctcaacatcgcaactgtgttgacctctattcagctgctcatgtcagaacccaaccctgatgacccgctcatggctgacatatcctcagaatttaaatataataagccagccttcctcaagaatgccagacagtggacagagaagcatgcaagacagaaacaaaaggctgatgaggaagagatgcttgataatctaccagaggctggtgactccagagtacacaactcaacacagaaaaggaaggccagtcagctagtaggcatagaaaagaaatttcatcctgatgtttaggggacttgtcctggttcatcttagttaatgtgttctttgccaaggtgatctaagttgcctaccttgaatttttttttaaatatatttgatgacataatttttgtgtagtttatttatcttgtacatatgtattttgaaatcttttaaacctgaaaaataaatagtcatttaatgttga

SEQ ID NO: 452436 - DNA, 857 bp, Homo sapiens
cttagaagatatgctggagtatttagaggtaaagtggcttgaatccaggtggtagatatatggatgttttcaatactgttatttcaaactgatttattttaaattttcatagtgaaaatttaggaagagagaaagtttgcctcccaaaggcagtctccctgacatttctataataccaaaattattgtgaccaagaaactatttaaatgtatttagaagcaaaattatgtaatgaaaattatctgttgtcttattctttcataggtacccatttgaacctcctcagatccgatttctcactccaatttatcatccaaacattgattctgctggaaggatttgtctggatgttctcaaattgccaccaaaaggtgcttggagaccatccctcaacatcgcaactgtgttgacctctattcagctgctcatgtcagaacccaaccctgatgacccgctcatggctgacatatcctcagaatttaaatataataagccagccttcctcaagaatgccagacagtggacagagaagcatgcaagacagaaacaaaaggctgatgaggaagagatgcttgataatctaccagaggctggtgactccagagtacacaactcaacacagaaaaggaaggccagtcagctagtaggcatagaaaagaaatttcatcctgatgtttaggggacttgtcctggttcatcttagttaatgtgttctttgccaaggtgatctaagttgcctaccttgaatttttttttaaatatatttgatgacataatttttgtgtagtttatttatcttgtacatatgtattttgaaatcttttaaacctgaaaaataaatagtcatttaatgttga

SEQ ID NO: 452437 - DNA, 1078 bp, Homo sapiens
aacgagtcagaggtcgcgcaggcgctggtaccccgttggtccgcgcgttgctgcgttgtgaggggtgtcagctcagtgcatcccaggcagctcttagtgtggagcagtgaactgtgtgtggttccttctacttggggatcatgcagagagcttcacgtctgaagagagagctgcacatgttagccacagagccacccccaggcatcacatgttggcaagataaagaccaaatggatgacctgcgagctcaaatattaggtggagccaacacaccttatgagaaaggtgtttttaagctagaagttatcattcctgagaggtacccatttgaacctcctcagatccgatttctcactccaatttatcatccaaacattgattctgctggaaggatttgtctggatgttctcaaattgccaccaaaaggtgcttggagaccatccctcaacatcgcaactgtgttgacctctattcagctgctcatgtcagaacccaaccctgatgacccgctcatggctgacatagtaaatatccccattttcctctgcaacacatatcctaccttgtctataccgctaactctccctgtgtgaggatagctgcagcagctctaaccactgcaaatcatgtttttctccattaactcttttctttgatttcatctcagtcctcagaatttaaatataataagccagccttcctcaagaatgccagacagtggacagagaagcatgcaagacagaaacaaaaggctgatgaggaagagatgcttgataatctaccagaggctggtgactccagagtacacaactcaacacagaaaaggaaggccagtcagctagtaggcatagaaaagaaatttcatcctgatgtttaggggacttgtcctggttcatcttagttaatgtgttctttgccaaggtgatctaagttgcctaccttgaatttttttttaaatatatttgatgacataatttttgtgtagtttatttatcttgtacatatgtattttgaaatcttttaaacctgaaaaataaatagtcatttaatgttgaaaaaaaaaaaacaacacaccaag

SEQ ID NO: 452438 - DNA, 1138 bp, Homo sapiens
aacgagtcagaggtcgcgcaggcgctggtaccccgttggtccgcgcgttgctgcgttgtgaggggtgtcagctcagtgcatcccaggcagctcttagtgtggagcagtgaactgtgtgtggttccttctacttggggatcatgcagagagcttcacgtctgaagagagagctgcacatgttagccacagagccacccccaggcatcacatgttggcaagataaagaccaaatggatgacctgcgagctcaaatattaggtggagccaacacaccttatgagaaaggtgtttttaagctagaagttatcattcctgagaggtacccatttgaacctcctcagatccgatttctcactccaatttatcatccaaacattgattctgctggaaggatttgtctggatgttctcaaattgccaccaaaagtgagttgtgggtaaatggttgactctacagcattctgttttcttcatctattaaacttgaattagaggatcacattctaatatatcgcaactgtgttgacctctattcagctgctcatgtcagaacccaaccctgatgacccgctcatggctgacatagtaaatatccccattttcctctgcaacacatatcctaccttgtctataccgctaactctccctgtgtgaggatagctgcagcagctctaaccactgcaaatcatgtttttctccattaactcttttctttgatttcatctcagtcctcagaatttaaatataataagccagccttcctcaagaatgccagacagtggacagagaagcatgcaagacagaaacaaaaggctgatgaggaagagatgcttgataatctaccagaggctggtgactccagagtacacaactcaacacagaaaaggaaggccagtcagctagtaggcatagaaaagaaatttcatcctgatgtttaggggacttgtcctggttcatcttagttaatgtgttctttgccaaggtgatctaagttgcctaccttgaatttttttttaaatatatttgatgacataatttttgtgtagtttatttatcttgtacatatgtattttgaaatcttttaaacctgaaaaataaatagtcatttaatgttgaaaaaaaaaaaacaacacaccaag

SEQ ID NO: 452439 - DNA, 1081 bp, Homo sapiens
cttagaagatatgctggagtatttagaggtaaagtggcttgaatccaggtggtagatatatggatgttttcaatactgttatttcaaactgatttattttaaattttcatagtgaaaatttaggaagagagaaagtttgcctcccaaaggcagtctccctgacatttctataataccaaaattattgtgaccaagaaactatttaaatgtatttagaagcaaaattatgtaatgaaaattatctgttgtcttattctttcataggtacccatttgaacctcctcagatccgatttctcactccaatttatcatccaaacattgattctgctggaaggatttgtctggatgttctcaaattgccaccaaaagtgagttgtgggtaaatggttgactctacagcattctgttttcttcatctattaaacttgaattagaggatcacattctaatataaaagcaactgttcatctgtttgtatatagggtgcttggagaccatccctcaacatcgcaactgtgttgacctctattcagctgctcatgtcagaacccaaccctgatgacccgctcatggctgacatatctccctgtgtgaggatagctgcagcagctctaaccactgcaaatcatgtttttctccattaactcttttctttgatttcatctcagtcctcagaatttaaatataataagccagccttcctcaagaatgccagacagtggacagagaagcatgcaagacagaaacaaaaggctgatgaggaagagatgcttgataatctaccagaggctggtgactccagagtacacaactcaacacagaaaaggaaggccagtcagctagtaggcatagaaaagaaatttcatcctgatgtttaggggacttgtcctggttcatcttagttaatgtgttctttgccaaggtgatctaagttgcctaccttgaatttttttttaaatatatttgatgacataatttttgtgtagtttatttatcttgtacatatgtattttgaaatcttttaaacctgaaaaataaatagtcatttaatgttgaaaaaaaaaaaacaacacaccaag

SEQ ID NO: 452440 - DNA, 897 bp, Homo sapiens
ggtctcgctctgccacccaggctggagtgcagtggcgcgatcttggctcactgcaacctccgccttcctggttgaagccattctcctgcctcagccttccaagtagctgggattacaggcgtgcaccaccgtgagttgtgggtaaatggttgactctacagcattctgttttcttcatctattaaacttgaattagaggatcacattctaatataaaagcaactgttcatctgtttgtatatagggtgcttggagaccatccctcaacatcgcaactgtgttgacctctattcagctgctcatgtcagaacccaaccctgatgacccgctcatggctgacatagtaaatatccccattttcctctgcaacacatatcctaccttgtctataccgctaactctccctgtgtgaggatagctgcagcagctctaaccactgcaaatcatgtttttctccattaactcttttctttgatttcatctcagtcctcagaatttaaatataataagccagccttcctcaagaatgccagacagtggacagagaagcatgcaagacagaaacaaaaggctgatgaggaagagatgcttgataatctaccagaggctggtgactccagagtacacaactcaacacagaaaaggaaggccagtcagctagtaggcatagaaaagaaatttcatcctgatgtttaggggacttgtcctggttcatcttagttaatgtgttctttgccaaggtgatctaagttgcctaccttgaatttttttttaaatatatttgatgacataatttttgtgtagtttatttatcttgtacatatgtattttgaaatcttttaaacctgaaaaataaatagtcatttaatgttgaaaaaaaaaaaacaacacaccaag

SEQ ID NO: 452441 - DNA, 418 bp, Homo sapiens
aacgagtcagaggtcgcgcaggcgctggtaccccgttggtccgcgcgttgctgcgttgtgaggggtgtcagctcagtgcatcccaggcagctcttagtgtggagcagtgaactgtgtgtggttccttctacttggggatcatgcagagagcttcacgtctgaagagagagctgcacatgttagccacagagccacccccaggcatcacatgttggcaagataaagaccaaatggatgacctgcgagctcaaatattaggtggagccaacacaccttatgagaaaggtgtttttaagctagaagttatcattcctgagaggtacccatttgaacctcctcagatccgatttctcactccaatttatcatccaaacaaatccttccagcagaatcaatgttgggctgatcaattggagtg

SEQ ID NO: 452442 - DNA, 938 bp, Homo sapiens
aacgagtcagaggtcgcgcaggcgctggtaccccgttggtccgcgcgttgctgcgttgtgaggggtgtcagctcagtgcatcccaggcagctcttagtgtggagcagtgaactgtgtgtggttccttctacttggggatcatgcagagagcttcacgtctgaagagagagctgcacatgttagccacagagccacccccaggcatcacatgttggcaagataaagaccaaatggatgacctgcgagctcaaatattaggtggagccaacacaccttatgagaaaggtgtttttaagctagaagttatcattcctgagaggtacccatttgaacctcctcagatccgatttctcactccaatttatcatccaaacattgattctgctggaaggatttgtctggatgttctcaaattgccaccaaaaggtgcttggagaccatccctcaacatcgcaactgtgttgacctctattcagctgctcatgtcagaacccaaccctgatgacccgctcatggctgacatatcctcagaatttaaatataataagccagccttcctcaagaatgccagacagtggacagagaagcatgcaagacagaaacaaaaggctgatgaggaagagatgcttgataatctaccagaggctggtgactccagagtacacaactcaacacagaaaaggaaggccagtcagctagtaggcatagaaaagaaatttcatcctgatgtttaggggacttgtcctggttcatcttagttaatgtgttctttgccaaggtgatctaagttgcctaccttgaatttttttttaaatatatttgatgacataatttttgtgtagtttatttatcttgtacatatgtattttgaaatcttttaaacctgaaaaataaatagtcatttaatgttgaaaaaaacaaaaagatttcccgagcgt

SEQ ID NO: 452443 - DNA, 935 bp, Homo sapiens
aacgagtcagaggtcgcgcaggcgctggtaccccgttggtccgcgcgttgctgcgttgtgaggggtgtcagctcagtgcatcccaggcagctcttagtgtggagcagtgaactgtgtgtggttccttctacttggggatcatgcagagagcttcacgtctgaagagagagctgcacatgttagccacagagccacccccaggcatcacatgttggcaagataaagaccaaatggatgacctgcgagctcaaatattaggtggagccaacacaccttatgagaaaggtgtttttaagctagaagttatcattcctgagaggtacccatttgaacctcctcagatccgatttctcactccaatttatcatccaaacattgattctgctggaaggatttgtctggatgttctcaaattgccaccaaaaggtgcttggagaccatccctcaacatcgcaactgtgttgacctctattcagctgctcatgtcagaacccaaccctgatgacccgctcatggctgacatatcctcagaatttaaatataataagccagccttcctcaagaatgccagacagtggacagagaagcatgcaagacagaaacaaaaggctgatgaggaagagatgcttgataatctaccagaggctggtgactccagagtacacaactcaacacagaaaaggaaggccagtcagctagtaggcatagaaaagaaatttcatcctgatgtttaggggacttgtcctggttcatcttagttaatgtgttctttgccaaggtgatctaagttgcctaccttgaatttttttttaaatatatttgatgacataatttttgtgtagtttatttatcttgtacatatgtattttgaaatcttttaaacctgaaaaataaatagtcatttaatgttgaaaaaaaaaaaacaacacaccaag

SEQ ID NO: 452444 - DNA, 640 bp, Homo sapiens
aacgagtcagaggtcgcgcaggcgctggtaccccgttggtccgcgcgttgctgcgttgtgaggggtgtcagctcagtgcatcccaggcagctcttagtgtggagcagtgaactgtgtgtggttccttctacttggggatcatgcagagagcttcacgtctgaagagagagctgcacatgttagccacagagccacccccaggcatcacatgttggcaagataaagaccaaatggatgacctgcgagctcaaatattaggtggagccaacacaccttatgagaaaggtgtttttaagctagaagttatcattcctgagaggtacccatttgaacctcctcagatccgatttctcactccaatttatcatccaaacattgattctgctggaaggatttgtctggatgttctcaaattgccaccaaaaggtgcttggagaccatccctcaacatcgcaactgtgttgacctctattcagctgctcatgtcagaacccaaccctgatgacccgctcatggctgacatatcctcagaatttaaatataataagccagccttcctcaagaatgccagacagtggacagagaagcatgcaagacagaaacaaaagactggctctaaacaggggggtaccgaactcga

SEQ ID NO: 452445 - DNA, 1365 bp, Homo sapiens
  misc_feature (1295)..(1295): n is a, c, g, or t
cggtagctcatgcctgtaatcccagcgctttggaaggctgagacggggttatctcttgggctcacaagttagagacaagcctgggcgtgggctatattgctagatccaggtctctgcaaaaaacaaaaccactcagtttttagtcatctataacgtcctgcctggaagcatgctattttgggcctctgagcttttgcacttgctaattccttctgcgctggggagagctcaaaccctgcccgaaacttctaaaaatggtgcctggataaatgaaggcattagagctgcgattggacggacggctgttggacggcgccactgctggcacttatcgggagatgctcattggacagtcacgtgacgggaccaaacctcccgagggagcgaggcaggtgcggtcacgtgacccggcggcgctgcggggcagcggccattttgcggggcggccacgtgaaggacgcacgttcagcggggctctcacgtgacccgggcgcgctgcggccgcccgcgcggacccggcgagaggcggcggcgggagcggcggtgatggacgggtccggggagcagcccagaggcggggggcccaccagctctgagcagatcatgaagacaggggcccttttgcttcagggtttcatccaggatcgagcagggcgaatggggggggaggcacccgagctggccctggacccggtgcctcaggatgcgtccaccaagaagctgagcgagtgtctcaagcgcatcggggacgaactggacagtaacatggagctgcagaggatgattgccgccgtggacacagactccccccgagaggtctttttccgagtggcagctgacatgttttctgacggcaacttcaactggggccgggttgtcgcccttttctactttgccagcaaactggtgctcaaggccctgtgcaccaaggtgccggaactgatcagaaccatcatgggctggacattggacttcctccgggagcggctgttgggctggatccaagaccagggtggttgggacggcctcctctcctactttgggacgcccacgtggcagaccgtgaccatctttgtggcgggagtgctcaccgcctcactcaccatctggaagaagatgggctgaggcccccagctgccttggactgtgtttttcctccataaattatggcatttttctgggaggggtggggattgggggacatgggcatttttcttacttttgtaattattggggggtgtggggaagagtggtcttgagggggtaataaacctccttcgggacacaaaaaatanaacaaaatctccagggctcaatgccggggcggacaccgggttccggctgggcatgggcatacctgacctg

SEQ ID NO: 452446 - DNA, 1209 bp, Homo sapiens
cggtagctcatgcctgtaatcccagcgctttggaaggctgagacggggttatctcttgggctcacaagttagagacaagcctgggcgtgggctatattgctagatccaggtctctgcaaaaaacaaaaccactcagtttttagtcatctataacgtcctgcctggaagcatgctattttgggcctctgagcttttgcacttgctaattccttctgcgctggggagagctcaaaccctgcccgaaacttctaaaaatggtgcctggataaatgaaggcattagagctgcgattggacggacggctgttggacggcgccactgctggcacttatcgggagatgctcattggacagtcacgtgacgggaccaaacctcccgagggagcgaggcaggtgcggtcacgtgacccggcggcgctgcggggcagcggccattttgcggggcggccacgtgaaggacgcacgttcagcggggctctcacgtgacccgggcgcgctgcggccgcccgcgcggacccggcgagaggcggcggcgggagcggcggtgatggacggtttcatccaggatcgagcagggcgaatggggggggaggcacccgagctggccctggacccggtgcctcaggatgcgtccaccaagaagctgagcgagtgtctcaagcgcatcggggacgaactggacagtaacatggagctgcagaggatgattgccgccgtggacacagactccccccgagaggtctttttccgagtggcagctgacatgttttctgacggcaacttcaactggggccgggttgtcgcccttttctactttgccagcaaactggtgctcaaggccctgtgcaccaaggtgccggaactgatcagaaccatcatgggctggacattggacttcctccgggagcggctgttgggctggatccaagaccagggtggttgggacggcctcctctcctactttgggacgcccacgtggcagaccgtgaccatctttgtggcgggagtgctcaccgcctcactcaccatctggaagaagatgggctgaggcccccagctgccttggactgtgtttttcctccataaattatggcatttttctgggaggggtggggattgggggacatgggcatttttcttacttttgtaattattggggggtgtggggaagagtggtcttgagggggtaataaacctccttcgggacaca

SEQ ID NO: 452447 - DNA, 1872 bp, Homo sapiens
cggtagctcatgcctgtaatcccagcgctttggaaggctgagacggggttatctcttgggctcacaagttagagacaagcctgggcgtgggctatattgctagatccaggtctctgcaaaaaacaaaaccactcagtttttagtcatctataacgtcctgcctggaagcatgctattttgggcctctgagcttttgcacttgctaattccttctgcgctggggagagctcaaaccctgcccgaaacttctaaaaatggtgcctggataaatgaaggcattagagctgcgattggacggacggctgttggacggcgccactgctggcacttatcgggagatgctcattggacagtcacgtgacgggaccaaacctcccgagggagcgaggcaggtgcggtcacgtgacccggcggcgctgcggggcagcggccattttgcggggcggccacgtgaaggacgcacgttcagcggggctctcacgtgacccgggcgcgctgcggccgcccgcgcggacccggcgagaggcggcggcgggagcggcggtgatggacgggtccggggagcagcccagaggcgggggtgaggcgggaggcagacgggcgggaggagggcgagcccccttgccggcccgtccgggatccttcctaccggcctggggctgtgcgatctccaagcactgaggggcagaaactcccggatcgggcgctgccagcctccagtcccctccgtcctcggaggttcctggctctctgatccccgtgtcccgatccctgcctctctggcgctctcggaccctcgagaaccaggggatctcggaagccaagcccccgggcaggcccgggcttgtcgcccgcaccacttcctgcctctggcactggtgggaggggcgggtctcgcctctgccccctcaggccaggggtctggatgcacatagcgttcccctagcctctttccccggggagaatgtaggatacaggcccagcctcctggcctttctccatcagggactcagttgtctgggcccccccgtcactttatctgctagggtcccagaagtccagggtccccagctctgtcctccctcaggggccgtgagtctccacaggatactgatcccctagaacccaagagtccaggtacctcttcccttcctttctcctctagggcccaccagctctgagcagatcatgaagacaggggcccttttgcttcagggtttcatccaggatcgagcagggcgaatggggggggaggcacccgagctggccctggacccggtgcctcaggatgcgtccaccaagaagctgagcgagtgtctcaagcgcatcggggacgaactggacagtaacatggagctgcagaggatgattgccgccgtggacacagactccccccgagaggtctttttccgagtggcagctgacatgttttctgacggcaacttcaactggggccgggttgtcgcccttttctactttgccagcaaactggtgctcaaggccctgtgcaccaaggtgccggaactgatcagaaccatcatgggctggacattggacttcctccgggagcggctgttgggctggatccaagaccagggtggttgggacggcctcctctcctactttgggacgcccacgtggcagaccgtgaccatctttgtggcgggagtgctcaccgcctcactcaccatctggaagaagatgggctgaggcccccagctgccttggactgtgtttttcctccataaattatggcatttttctgggaggggtggggattgggggacatgggcatttttcttacttttgtaattattggggggtgtggggaagagtggtcttgagggggtaataaacctccttcgggacaca

SEQ ID NO: 452448 - DNA, 2509 bp, Homo sapiens
cggtagctcatgcctgtaatcccagcgctttggaaggctgagacggggttatctcttgggctcacaagttagagacaagcctgggcgtgggctatattgctagatccaggtctctgcaaaaaacaaaaccactcagtttttagtcatctataacgtcctgcctggaagcatgctattttgggcctctgagcttttgcacttgctaattccttctgcgctggggagagctcaaaccctgcccgaaacttctaaaaatggtgcctggataaatgaaggcattagagctgcgattggacggacggctgttggacggcgccactgctggcacttatcgggagatgctcattggacagtcacgtgacgggaccaaacctcccgagggagcgaggcaggtgcggtcacgtgacccggcggcgctgcggggcagcggccattttgcggggcggccacgtgaaggacgcacgttcagcggggctctcacgtgacccgggcgcgctgcggccgcccgcgcggacccggcgagaggcggcggcgggagcggcggtgatggacgggtccggggagcagcccagaggcgggggtgaggcgggaggcagacgggcgggaggagggcgagcccccttgccggcccgtccgggatccttcctaccggcctggggctgtgcgatctccaagcactgaggggcagaaactcccggatcgggcgctgccagcctccagtcccctccgtcctcggaggttcctggctctctgatccccgtgtcccgatccctgcctctctggcgctctcggaccctcgagaaccaggggatctcggaagccaagcccccgggcaggcccgggcttgtcgcccgcaccacttcctgcctctggcactggtgggaggggcgggtctcgcctctgccccctcaggccaggggtctggatgcacatagcgttcccctagcctctttccccggggagaatgtaggatacaggcccagcctcctggcctttctccatcagggactcagttgtctgggcccccccgtcactttatctgctagggtcccagaagtccagggtccccagctctgtcctccctcaggggccgtgagtctccacaggatactgatcccctagaacccaagagtccaggtacctcttcccttcctttctcctctagggcccaccagctctgagcagatcatgaagacaggggcccttttgcttcagggtttcatccaggatcgagcagggcgaatggggggggaggcacccgagctggccctggacccggtgcctcaggatgcgtccaccaagaagctgagcgagtgtctcaagcgcatcggggacgaactggacagtaacatggagctgcagaggatgattgccgccgtggacacagactccccccgagaggtctttttccgagtggcagctgacatgttttctgacggcaacttcaactggggccgggttgtcgcccttttctactttgccagcaaactggtgctcaaggccctgtgcaccaaggtgccggaactgatcagaaccatcatgggctggacattggacttcctccgggagcggctgttgggctggatccaagaccagggtggttgggacggcctcctctcctactttgggacgcccacgtggcagaccgtgaccatctttgtggcgggagtgctcaccgcctcactcaccatctggaagaagatgggctgaggcccccagctgccttggactgtgtttttcctccataaattatggcatttttctgggaggggtggggattgggggacatgggcatttttcttacttttgtaattattggggggtgtggggaagagtggtcttgagggggtaataaacctccttcgggacacaaaaaaaaaaaaaaaaaaaaaaaaaaaaaaaaaaaaaaaaaaaaaatcaaaaaaaaaaaaaaaaaaacaaaaaaaaaacaaaaagagaggcggggcgcgcccgcctctccatccatcttctcctcacgccagggggcacccaactcgcctcccccccccaccctctttttttttgccacgacaggggcgcccccaacatgagggcggtcctctctattctaattccatcaccagagcggcaccgcggccagcgtgatccaaacacagaacgtagagtggcgagacagaccaacgacgacgcgcgcgcaggaggaccgtctggggagggaaggccaccaaaaataacagagcctggagcgacggcaaaacaccagcgcgggaaccacacaccccccacgcagaagtagaaacagcccagcgaaggcagtacacaacacaaacaaacgcgagttgatccgggagacaacccacaggtacgacagccgcacggcgcgaagcgaaaaccggccccacagacaaagtacacatacgaaacaataacaaccccgcgggatcggagcgggaaccacacgcgccgtgacccgacgccaagccacgcgacaacacgtcgacacgaccaccacgaccgcgacacgccc

SEQ ID NO: 452449 - DNA, 1842 bp, Homo sapiens
cggtagctcatgcctgtaatcccagcgctttggaaggctgagacggggttatctcttgggctcacaagttagagacaagcctgggcgtgggctatattgctagatccaggtctctgcaaaaaacaaaaccactcagtttttagtcatctataacgtcctgcctggaagcatgctattttgggcctctgagcttttgcacttgctaattccttctgcgctggggagagctcaaaccctgcccgaaacttctaaaaatggtgcctggataaatgaaggcattagagctgcgattggacggacggctgttggacggcgccactgctggcacttatcgggagatgctcattggacagtcacgtgacgggaccaaacctcccgagggagcgaggcaggtgcggtcacgtgacccggcggcgctgcggggcagcggccattttgcggggcggccacgtgaaggacgcacgttcagcggggctctcacgtgacccgggcgcgctgcggccgcccgcgcggacccggcgagaggcggcggcgggagcggcggtgatggacgggtccggggagcagcccagaggcgggggtgaggcgggaggcagacgggcgggaggagggcgagcccccttgccggcccgtccgggatccttcctaccggcctggggctgtgcgatctccaagcactgaggggcagaaactcccggatcgggcgctgccagcctccagtcccctccgtcctcggaggttcctggctctctgatccccgtgtcccgatccctgcctctctggcgctctcggaccctcgagaaccaggggatctcggaagccaagcccccgggcaggcccgggcttgtcgcccgcaccacttcctgcctctggcactggtgggaggggcgggtctcgcctctgccccctcaggccaggggtctggatgcacatagcgttcccctagcctctttccccggggagaatgtaggatacaggcccagcctcctggcctttctccatcagggactcagttgtctgggcccccccgtcactttatctgctagggtcccagaagtccagggtccccagctctgtcctccctcaggggccgtgagtctccacaggatactgatcccctagaacccaagagtccaggtacctcttcccttcctttctcctctagggcccaccagctctgagcagatcatgaagacaggggcccttttgcttcagggtttcatccaggatcgagcagggcgaatggggggggaggcacccgagctggccctggacccggtgcctcaggatgcgtccaccaagaagctgagcgagtgtctcaagcgcatcggggacgaactggacagtaacatggagctgcagaggatgattgccgccgtggacacagactccccccgagaggtctttttccgagtggcagctgacatgttttctgacggcaacttcaactggggccgggttgtcgcccttttctactttgccagcaaactggtgctcaaggccctgtgcaccaaggtgccggaactgatcagaaccatcatgggctggacattggacttcctccgggagcggctgttgggctggatccaagaccagggtggttgggacggcctcctctcctactttgggacgcccacgtggcagaccgtgaccatctttgtggcgggagtgctcaccgcctcactcaccatctggaagaagatgggctgaggcccccagctgcagaggatgattgccgccgtggacacagactccccccgagaggtctttttccgagtggcagctgacatgttttctgacggcaacttcaactggggccgggttgtcgcccctttctacttt

SEQ ID NO: 452450 - DNA, 1885 bp, Homo sapiens
cggtagctcatgcctgtaatcccagcgctttggaaggctgagacggggttatctcttgggctcacaagttagagacaagcctgggcgtgggctatattgctagatccaggtctctgcaaaaaacaaaaccactcagtttttagtcatctataacgtcctgcctggaagcatgctattttgggcctctgagcttttgcacttgctaattccttctgcgctggggagagctcaaaccctgcccgaaacttctaaaaatggtgcctggataaatgaaggcattagagctgcgattggacggacggctgttggacggcgccactgctggcacttatcgggagatgctcattggacagtcacgtgacgggaccaaacctcccgagggagcgaggcaggtgcggtcacgtgacccggcggcgctgcggggcagcggccattttgcggggcggccacgtgaaggacgcacgttcagcggggctctcacgtgacccgggcgcgctgcggccgcccgcgcggacccggcgagaggcggcggcgggagcggcggtgatggacgggtccggggagcagcccagaggcggggggcccaccagctctgagcagatcatgaagacaggggcccttttgcttcagggtttcatccaggatcgagcagggcgaatggggggggaggcacccgagctggccctggacccggtgcctcaggatgcgtccaccaagaagctgagcgagtgtctcaagcgcatcggggacgaactggacagtaacatggagctgcagaggatgattgccgccgtggacacagactccccccgagaggtctttttccgagtggcagctgacatgttttctgacggcaacttcaactggggccgggttgtcgcccttttctactttgccagcaaactggtgctcaaggccctgtgcaccaaggtgccggaactgatcagaaccatcatgggctggacattggacttcctccgggagcggctgttgggctggatccaagaccagggtggttggaccgtgaccatctttgtggcgggagtgctcaccgcctcactcaccatctggaagaagatgggctgaggcccccagctgccttggactgtgtttttcctccataaattatggcatttttctgggaggggtggggattgggggacatgggcatttttcttacttttgtaattattggggggtgtggggaagagtggtcttgagggggtaataaacctccttcgggacacaaaaaaaaaaaaaaaaaaaaaaaaaaaaaaaaaaaaaaaaaaaaaatcaaaaaaaaaaaaaaaaaaacaaaaaaaaaacaaaaagagaggcggggcgcgcccgcctctccatccatcttctcctcacgccagggggcacccaactcgcctcccccccccaccctctttttttttgccacgacaggggcgcccccaacatgagggcggtcctctctattctaattccatcaccagagcggcaccgcggccagcgtgatccaaacacagaacgtagagtggcgagacagaccaacgacgacgcgcgcgcaggaggaccgtctggggagggaaggccaccaaaaataacagagcctggagcgacggcaaaacaccagcgcgggaaccacacaccccccacgcagaagtagaaacagcccagcgaaggcagtacacaacacaaacaaacgcgagttgatccgggagacaacccacaggtacgacagccgcacggcgcgaagcgaaaaccggccccacagacaaagtacacatacgaaacaataacaaccccgcgggatcggagcgggaaccacacgcgccgtgacccgacgccaagccacgcgacaacacgtcgacacgaccaccacgaccgcgacacgccc

SEQ ID NO: 452451 - DNA, 1647 bp, Homo sapiens
  misc_feature (1625)..(1625): n is a, c, g, or t
cggtagctcatgcctgtaatcccagcgctttggaaggctgagacggggttatctcttgggctcacaagttagagacaagcctgggcgtgggctatattgctagatccaggtctctgcaaaaaacaaaaccactcagtttttagtcatctataacgtcctgcctggaagcatgctattttgggcctctgagcttttgcacttgctaattccttctgcgctggggagagctcaaaccctgcccgaaacttctaaaaatggtgcctggataaatgaaggcattagagctgcgattggacggacggctgttggacggcgccactgctggcacttatcgggagatgctcattggacagtcacgtgacgggaccaaacctcccgagggagcgaggcaggtgcggtcacgtgacccggcggcgctgcggggcagcggccattttgcggggcggccacgtgaaggacgcacgttcagcggggctctcacgtgacccgggcgcgctgcggccgcccgcgcggacccggcgagaggcggcggcgggagcggcggtgatggacgggtccggggagcagcccagaggcgggggtgaggcgggaggcagacgggcgggaggagggcgagcccccttgccggcccgtccgggatccttcctaccggcctggggctgtgcgatctccaagcactgaggggcagaaactcccggatcgggcgctgccagcctccagtcccctccgtcctcggaggttcctggctctctgatccccgtgtcccgatccctgcctctctggcgctctcggaccctcgagaaccaggggatctcggaagccaagcccccgggcaggcccgggcttgtcgcccgcaccacttcctgcctctggcactggtgggaggggcgggtctcgcctctgccccctcaggccaggggtctggatgcacatagcgttcccctagcctctttccccggggagaatgtaggatacaggcccagcctcctggcctttctccatcagggactcagttgtctgggcccccccgtcactttatctgctagggtcccagaagtccagggtccccagctctgtcctccctcaggggccgtgagtctccacaggatactgatcccctagaacccaagagtccaggtacctcttcccttcctttctcctctagggcccaccagctctgagcagatcatgaagacaggggcccttttgcttcaggggtgagtttgaggtctgattattgtggcacagatttgaggagtgacaccccgttctgattctgcaccctcactccatccccactctagtttcatccaggatcgagcagggcgaatggggggggaggcacccgagctggccctggacccggtgcctcaggatgcgtccaccaagaagctgagcgagtgtctcaagcgcatcggggacgaactggacagtaacatggagctgcagaggatgattgccgccgtggacacagactccccccgagaggtctttttccgagtggcagctgacatgttttctgacggcaacttcaactggggccgggttgtcgcccttttctactttgccagcaaactggtgctcaagccctgtgcaccaaggtgccggaactgatcagtataccntcggtaccgagctcgatcttaa

SEQ ID NO: 452452 - DNA, 1235 bp, Homo sapiens
cggtagctcatgcctgtaatcccagcgctttggaaggctgagacggggttatctcttgggctcacaagttagagacaagcctgggcgtgggctatattgctagatccaggtctctgcaaaaaacaaaaccactcagtttttagtcatctataacgtcctgcctggaagcatgctattttgggcctctgagcttttgcacttgctaattccttctgcgctggggagagctcaaaccctgcccgaaacttctaaaaatggtgcctggataaatgaaggcattagagctgcgattggacggacggctgttggacggcgccactgctggcacttatcgggagatgctcattggacagtcacgtgacgggaccaaacctcccgagggagcgaggcaggtgcggtcacgtgacccggcggcgctgcggggcagcggccattttgcggggcggccacgtgaaggacgcacgttcagcggggctctcacgtgacccgggcgcgctgcggccgcccgcgcggacccggcgagaggcggcggcgggagcggcggtgatggacgggtccggggagcagcccagaggcggggtttcatccaggatcgagcagggcgaatggggggggaggcacccgagctggccctggacccggtgcctcaggatgcgtccaccaagaagctgagcgagtgtctcaagcgcatcggggacgaactggacagtaacatggagctgcagaggatgattgccgccgtggacacagactccccccgagaggtctttttccgagtggcagctgacatgttttctgacggcaacttcaactggggccgggttgtcgcccttttctactttgccagcaaactggtgctcaaggccctgtgcaccaaggtgccggaactgatcagaaccatcatgggctggacattggacttcctccgggagcggctgttgggctggatccaagaccagggtggttgggacggcctcctctcctactttgggacgcccacgtggcagaccgtgaccatctttgtggcgggagtgctcaccgcctcactcaccatctggaagaagatgggctgaggcccccagctgccttggactgtgtttttcctccataaattatggcatttttctgggaggggtggggattgggggacatgggcatttttcttacttttgtaattattggggggtgtggggaagagtggtcttgagggggtaataaacctccttcgggacaca

SEQ ID NO: 452453 - DNA, 1409 bp, Homo sapiens
cggtagctcatgcctgtaatcccagcgctttggaaggctgagacggggttatctcttgggctcacaagttagagacaagcctgggcgtgggctatattgctagatccaggtctctgcaaaaaacaaaaccactcagtttttagtcatctataacgtcctgcctggaagcatgctattttgggcctctgagcttttgcacttgctaattccttctgcgctggggagagctcaaaccctgcccgaaacttctaaaaatggtgcctggataaatgaaggcattagagctgcgattggacggacggctgttggacggcgccactgctggcacttatcgggagatgctcattggacagtcacgtgacgggaccaaacctcccgagggagcgaggcaggtgcggtcacgtgacccggcggcgctgcggggcagcggccattttgcggggcggccacgtgaaggacgcacgttcagcggggctctcacgtgacccgggcgcgctgcggccgcccgcgcggacccggcgagaggcggcggcgggagcggcggtgatggacgggtccggggagcagcccagaggcggggtttcatccaggatcgagcagggcgaatggggggggaggcacccgagctggccctggacccggtgcctcaggatgcgtccaccaagaagctgagcgagtgtctcaagcgcatcggggacgaactggacagtaacatggagctgcagaggatgattgccgccgtggacacagactccccccgagaggtctttttccgagtggcagctgacatgttttctgacggcaacttcaactggggccgggttgtcgcccttttctactttgccagcaaactggtgctcaaggccctgtgcaccaaggtgccggaactgatcagaaccatcatgggctggacattggacttcctccgggagcggctgttgggctggatccaagaccagggtggttgggtgagactcctcaagcctcctcacccccaccaccgcgccctcaccaccgcccctgccccacctcccctgcccgcaatcctgccttctggcctcctccgtccctgatcccgcctctgcctgcccaggggctgcccctggccgagtcactgaagcgactgatgtccctgtctccaggacggcctcctctcctactttgggacgcccacgtggcagaccgtgaccatctttgtggcgggagtgctcaccgcctcactcaccatctggaagaagatgggctgaggcccccagctgccttggactgtgtttttcctccataaattatggcatttttctgggaggggtggggattgggggacatgggcatttttcttacttttgtaattattggggggtgtggggaagagtggtcttgagggggtaataaacctccttcgggacaca

SEQ ID NO: 452454 - DNA, 2042 bp, Homo sapiens
  misc_feature (1979)..(1979): n is a, c, g, or t
cggtagctcatgcctgtaatcccagcgctttggaaggctgagacggggttatctcttgggctcacaagttagagacaagcctgggcgtgggctatattgctagatccaggtctctgcaaaaaacaaaaccactcagtttttagtcatctataacgtcctgcctggaagcatgctattttgggcctctgagcttttgcacttgctaattccttctgcgctggggagagctcaaaccctgcccgaaacttctaaaaatggtgcctggataaatgaaggcattagagctgcgattggacggacggctgttggacggcgccactgctggcacttatcgggagatgctcattggacagtcacgtgacgggaccaaacctcccgagggagcgaggcaggtgcggtcacgtgacccggcggcgctgcggggcagcggccattttgcggggcggccacgtgaaggacgcacgttcagcggggctctcacgtgacccgggcgcgctgcggccgcccgcgcggacccggcgagaggcggcggcgggagcggcggtgatggacgggtccggggagcagcccagaggcgggggtgaggcgggaggcagacgggcgggaggagggcgagcccccttgccggcccgtccgggatccttcctaccggcctggggctgtgcgatctccaagcactgaggggcagaaactcccggatcgggcgctgccagcctccagtcccctccgtcctcggaggttcctggctctctgatccccgtgtcccgatccctgcctctctggcgctctcggaccctcgagaaccaggggatctcggaagccaagcccccgggcaggcccgggcttgtcgcccgcaccacttcctgcctctggcactggtgggaggggcgggtctcgcctctgccccctcaggccaggggtctggatgcacatagcgttcccctagcctctttccccggggagaatgtaggatacaggcccagcctcctggcctttctccatcagggactcagttgtctgggcccccccgtcactttatctgctagggtcccagaagtccagggtccccagctctgtcctccctcaggggccgtgagtctccacaggatactgatcccctagaacccaagagtccaggtacctcttcccttcctttctcctctagggcccaccagctctgagcagatcatgaagacaggggcccttttgcttcaggggtgagtttgaggtctgattattgtggcacagatttgaggagtgacaccccgttctgattctgcaccctcactccatccccactctagtttcatccaggatcgagcagggcgaatggggggggaggcacccgagctggccctggacccggtgcctcaggatgcgtccaccaagaagctgagcgagtgtctcaagcgcatcggggacgaactggacagtaacatggagctgcagagatgattgccgcctctggccgccacccccatcttccacctgtgccctcaccaccacactacacagcacaccagccgctgcagggctcccatgggctgagtggggagcagttttcccctggcctcagttcccagctccccccgcccacccacgcatacacacatgccctcctggacaaggctaacatcccacttagccgcaccctgcacctgctgcgtccccactcccttggtggtggggacattgctctctgggcttttggtttgggggcgccctctctgctccttcactgttccctctggcttcccatagtggggcctgggagggttcccctggccttaaaaggggcccaagccccatctcatcctggcacgccctactccactgccctggcagcagcaggtgtggccaatggaggggggtgctgggccccaggattcccccagccaaactgtctttgtcaccacgtggggctcacttttcatccttccccaagttccctaggtccccgtactaggttggacagcccncttcggctacaggaaggcaggaggggtgagtcccctatccctcttcactgtggcacaggccca

SEQ ID NO: 452455 - DNA, 1725 bp, Homo sapiens
cggtagctcatgcctgtaatcccagcgctttggaaggctgagacggggttatctcttgggctcacaagttagagacaagcctgggcgtgggctatattgctagatccaggtctctgcaaaaaacaaaaccactcagtttttagtcatctataacgtcctgcctggaagcatgctattttgggcctctgagcttttgcacttgctaattccttctgcgctggggagagctcaaaccctgcccgaaacttctaaaaatggtgcctggataaatgaaggcattagagctgcgattggacggacggctgttggacggcgccactgctggcacttatcgggagatgctcattggacagtcacgtgacgggaccaaacctcccgagggagcgaggcaggtgcggtcacgtgacccggcggcgctgcggggcagcggccattttgcggggcggccacgtgaaggacgcacgttcagcggggctctcacgtgacccgggcgcgctgcggccgcccgcgcggacccggcgagaggcggcggcgggagcggcggtgatggacgggtccggggagcagcccagaggcgggggatgattgccgccgtggacacagactccccccgagaggtctttttccgagtggcagctgacatgttttctgacggcaacttcaactggggccgggttgtcgcccttttctactttgccagcaaactggtgctcaaggccctgtgcaccaaggtgccggaactgatcagaaccatcatgggctggacattggacttcctccgggagcggctgttgggctggatccaagaccagggtggttgggacggcctcctctcctactttgggacgcccacgtggcagaccgtgaccatctttgtggcgggagtgctcaccgcctcactcaccatctggaagaagatgggctgaggcccccagctgccttggactgtgtttttcctccataaattatggcatttttctgggaggggtggggattgggggacatgggcatttttcttacttttgtaattattggggggtgtggggaagagtggtcttgagggggtaataaacctccttcgggacacaaaaaaaaaaaaaaaaaaaaaaaaaaaaaaaaaaaaaaaaaaaaaatcaaaaaaaaaaaaaaaaaaacaaaaaaaaaacaaaaagagaggcggggcgcgcccgcctctccatccatcttctcctcacgccagggggcacccaactcgcctcccccccccaccctctttttttttgccacgacaggggcgcccccaacatgagggcggtcctctctattctaattccatcaccagagcggcaccgcggccagcgtgatccaaacacagaacgtagagtggcgagacagaccaacgacgacgcgcgcgcaggaggaccgtctggggagggaaggccaccaaaaataacagagcctggagcgacggcaaaacaccagcgcgggaaccacacaccccccacgcagaagtagaaacagcccagcgaaggcagtacacaacacaaacaaacgcgagttgatccgggagacaacccacaggtacgacagccgcacggcgcgaagcgaaaaccggccccacagacaaagtacacatacgaaacaataacaaccccgcgggatcggagcgggaaccacacgcgccgtgacccgacgccaagccacgcgacaacacgtcgacacgaccaccacgaccgcgacacgccc

SEQ ID NO: 452456 - DNA, 471 bp, Homo sapiens
cctcccgcctcagcctctcaaagtgctgggattacaggtgtgagccaccatgcctggcctgagtccagctctttaatgcccgttcatctcagtcccctgcccgcaatcctgccttctggcctcctccgtccctgatcccgcctctgcctgcccaggggctgcccctggccgagtcactgaagcgactgatgtccctgtctccaggacggcctcctctcctactttgggacgcccacgtggcagaccgtgaccatctttgtggcgggagtgctcaccgcctcactcaccatctggaagaagatgggctgaggcccccagctgccttggactgtgtttttcctccataaattatggcatttttctgggaggggtggggattgggggacatgggcatttttcttacttttgtaattattggggggtgtggggaagagtggtcttgagggggtaataaacctccttcgggacaca

SEQ ID NO: 452457 - DNA, 317 bp, Homo sapiens
gccatgtttacaatttttgaagccgacttcaattgtgggtggcagaaatctttgaggggaggcaaagaattgacaaaggaggtttggggccactatctccaggcagtggggacaaggttcagtccctaacgcccactccactccccacaggccctgtgcaccaaggtgccggaactgatcagaaccatcatgggctggacattggacttcctccgggagcggctgttgggctggatccaagaccagggtggttgggtgagactcctcaagcctcctcacccccaccaccgcgccctcaccaccgcccctgccccacc

SEQ ID NO: 452458 - DNA, 1287 bp, Homo sapiens
cggtagctcatgcctgtaatcccagcgctttggaaggctgagacggggttatctcttgggctcacaagttagagacaagcctgggcgtgggctatattgctagatccaggtctctgcaaaaaacaaaaccactcagtttttagtcatctataacgtcctgcctggaagcatgctattttgggcctctgagcttttgcacttgctaattccttctgcgctggggagagctcaaaccctgcccgaaacttctaaaaatggtgcctggataaatgaaggcattagagctgcgattggacggacggctgttggacggcgccactgctggcacttatcgggagatgctcattggacagtcacgtgacgggaccaaacctcccgagggagcgaggcaggtgcggtcacgtgacccggcggcgctgcggggcagcggccattttgcggggcggccacgtgaaggacgcacgttcagcggggctctcacgtgacccgggcgcgctgcggccgcccgcgcggacccggcgagaggcggcggcgggagcggcggtgatggacgggtccggggagcagcccagaggcggggggcccaccagctctgagcagatcatgaagacaggggcccttttgcttcagggtttcatccaggatcgagcagggcgaatggggggggaggcacccgagctggccctggacccggtgcctcaggatgcgtccaccaagaagctgagcgagtgtctcaagcgcatcggggacgaactggacagtaacatggagctgcagaggatgattgccgccgtggacacagactccccccgagaggtctttttccgagtggcagctgacatgttttctgacggcaacttcaactggggccgggttgtcgcccttttctactttgccagcaaactggtgctcaaggccctgtgcaccaaggtgccggaactgatcagaaccatcatgggctggacattggacttcctccgggagcggctgttgggctggatccaagaccagggtggttgggacggcctcctctcctactttgggacgcccacgtggcagaccgtgaccatctttgtggcgggagtgctcaccgcctcactcaccatctggaagaagatgggctgaggcccccagctgccttggactgtgtttttcctccataaattatggcatttttctgggaggggtggggattgggggacatgggcatttttcttacttttgtaattattggggggtgtggggaagagtggtcttgagggggtaataaacctccttcgggacaca

SEQ ID NO: 452459 - DNA, 1203 bp, Homo sapiens
cggtagctcatgcctgtaatcccagcgctttggaaggctgagacggggttatctcttgggctcacaagttagagacaagcctgggcgtgggctatattgctagatccaggtctctgcaaaaaacaaaaccactcagtttttagtcatctataacgtcctgcctggaagcatgctattttgggcctctgagcttttgcacttgctaattccttctgcgctggggagagctcaaaccctgcccgaaacttctaaaaatggtgcctggataaatgaaggcattagagctgcgattggacggacggctgttggacggcgccactgctggcacttatcgggagatgctcattggacagtcacgtgacgggaccaaacctcccgagggagcgaggcaggtgcggtcacgtgacccggcggcgctgcggggcagcggccattttgcggggcggccacgtgaaggacgcacgttcagcggggctctcacgtgacccgggcgcgctgcggccgcccgcgcggacccggcgagaggcggcggcgggagcggcggtgatggacgggtccggggagcagcccagaggcggggggcccaccagctctgagcagatcatgaagacaggggcccttttgcttcagggtttcatccaggatcgagcagggcgaatggggggggaggcacccgagctggccctggacccggtgcctcaggatgcgtccaccaagaagctgagcgagtgtctcaagcgcatcggggacgaactggacagtaacatggagctgcagaggatgattgccgccgtggacacagactccccccgagaggtctttttccgagtggcagctgacatgttttctgacggcaacttcaactggggccgggttgtcgcccttttctactttgccagcaaactggtgctcaaggccctgtgcaccaaggtgccggaactgatcagaaccatcatgggctggacattggacttcctccgggagcggctgttgggctggatccaagaccagggtggttgggtgagactcctcaagcctcctcacccccaccaccgcgccctcaccaccgcccctgccccaccgtccctgccccccgccactcctctgggaccctgggccttctggagcaggtcacagtggtgccctctccccatcttcagatcatcagatgtggtctataatgcgttttccttacgtgtctga

SEQ ID NO: 452460 - DNA, 2152 bp, Homo sapiens
cggtagctcatgcctgtaatcccagcgctttggaaggctgagacggggttatctcttgggctcacaagttagagacaagcctgggcgtgggctatattgctagatccaggtctctgcaaaaaacaaaaccactcagtttttagtcatctataacgtcctgcctggaagcatgctattttgggcctctgagcttttgcacttgctaattccttctgcgctggggagagctcaaaccctgcccgaaacttctaaaaatggtgcctggataaatgaaggcattagagctgcgattggacggacggctgttggacggcgccactgctggcacttatcgggagatgctcattggacagtcacgtgacgggaccaaacctcccgagggagcgaggcaggtgcggtcacgtgacccggcggcgctgcggggcagcggccattttgcggggcggccacgtgaaggacgcacgttcagcggggctctcacgtgacccgggcgcgctgcggccgcccgcgcggacccggcgagaggcggcggcgggagcggcggtgatggacgggtccggggagcagcccagaggcgggggtgaggcgggaggcagacgggcgggaggagggcgagcccccttgccggcccgtccgggatccttcctaccggcctggggctgtgcgatctccaagcactgaggggcagaaactcccggatcgggcgctgccagcctccagtcccctccgtcctcggaggttcctggctctctgatccccgtgtcccgatccctgcctctctggcgctctcggaccctcgagaaccaggggatctcggaagccaagcccccgggcaggcccgggcttgtcgcccgcaccacttcctgcctctggcactggtgggaggggcgggtctcgcctctgccccctcaggccaggggtctggatgcacatagcgttcccctagcctctttccccggggagaatgtaggatacaggcccagcctcctggcctttctccatcagggactcagttgtctgggcccccccgtcactttatctgctagggtcccagaagtccagggtccccagctctgtcctccctcaggggccgtgagtctccacaggatactgatcccctagaacccaagagtccaggtacctcttcccttcctttctcctctagggcccaccagctctgagcagatcatgaagacaggggcccttttgcttcagggtttcatccaggatcgagcagggcgaatggggggggaggcacccgagctggccctggacccggtgcctcaggatgcgtccaccaagaagctgagcgagtgtctcaagcgcatcggggacgaactggacagtaacatggagctgcagaggatgattgccgccgtggacacagactccccccgagaggtctttttccgagtggcagctgacatgttttctgacggcaacttcaactggggccgggttgtcgcccttttctactttgccagcaaactggtgctcaaggccctgtgcaccaaggtgccggaactgatcagaaccatcatgggctggacattggacttcctccgggagcggctgttgggctggatccaagaccagggtggttgggacggcctcctctcctactttgggacgcccacgtggcagaccgtgaccatctttgtggcgggagtgctcaccgcctcactcaccatctggaagaagatgggctgaggcccccagctgccttggactgtgtttttcctccataaattatggcatttttctgggaggggtggggattgggggacatgggcatttttcttacttttgtaattattggggggtgtggggaagagtggtcttgagggggtaataaacctccttcgggacacaaaagaacaaacacaacaggaacagaaagcaaaaaccggggcggccacaattggggggggggaacagaagcttatcgaaagggaccaggggcgaaaggtttttcgaaaccgctcttgtgcaaggggttaaatcgcgcggccccaatgggggcgataagtggcgaaccggtacctattttcgctactagctagggcagacacggccaacagaggagccagcgataaacagtgagcgcaaacacacagcatcccaacaatggcaaagagagaagcacccagaa

SEQ ID NO: 452461 - DNA, 2046 bp, Homo sapiens
cggtagctcatgcctgtaatcccagcgctttggaaggctgagacggggttatctcttgggctcacaagttagagacaagcctgggcgtgggctatattgctagatccaggtctctgcaaaaaacaaaaccactcagtttttagtcatctataacgtcctgcctggaagcatgctattttgggcctctgagcttttgcacttgctaattccttctgcgctggggagagctcaaaccctgcccgaaacttctaaaaatggtgcctggataaatgaaggcattagagctgcgattggacggacggctgttggacggcgccactgctggcacttatcgggagatgctcattggacagtcacgtgacgggaccaaacctcccgagggagcgaggcaggtgcggtcacgtgacccggcggcgctgcggggcagcggccattttgcggggcggccacgtgaaggacgcacgttcagcggggctctcacgtgacccgggcgcgctgcggccgcccgcgcggacccggcgagaggcggcggcgggagcggcggtgatggacgggtccggggagcagcccagaggcgggggtgaggcgggaggcagacgggcgggaggagggcgagcccccttgccggcccgtccgggatccttcctaccggcctggggctgtgcgatctccaagcactgaggggcagaaactcccggatcgggcgctgccagcctccagtcccctccgtcctcggaggttcctggctctctgatccccgtgtcccgatccctgcctctctggcgctctcggaccctcgagaaccaggggatctcggaagccaagcccccgggcaggcccgggcttgtcgcccgcaccacttcctgcctctggcactggtgggaggggcgggtctcgcctctgccccctcaggccaggggtctggatgcacatagcgttcccctagcctctttccccggggagaatgtaggatacaggcccagcctcctggcctttctccatcagggactcagttgtctgggcccccccgtcactttatctgctagggtcccagaagtccagggtccccagctctgtcctccctcaggggccgtgagtctccacaggatactgatcccctagaacccaagagtccaggtacctcttcccttcctttctcctctagggcccaccagctctgagcagatcatgaagacaggggcccttttgcttcagggtttcatccaggatcgagcagggcgaatggggggggaggcacccgagctggccctggacccggtgcctcaggatgcgtccaccaagaagctgagcgagtgtctcaagcgcatcggggacgaactggacagtaacatggagctgcagaggatgattgccgccgtggacacagactccccccgagaggtctttttccgagtggcagctgacatgttttctgacggcaacttcaactggggccgggttgtcgcccttttctactttgccagcaaactggtgctcaaggccctgtgcaccaaggtgccggaactgatcagaaccatcatgggctggacattggacttcctccgggagcggctgttgggctggatccaagaccagggtggttgggtgagactcctcaagcctcctcacccccaccaccgcgccctcaccaccgcccctgccccacctcccctgcccgcaatcctgccttctggcctcctccgtccctgatcccgcctctgcctgcccaggggctgcccctggccgagtcactgaagcgactgatgtccctgtctccaggacggcctcctctcctactttgggacgcccacgtggcagaccgtgaccatctttgtggcgggagtgctcaccgcctcactcaccatctggaagaagatgggctgaggcccccagctgccttggactgtgtttttcctccataaattatggcatttttctgggaggggtggggattgggggacatgggcatttttcttacttttgtaattattggggggtgtggggaagagtggtcttgagggggtaataaacctccttcgggacaca

SEQ ID NO: 452462 - DNA, 1959 bp, Homo sapiens
cggtagctcatgcctgtaatcccagcgctttggaaggctgagacggggttatctcttgggctcacaagttagagacaagcctgggcgtgggctatattgctagatccaggtctctgcaaaaaacaaaaccactcagtttttagtcatctataacgtcctgcctggaagcatgctattttgggcctctgagcttttgcacttgctaattccttctgcgctggggagagctcaaaccctgcccgaaacttctaaaaatggtgcctggataaatgaaggcattagagctgcgattggacggacggctgttggacggcgccactgctggcacttatcgggagatgctcattggacagtcacgtgacgggaccaaacctcccgagggagcgaggcaggtgcggtcacgtgacccggcggcgctgcggggcagcggccattttgcggggcggccacgtgaaggacgcacgttcagcggggctctcacgtgacccgggcgcgctgcggccgcccgcgcggacccggcgagaggcggcggcgggagcggcggtgatggacgggtccggggagcagcccagaggcgggggtgaggcgggaggcagacgggcgggaggagggcgagcccccttgccggcccgtccgggatccttcctaccggcctggggctgtgcgatctccaagcactgaggggcagaaactcccggatcgggcgctgccagcctccagtcccctccgtcctcggaggttcctggctctctgatccccgtgtcccgatccctgcctctctggcgctctcggaccctcgagaaccaggggatctcggaagccaagcccccgggcaggcccgggcttgtcgcccgcaccacttcctgcctctggcactggtgggaggggcgggtctcgcctctgccccctcaggccaggggtctggatgcacatagcgttcccctagcctctttccccggggagaatgtaggatacaggcccagcctcctggcctttctccatcagggactcagttgtctgggcccccccgtcactttatctgctagggtcccagaagtccagggtccccagctctgtcctccctcaggggccgtgagtctccacaggatactgatcccctagaacccaagagtccaggtacctcttcccttcctttctcctctagggcccaccagctctgagcagatcatgaagacaggggcccttttgcttcaggggtgagtttgaggtctgattattgtggcacagatttgaggagtgacaccccgttctgattctgcaccctcactccatccccactctagtttcatccaggatcgagcagggcgaatggggggggaggcacccgagctggccctggacccggtgcctcaggatgcgtccaccaagaagctgagcgagtgtctcaagcgcatcggggacgaactggacagtaacatggagctgcagaggatgattgccgccgtggacacagactccccccgagaggtctttttccgagtggcagctgacatgttttctgacggcaacttcaactggggccgggttgtcgcccttttctactttgccagcaaactggtgctcaaggccctgtgcaccaaggtgccggaactgatcagaaccatcatgggctggacattggacttcctccgggagcggctgttgggctggatccaagaccagggtggttgggacggcctcctctcctactttgggacgcccacgtggcagaccgtgaccatctttgtggcgggagtgctcaccgcctcactcaccatctggaagaagatgggctgaggcccccagctgccttggactgtgtttttcctccataaattatggcatttttctgggaggggtggggattgggggacatgggcatttttcttacttttgtaattattggggggtgtggggaagagtggtcttgagggggtaataaacctccttcgggacaca

SEQ ID NO: 452463 - DNA, 1355 bp, Homo sapiens
cggtagctcatgcctgtaatcccagcgctttggaaggctgagacggggttatctcttgggctcacaagttagagacaagcctgggcgtgggctatattgctagatccaggtctctgcaaaaaacaaaaccactcagtttttagtcatctataacgtcctgcctggaagcatgctattttgggcctctgagcttttgcacttgctaattccttctgcgctggggagagctcaaaccctgcccgaaacttctaaaaatggtgcctggataaatgaaggcattagagctgcgattggacggacggctgttggacggcgccactgctggcacttatcgggagatgctcattggacagtcacgtgacgggaccaaacctcccgagggagcgaggcaggtgcggtcacgtgacccggcggcgctgcggggcagcggccattttgcggggcggccacgtgaaggacgcacgttcagcggggctctcacgtgacccgggcgcgctgcggccgcccgcgcggacccggcgagaggcggcggcgggagcggcggtgatggacgggtccggggagcagcccagaggcggggggcccaccagctctgagcagatcatgaagacaggggcccttttgcttcagggtttcatccaggatcgagcagggcgaatggggggggaggcacccgagctggccctggacccggtgcctcaggatgcgtccaccaagaagctgagcgagtgtctcaagcgcatcggggacgaactggacagtaacatggagctgcagaggatgattgccgccgtggacacagactccccccgagaggtctttttccgagtggcagctgacatgttttctgacggcaacttcaactggggccgggttgtcgcccttttctactttgccagcaaactggtgctcaaggctggcgtgaaatggcgtgatctgggctcactgcaacctctgcctcctgggttcaagcgattcacctgcctcagcatcccaaggagctgggattacaggccctgtgcaccaaggtgccggaactgatcagaaccatcatgggctggacattggacttcctccgggagcggctgttgggctggatccaagaccagggtggttgggacggcctcctctcctactttgggacgcccacgtggcagaccgtgaccatctttgtggcgggagtgctcaccgcctcactcaccatctggaagaagatgggctgaggcccccagctgcagaggatgattgccgccgtggacacagactccccccgagaggtctttttccgagtggcagctgacatgttttctgacggcaacttcaactggggccgggttgtcgcccctttctacttt

SEQ ID NO: 452464 - DNA, 1374 bp, Homo sapiens
cggtagctcatgcctgtaatcccagcgctttggaaggctgagacggggttatctcttgggctcacaagttagagacaagcctgggcgtgggctatattgctagatccaggtctctgcaaaaaacaaaaccactcagtttttagtcatctataacgtcctgcctggaagcatgctattttgggcctctgagcttttgcacttgctaattccttctgcgctggggagagctcaaaccctgcccgaaacttctaaaaatggtgcctggataaatgaaggcattagagctgcgattggacggacggctgttggacggcgccactgctggcacttatcgggagatgctcattggacagtcacgtgacgggaccaaacctcccgagggagcgaggcaggtgcggtcacgtgacccggcggcgctgcggggcagcggccattttgcggggcggccacgtgaaggacgcacgttcagcggggctctcacgtgacccgggcgcgctgcggccgcccgcgcggacccggcgagaggcggcggcgggagcggcggtgatggacgggtccggggagcagcccagaggcggggggcccaccagctctgagcagatcatgaagacaggggcccttttgcttcaggggtgagtttgaggtctgattattgtggcacagatttgaggagtgacaccccgttctgattctgcaccctcactccatccccactctagtttcatccaggatcgagcagggcgaatggggggggaggcacccgagctggccctggacccggtgcctcaggatgcgtccaccaagaagctgagcgagtgtctcaagcgcatcggggacgaactggacagtaacatggagctgcagaggatgattgccgccgtggacacagactccccccgagaggtctttttccgagtggcagctgacatgttttctgacggcaacttcaactggggccgggttgtcgcccttttctactttgccagcaaactggtgctcaaggccctgtgcaccaaggtgccggaactgatcagaaccatcatgggctggacattggacttcctccgggagcggctgttgggctggatccaagaccagggtggttgggacggcctcctctcctactttgggacgcccacgtggcagaccgtgaccatctttgtggcgggagtgctcaccgcctcactcaccatctggaagaagatgggctgaggcccccagctgccttggactgtgtttttcctccataaattatggcatttttctgggaggggtggggattgggggacatgggcatttttcttacttttgtaattattggggggtgtggggaagagtggtcttgagggggtaataaacctccttcgggacaca

SEQ ID NO: 452465 - DNA, 1777 bp, Homo sapiens
cggtagctcatgcctgtaatcccagcgctttggaaggctgagacggggttatctcttgggctcacaagttagagacaagcctgggcgtgggctatattgctagatccaggtctctgcaaaaaacaaaaccactcagtttttagtcatctataacgtcctgcctggaagcatgctattttgggcctctgagcttttgcacttgctaattccttctgcgctggggagagctcaaaccctgcccgaaacttctaaaaatggtgcctggataaatgaaggcattagagctgcgattggacggacggctgttggacggcgccactgctggcacttatcgggagatgctcattggacagtcacgtgacgggaccaaacctcccgagggagcgaggcaggtgcggtcacgtgacccggcggcgctgcggggcagcggccattttgcggggcggccacgtgaaggacgcacgttcagcggggctctcacgtgacccgggcgcgctgcggccgcccgcgcggacccggcgagaggcggcggcgggagcggcggtgatggacgggtccggggagcagcccagaggcggggggcccaccagctctgagcagatcatgaagacaggggcccttttgcttcaggggatgattgccgccgtggacacagactccccccgagaggtctttttccgagtggcagctgacatgttttctgacggcaacttcaactggggccgggttgtcgcccttttctactttgccagcaaactggtgctcaaggccctgtgcaccaaggtgccggaactgatcagaaccatcatgggctggacattggacttcctccgggagcggctgttgggctggatccaagaccagggtggttgggacggcctcctctcctactttgggacgcccacgtggcagaccgtgaccatctttgtggcgggagtgctcaccgcctcactcaccatctggaagaagatgggctgaggcccccagctgccttggactgtgtttttcctccataaattatggcatttttctgggaggggtggggattgggggacatgggcatttttcttacttttgtaattattggggggtgtggggaagagtggtcttgagggggtaataaacctccttcgggacacaaaaaaaaaaaaaaaaaaaaaaaaaaaaaaaaaaaaaaaaaaaaaatcaaaaaaaaaaaaaaaaaaacaaaaaaaaaacaaaaagagaggcggggcgcgcccgcctctccatccatcttctcctcacgccagggggcacccaactcgcctcccccccccaccctctttttttttgccacgacaggggcgcccccaacatgagggcggtcctctctattctaattccatcaccagagcggcaccgcggccagcgtgatccaaacacagaacgtagagtggcgagacagaccaacgacgacgcgcgcgcaggaggaccgtctggggagggaaggccaccaaaaataacagagcctggagcgacggcaaaacaccagcgcgggaaccacacaccccccacgcagaagtagaaacagcccagcgaaggcagtacacaacacaaacaaacgcgagttgatccgggagacaacccacaggtacgacagccgcacggcgcgaagcgaaaaccggccccacagacaaagtacacatacgaaacaataacaaccccgcgggatcggagcgggaaccacacgcgccgtgacccgacgccaagccacgcgacaacacgtcgacacgaccaccacgaccgcgacacgccc

SEQ ID NO: 452466 - DNA, 1542 bp, Homo sapiens
tgtcgatttccggggtaagatggctgcagtccgtatgctgagaacctggagcaggaatgcggggaagctgatttgtgttcgctattttcaaacatgtggtaatgttcatgttttgaagccaaattatgtgtgtttctttggttatccttcattcaagtatagtcatccacatcacttcctgaaaacaactgctgctctccgtggacaggttgttcagttcaagctctcagacattggagaagggattagagaagtaactgttaaagaatggtatgtaaaagaaggagatacagtgtctcagtttgatagcatctgtgaagttcaaagtgataaagcttctgttaccatcactagtcgttatgatggagtcattaaaaaactctattataatctagacgatattgcctatgtggggaagccattagtagacatagaaacggaagctttaaaagattcagaagaagatgttgttgaaactcctgcagtgtctcatgatgaacatacacaccaagagataaagggccgaaaaacactggcaactcctgcagttcgccgtctggcaatggaaaacaatattaagctgagtgaagttgttggctcaggaaaagatggcagaatacttaaagaagatatcctcaactatttggaaaagcagacaggagctatattgcctccttcacccaaagttgaaattatgccacctccaccaaagccaaaagacatgactgttcctatactagtatcaaaacctccggtattcacaggcaaagacaaaacagaacccataaaaggctttcaaaaagcaatggtcaagactatgtctgcagccctgaagatacctcattttggttattgtgatgagattgaccttactgaactggttaagctccgagaagaattaaaacccattgcatttgctcgtggaattaaactctcctttatgcctttcttcttaaagtattacttctcatggaaatcttaagatcaacatgtcagtgaggaaatcacctagaatttagacattttctttggaactttggctggtctgtatcattattttgaaaatctccttgatgtttacaagctacctgactactttatcttttattctttaatgattagggtgacctagttccacatggcctgaaggtaacattggcagtaatgtgactaggtacatgtagacttgaaattaaactcagcataaataagagttctctctctccctccttttatacctcttattgtttcaaattctctatcctttctaagttaaaagtactaaaattgcattctttttctgttaaacagctgcttccttgggattactacagtttcctatccttaacgcttctgtggatgaaaactgccagaatataacatataaggttggctatggaaggagtaaaaatgttcttattattaatagaagatggggcaaatgtgcttgtagattagagacttctattgtacctcaaatagtgatcttttttagactagaattaaaggtatggggtaaaacattaaacttaagtctaatta

SEQ ID NO: 452467 - DNA, 277 bp, Homo sapiens
cttgtggtggaggacaaaggagagggagacagatagaaattacaacccagcatgagagatttgtgttcgctattttcaaacatgtggtaatgttcatgttttgaagccaaattatgtgtgtttctttggttatccttcattcaagtatagtcatccacatcacttcctgaaaacaactgctgctctccgtggacaggttgttcagttcaagctctcagacattggagaagggattagagaagtaactgttaaagaatggtaagtgaatctgaaaaaa

SEQ ID NO: 452468 - DNA, 3324 bp, Homo sapiens
aaatgaataatggtgtaatggttctcctggggctgtcacattttataggtcagagtgtgacttcttaatatggtgctgatgtttttgtgtcaatggcttgaaactgggattacaggcatgagccactgcgcctagcccaaaaaatcttttaaaaattatttttaaattatttcttttaaatcactaccaatctggtaaaaatgagttttggtagtggtttctagatggcagtgaaggttgatcctttctttgctgttagcttattcattaaaagccctactgtacaattttttattttttaggcttctcataacattgggatagcaatggatactgagcagggtttgattgtccctaatgtgaaaaatgttcagatctgctctatatttgacatcgccactgaactgaaccgcctccagaaattgggctctgtgggtcagctcagcaccactgatcttacaggaggaacatttactctttccaacattggatcaattggtggtacctttgccaaaccagtgataatgccacctgaagtagccattggggcccttggatcaattaaggccattccccgatttaaccagaaaggagaagtatataaggcacagataatgaatgtgagctggtcagctgatcacagagttattgatggtgctacaatgtcacgcttctccaatttgtggaaatcctatttagaaaacccagcttttatgctactagatctgaaatgaagactgataagacattcttgaactttttgagcttccaaagagtatgtaaaccctagctgtgccagcacatgttcatctttacaatttatattgtaaatgatttgtatcgtatgattaaggatctaaggcacaatatttgtcactgttctattagactttttactgaaaatgaataatggtgtaatggttctcctggggctgtcacattttataggtcagagtgtgacttcttaatatggtgctgatgtttttgtgtcaatggcttgaaactggcaagattaacaaaattaggccgggcatggtggctcacgcctgtaatcccagcactttgggaggcccaggtgggcggatcacctgaggttagaagtttgagaccagcctggccaacatggtgaaacctggcctctactaaaaatacaaaaattagccgggtgtggtggtgggtacctataatcccagctacttgggaggctgaggcaggagaatcgcttgaacctgggaggtggaggttgcagtgagctgagatcgtgctattgcactccagcctgggcgacagagcaagacgccatctcaaaaacaaaaaaacaaaattcatgttactaaaagacaggtagccatatacagacagtatatgccctattttttttaactgactcttaatgaaactttaattttacttaattaagaaatggaatttatatacaaaaatattttccatttccgttattatgctaattgttgtatgaaataagtgcaattatacttctcttttgagatatccaagagtatattcttgctctgtatagagaatatcatctgatagtgtcttatttatattaattaatgtctttgaaaagggaaaagtataaactggccttaaaattgtccaattatagttttataaccagtctattaaaggtgtttgtttaaaatggatatagttttagatttgtggtaatgctttggtattttcttggggaagaccttcacctttgcaaacttccctcatgtaaggaaggtactttaaatgtagcagccactgacatttctttttttaaaaaaaatttgagaagtctacttccttttaacttttttggtcttcagctaaaaaataggataagaaattaaggtctattccattctccatatcctgggtaagaatgtaaataagaggagaaggaagagtctaatagtaattatggatataaaaaataagaaattttgtatagaaatgaaggtttcataatgatcattttgttaaaggtctactttaatcagaaatagcaacgagatgaatgtatccaacatttcaatttgcattcggaaatccatgttgtttctaatattgtccagttgaaaactgtatgccaaaattagttgtttaagtgaagttttgtgacagaaaaaaggttgttttaatatctacttggtttttctcaaaatggaaataattttaaaatcaggaaagaataaatcagccaggtgtgatgacttgtaactgtaatcccagttataggggaggctgaagcaggaggatcacttgaggccaggagtttgagaccagcctgggcaacatagtgagatcccatctcaaaaaacattatttttaaaattagcctggtggctcacgcctgtaatcccagcactttgggaggccgaggtggccagatcacctgaggtcaggagttcgagaccaccctggccaacatggtgaaaccccatctctacagttttgtaaaaatacaaaaaattacctgggcctggtggcacacgcctgtagtcccagctacttgggaggctgaggcaggagaattgcttgagcccaagaggtggaggttacagtgagcagagatcacaccactgcactccagcctgggtggcagagcaacacttcgtctcagaaaaaaaaaaaaaaaaaaaaccaaaaagccaagtgtggtggtgtgcacctatagtcccagctactcaggaagctgagacaagaggatcaattgagcccaggagttcaaagctgtagtgagctgtcattgtgccactatcctccagtatgggtgacagagtgagacctggtctctaaaaaataaaataaaataaaaaaaacaggtcaaataaatgctgttgttgtaaaatttcagataatacaaagagttaaccaataaaagaaaaagtcattcataatcttaccactattaacattttgatgtatctatctgtatgtatggctattcttttttgttaaaacatgatcatagcatatctactattttattatttgatttttaaaatttaacattatattatgggtaaccttacatgtcaataaacaattccacattgtcatgctttaaatggctgcataggctgggtgtggtggctcacgcctgtaatcctaccactttgggaggccaaggcaggtagatcacaaggtcaggagttcgagaccagcctggccaatatggtgaaacctcatctctattgaaaatacaaaaatcagccaggcacggtggcaggcgcctgtagtccacctactcgggaggctgaggcaggagaactgcttgaacccagcggcagaggttgcagtgagccaaga

SEQ ID NO: 452469 - DNA, 185 bp, Homo sapiens
tttggcattaaaatatatcattttttagattaagctgagtgaagttgttggctcaggaaaagatggcagaatacttaaagaagatatcctcaactatttggaaaagcagacaggagctatattgcctccttcacccaaagttgaaattatgccacctccaccaaagccaaaagacatgactgttc

SEQ ID NO: 452470 - DNA, 4058 bp, Homo sapiens
tgtcgatttccggggtaagatggctgcagtccgtatgctgagaacctggagcaggaatgcggggaagctgatttgtgttcgctattttcaaacatgtggtaatgttcatgttttgaagccaaattatgtgtgtttctttggttatccttcattcaagtatagtcatccacatcacttcctgaaaacaactgctgctctccgtggacaggttgttcagttcaagctctcagacattggagaagggattagagaagtaactgttaaagaatggtatgtaaaagaaggagatacagtgtctcagtttgatagcatctgtgaagttcaaagtgataaagcttctgttaccatcactagtcgttatgatggagtcattaaaaaactctattataatctagacgatattgcctatgtggggaagccattagtagacatagaaacggaagctttaaaagattcagaagaagatgttgttgaaactcctgcagtgtctcatgatgaacatacacaccaagagataaagggccgaaaaacactggcaactcctgcagttcgccgtctggcaatggaaaacaatattaagctgagtgaagttgttggctcaggaaaagatggcagaatacttaaagaagatatcctcaactatttggaaaagcagacaggagctatattgcctccttcacccaaagttgaaattatgccacctccaccaaagccaaaagacatgactgttcctatactagtatcaaaacctccggtattcacaggcaaagacaaaacagaacccataaaaggctttcaaaaagcaatggtcaagactatgtctgcagccctgaagatacctcattttggttattgtgatgagattgaccttactgaactggttaagctccgagaagaattaaaacccattgcatttgctcgtggaattaaactctcctttatgcctttcttcttaaaggctgcttccttgggattactacagtttcctatccttaacgcttctgtggatgaaaactgccagaatataacatataaggcttctcataacattgggatagcaatggatactgagcagggtttgattgtccctaatgtgaaaaatgttcagatctgctctatatttgacatcgccactgaactgaaccgcctccagaaattgggctctgtgggtcagctcagcaccactgatcttacaggaggaacatttactctttccaacattggatcaattggtggtacctttgccaaaccagtgataatgccacctgaagtagccattggggcccttggatcaattaaggccattccccgatttaaccagaaaggagaagtatataaggcacagataatgaatgtgagctggtcagctgatcacagagttattgatggtgctacaatgtcacgcttctccaatttgtggaaatcctatttagaaaacccagcttttatgctactagatctgaaatgaagactgataagacattcttgaactttttgagcttccaaagagtatgtaaaccctagctgtgccagcacatgttcatctttacaatttatattgtaaatgatttgtatcgtatgattaaggatctaaggcacaatatttgtcactgttctattagactttttactgaaaatgaataatggtgtaatggttctcctggggctgtcacattttataggtcagagtgtgacttcttaatatggtgctgatgtttttgtgtcaatggcttgaaactggcaagattaacaaaattaggccgggcatggtggctcacgcctgtaatcccagcactttgggaggcccaggtgggcggatcacctgaggttagaagtttgagaccagcctggccaacatggtgaaacctggcctctactaaaaatacaaaaattagccgggtgtggtggtgggtacctataatcccagctacttgggaggctgaggcaggagaatcgcttgaacctgggaggtggaggttgcagtgagctgagatcgtgctattgcactccagcctgggcgacagagcaagacgccatctcaaaaacaaaaaaacaaaattcatgttactaaaagacaggtagccatatacagacagtatatgccctattttttttaactgactcttaatgaaactttaattttacttaattaagaaatggaatttatatacaaaaatattttccatttccgttattatgctaattgttgtatgaaataagtgcaattatacttctcttttgagatatccaagagtatattcttgctctgtatagagaatatcatctgatagtgtcttatttatattaattaatgtctttgaaaagggaaaagtataaactggccttaaaattgtccaattatagttttataaccagtctattaaaggtgtttgtttaaaatggatatagttttagatttgtggtaatgctttggtattttcttggggaagaccttcacctttgcaaacttccctcatgtaaggaaggtactttaaatgtagcagccactgacatttctttttttaaaaaaaatttgagaagtctacttccttttaacttttttggtcttcagctaaaaaataggataagaaattaaggtctattccattctccatatcctgggtaagaatgtaaataagaggagaaggaagagtctaatagtaattatggatataaaaaataagaaattttgtatagaaatgaaggtttcataatgatcattttgttaaaggtctactttaatcagaaatagcaacgagatgaatgtatccaacatttcaatttgcattcggaaatccatgttgtttctaatattgtccagttgaaaactgtatgccaaaattagttgtttaagtgaagttttgtgacagaaaaaaggttgttttaatatctacttggtttttctcaaaatggaaataattttaaaatcaggaaagaataaatcagccaggtgtgatgacttgtaactgtaatcccagttataggggaggctgaagcaggaggatcacttgaggccaggagtttgagaccagcctgggcaacatagtgagatcccatctcaaaaaacattatttttaaaattagcctggtggctcacgcctgtaatcccagcactttgggaggccgaggtggccagatcacctgaggtcaggagttcgagaccaccctggccaacatggtgaaaccccatctctacagttttgtaaaaatacaaaaaattacctgggcctggtggcacacgcctgtagtcccagctacttgggaggctgaggcaggagaattgcttgagcccaagaggtggaggttacagtgagcagagatcacaccactgcactccagcctgggtggcagagcaacacttcgtctcagaaaaaaaaaaaaaaaaaaaaccaaaaagccaagtgtggtggtgtgcacctatagtcccagctactcaggaagctgagacaagaggatcaattgagcccaggagttcaaagctgtagtgagctgtcattgtgccactatcctccagtatgggtgacagagtgagacctggtctctaaaaaataaaataaaataaaaaaaacaggtcaaataaatgctgttgttgtaaaatttcagataatacaaagagttaaccaataaaagaaaaagtcattcataatcttaccactattaacattttgatgtatctatctgtatgtatggctattcttttttgttaaaacatgatcatagcatatctactattttattatttgatttttaaaatttaacattatattatgggtaaccttacatgtcaataaacaattccacattgtcatgctttaaatggctgcataggctgggtgtggtggctcacgcctgtaatcctaccactttgggaggccaaggcaggtagatcacaaggtcaggagttcgagaccagcctggccaatatggtgaaacctcatctctattgaaaatacaaaaatcagccaggcacggtggcaggcgcctgtagtccacctactcgggaggctgaggcaggagaactgcttgaacccagcggcagaggttgcagtgagccaaga

SEQ ID NO: 452471 - DNA, 3868 bp, Homo sapiens
  misc_feature (48)..(48): n is a, c, g, or t
ttctagtcgagcccttggtgatcggccgaggcagaactgccagcaggnatgcggggaagctgatttgtgttcgctattttcaaacatgtggtaatgttcatgttttgaagccaaattatgtgtgtttctttggttatccttcattcaagtatagtcatccacatcacttcctgaaaacaactgctgctctccgtggacaggttgttcagttcaagctctcagacattggagaagggattagagaagtaactgttaaagaatgattcagaagaagatgttgttgaaactcctgcagtgtctcatgatgaacatacacaccaagagataaagggccgaaaaacactggcaactcctgcagttcgccgtctggcaatggaaaacaatattaagctgagtgaagttgttggctcaggaaaagatggcagaatacttaaagaagatatcctcaactatttggaaaagcagacaggagctatattgcctccttcacccaaagttgaaattatgccacctccaccaaagccaaaagacatgactgttcctatactagtatcaaaacctccggtattcacaggcaaagacaaaacagaacccataaaaggctttcaaaaagcaatggtcaagactatgtctgcagccctgaagatacctcattttggttattgtgatgagattgaccttactgaactggttaagctccgagaagaattaaaacccattgcatttgctcgtggaattaaactctcctttatgcctttcttcttaaaggctgcttccttgggattactacagtttcctatccttaacgcttctgtggatgaaaactgccagaatataacatataaggcttctcataacattgggatagcaatggatactgagcagggtttgattgtccctaatgtgaaaaatgttcagatctgctctatatttgacatcgccactgaactgaaccgcctccagaaattgggctctgtgggtcagctcagcaccactgatcttacaggaggaacatttactctttccaacattggatcaattggtggtacctttgccaaaccagtgataatgccacctgaagtagccattggggcccttggatcaattaaggccattccccgatttaaccagaaaggagaagtatataaggcacagataatgaatgtgagctggtcagctgatcacagagttattgatggtgctacaatgtcacgcttctccaatttgtggaaatcctatttagaaaacccagcttttatgctactagatctgaaatgaagactgataagacattcttgaactttttgagcttccaaagagtatgtaaaccctagctgtgccagcacatgttcatctttacaatttatattgtaaatgatttgtatcgtatgattaaggatctaaggcacaatatttgtcactgttctattagactttttactgaaaatgaataatggtgtaatggttctcctggggctgtcacattttataggtcagagtgtgacttcttaatatggtgctgatgtttttgtgtcaatggcttgaaactggcaagattaacaaaattaggccgggcatggtggctcacgcctgtaatcccagcactttgggaggcccaggtgggcggatcacctgaggttagaagtttgagaccagcctggccaacatggtgaaacctggcctctactaaaaatacaaaaattagccgggtgtggtggtgggtacctataatcccagctacttgggaggctgaggcaggagaatcgcttgaacctgggaggtggaggttgcagtgagctgagatcgtgctattgcactccagcctgggcgacagagcaagacgccatctcaaaaacaaaaaaacaaaattcatgttactaaaagacaggtagccatatacagacagtatatgccctattttttttaactgactcttaatgaaactttaattttacttaattaagaaatggaatttatatacaaaaatattttccatttccgttattatgctaattgttgtatgaaataagtgcaattatacttctcttttgagatatccaagagtatattcttgctctgtatagagaatatcatctgatagtgtcttatttatattaattaatgtctttgaaaagggaaaagtataaactggccttaaaattgtccaattatagttttataaccagtctattaaaggtgtttgtttaaaatggatatagttttagatttgtggtaatgctttggtattttcttggggaagaccttcacctttgcaaacttccctcatgtaaggaaggtactttaaatgtagcagccactgacatttctttttttaaaaaaaatttgagaagtctacttccttttaacttttttggtcttcagctaaaaaataggataagaaattaaggtctattccattctccatatcctgggtaagaatgtaaataagaggagaaggaagagtctaatagtaattatggatataaaaaataagaaattttgtatagaaatgaaggtttcataatgatcattttgttaaaggtctactttaatcagaaatagcaacgagatgaatgtatccaacatttcaatttgcattcggaaatccatgttgtttctaatattgtccagttgaaaactgtatgccaaaattagttgtttaagtgaagttttgtgacagaaaaaaggttgttttaatatctacttggtttttctcaaaatggaaataattttaaaatcaggaaagaataaatcagccaggtgtgatgacttgtaactgtaatcccagttataggggaggctgaagcaggaggatcacttgaggccaggagtttgagaccagcctgggcaacatagtgagatcccatctcaaaaaacattatttttaaaattagcctggtggctcacgcctgtaatcccagcactttgggaggccgaggtggccagatcacctgaggtcaggagttcgagaccaccctggccaacatggtgaaaccccatctctacagttttgtaaaaatacaaaaaattacctgggcctggtggcacacgcctgtagtcccagctacttgggaggctgaggcaggagaattgcttgagcccaagaggtggaggttacagtgagcagagatcacaccactgcactccagcctgggtggcagagcaacacttcgtctcagaaaaaaaaaaaaaaaaaaaaccaaaaagccaagtgtggtggtgtgcacctatagtcccagctactcaggaagctgagacaagaggatcaattgagcccaggagttcaaagctgtagtgagctgtcattgtgccactatcctccagtatgggtgacagagtgagacctggtctctaaaaaataaaataaaataaaaaaaacaggtcaaataaatgctgttgttgtaaaatttcagataatacaaagagttaaccaataaaagaaaaagtcattcataatcttaccactattaacattttgatgtatctatctgtatgtatggctattcttttttgttaaaacatgatcatagcatatctactattttattatttgatttttaaaatttaacattatattatgggtaaccttacatgtcaataaacaattccacattgtcatgctttaaatggctgcataggctgggtgtggtggctcacgcctgtaatcctaccactttgggaggccaaggcaggtagatcacaaggtcaggagttcgagaccagcctggccaatatggtgaaacctcatctctattgaaaatacaaaaatcagccaggcacggtggcaggcgcctgtagtccacctactcgggaggctgaggcaggagaactgcttgaacccagcggcagaggttgcagtgagccaaga

SEQ ID NO: 452472 - DNA, 1593 bp, Homo sapiens
tgtcgatttccggggtaagatggctgcagtccgtatgctgagaacctggagcaggaatgcggggaagctgatttgtgttcgctattttcaaacatgtggtaatgttcatgttttgaagccaaattatgtgtgtttctttggttatccttcattcaagtatagtcatccacatcacttcctgaaaacaactgctgctctccgtggacaggttgttcagttcaagctctcagacattggagaagggattagagaagtaactgttaaagaatggtatgtaaaagaaggagatacagtgtctcagtttgatagcatctgtgaagttcaaagtgataaagcttctgttaccatcactagtcgttatgatggagtcattaaaaaactctattataatctagacgatattgcctatgtggggaagccattagtagacatagaaacggaagctttaaaagattcagaagaagatgttgttgaaactcctgcagtgtctcatgatgaacatacacaccaagagataaagggccgaaaaacactggcaactcctgcagttcgccgtctggcaatggaaaacaatattaagctgagtgaagttgttggctcaggaaaagatggcagaatacttaaagaagatatcctcaactatttggaaaagcagacaggagctatattgcctccttcacccaaagttgaaattatgccacctccaccaaagccaaaagacatgactgttcctatactagtatcaaaacctccggtattcacaggcaaagacaaaacagaacccataaaaggctttcaaaaagcaatggtcaagactatgtctgcagccctgaagatacctcattttggttattgtgatgagattgaccttactgaactggttaagctccgagaagaattaaaacccattgcatttgctcgtggaattaaactctcctttatgcctttcttcttaaaggctgcttccttgggattactacagtttcctatccttaacgcttctgtggatgaaaactgccagaatataacatataaggcttctcataacattgggatagcaatggatactgagcagggtttgattgtccctaatgtgaaaaatgttcagatctgctctatatttgacatcgccactgaactgaaccgcctccagaaattgggctctgtgggtcagctcagcaccactgatcttacaggaggaacatttactctttccaacattggatcaattggtggtacctttgccaaaccagtgataatgccacctgaagtagccattggggcccttggatcaattaaggccattccccgatttaaccagaaaggagaagtatataaggcacagataatgaatgtgagctggtcagctgatcacagagttattgatggtgctacaatgtcacgcttctccaatttgtggaaatcctatttgccagattatgcacacaactgaagggatggtgtacctttaactttgggccccaaatgtacccagcgcgcggtatataagcaagtacaagctcatgacaggcgaacaaacaatacttaaatcaccaaatgaatgctcgcttcaataaggcttatgtgttgatc

SEQ ID NO: 452473 - DNA, 4142 bp, Homo sapiens
cccgcagagccgcagtgccgggcgccagagcagcggcgccagagcagctgcaccatcccggcgttcgcgtgtgccgccgctttcctcctccatctcttttcctccgcctccgccggcgcgatggcgaagccgctgacggacagcgagaagcggaagcagatcagcgtgcgcggcctggcggggctaggcgacgtggccgaggtgcggaagagcttcaaccggcacttgcacttcacgctggtcaaggaccgcaatgtggccacgccccgcgactacttcttcgcgctggcgcacacggtgcgcgaccacctcgtgggccgctggatccgcacgcagcagcactactacgagcgcgaccccaagcgcatttattatctttccctggaattctacatgggtcgcacgctgcagaacacgatggtgaacctgggccttcagaatgcctgcgatgaagccatctatcagttggggttagacttggaggaactcgaggagatagaagaagatgctggccttgggaatggaggcctggggaggctggcagcgtgtttccttgactcaatggctaccttgggcctggcagcatacggctatggaatccgctatgaatttgggatttttaaccagaagattgtcaatggctggcaggtagaggaggccgatgactggctgcgctacggcaacccctgggagaaagcgcggcctgagtatatgcttcccgtgcacttctacggacgcgtggagcacacccccgacggcgtgaagtggctggacacacaggtggtgctggccatgccctacgacaccccagtgcccggctacaagaacaacaccgtcaacaccatgcggctgtggtccgccaaggctcccaacgacttcaagctgcaggacttcaacgtgggagactacatcgaggcggtcctggaccggaacttggctgagaacatctccagggtcctgtatccaaatgataacttctttgaggggaaggagctgcggctgaagcaggagtacttcgtggtggccgccacgctccaggacatcatccgccgcttcaagtcgtccaagttcggctgccgggaccctgtgagaacctgtttcgagacgttcccagacaaggtggccatccagctgaacgacacccaccccgccctctccatccctgagctcatgcggatcctggtggacgtggagaaggtggactgggacaaggcctgggaaatcacgaagaagacctgtgcatacaccaaccacactgtgctgcctgaggccttggagcgctggcccgtgtccatgtttgagaagctgctgccgcggcacctggagataatctatgccatcaaccagcggcacctggaccacgtggccgcgctgtttcccggcgatgtggaccgcctgcgcaggatgtctgtgatcgaggagggggactgcaagcggatcaacatggcccacctgtgtgtgattgggtcccatgctgtcaatggtgtggcgaggatccactcggagatcgtgaaacagtcggtctttaaggatttttatgaactggagccagagaagttccagaataagaccaatggcatcaccccccgccggtggctgctgctgtgcaacccggggctggccgataccatcgtggagaaaattggggaggagttcctgactgacctgagccagctgaagaagctgctgccgctggtcagtgacgaggtgttcatcagggacgtggccaaggtcaaacaggagaacaagctcaagttctcggccttcctggagaaggagtacaaggtgaagatcaacccctcctccatgttcgatgtgcatgtgaagaggatccacgagtacaagcggcagctgctcaactgcctgcacgtcgtcaccctgtacaatcgaatcaagagagacccggccaaggcttttgtgcccaggactgttatgattgggggcaaggcagcgcccggttaccacatggccaagctgatcatcaagttggtcacctccatcggcgacgtcgtcaatcatgacccagttgtgggtgacaggttgaaagtgatcttcctggagaactaccgtgtgtccttggctgagaaagtgatcccggccgctgatctgtcgcagcagatctccactgcaggcaccgaggcctcaggcacaggcaacatgaagttcatgctcaacggggccctcaccatcggcaccatggacggcgccaacgtggagatggccgaggaggccggggccgagaacctcttcatcttcggcctgcgggtggaggatgtcgaggccttggaccggaaagggtacaatgccagggagtactacgaccacctgcccgagctgaagcaggccgtggaccagatcagcagtggctttttttctcccaaggagccagactgcttcaaggacatcgtgaacatgctgatgcaccatgacaggttcaaggtgtttgcagactatgaagcctacatgcagtgccaggcacaggtggaccagctgtaccggaaccccaaggagtggaccaagaaggtcatcaggaacatcgcctgctcgggcaagttctccagtgaccggaccatcacggagtatgcacgggagatctggggtgtggagccctccgacctgcagatcccgccccccaacatcccccgggactaggcacaccctgccttggcgggaccagcgggcatttgttttcttgctgactttgcacctccttttttccccaaacactttgccagccactggtggtccctgcttttctgagtaccatgtttccaggaggggccatgggggtcagggtggttttgagagagcagggtaaggaaggaatgtgctagaagtgctcctagtttcttgtaaaggaagccagagttgacagtacaaagggtcgtggccagccctgcagcttcagcacctgccccacccagagtgggagtcaggtggagccacctgctgggctcccccagaactttgcacacatcttgctatgtattagccgatgtctttagtgttgagcctctggattctggggtctgggccagtggccatagtgaagcctgggaatgagtgttactgcagcatctgggctgccagccacagggaagggccaagccccatgtagccccagtcatcctgcccagccctgcctcctggccatgccgggaggggtcggatcctctaggcatcgccttcacagccccctgccccctgccctctgtcctggctctgcacctggtatatgggtcatggacccagatggggctttccctttgtagccatccaatgggcattgtgtgggtgcttggaacccgggatgactgagggggacactggagtgggtgcttgtgtctgctgtctcagaggccttggtcaggatgaagttggctgacacagcttagcttggttttgcttattcaaaagagaaaataactacacatggaaatgaaactagctgaagccttttcttgttttagcaactgaaaattgtacttggtcacttttgtgcttgaggaggcccattttctgcctggcagggggcaggtctgtgccctcccgctgactcctgctgtgtcctgaggtgcatttcctgttgtacacacaagggccaggctccattctccctccctttccaccagtgccacagcctcgtctggaaaaaggaccaggggtcccggaggaacccatttgtgctctgcttggacagcaggcctggcactgggaggtgggggtgagcccctcacagccttgcccctccccaaggctggcaacctgcctcccattgcccaagagagagggcagggaacaggctactgtccttccctgtggaattgccgagaaatctagcaccttgcatgctggatctgggctgcggggaggctctttttctccctggcctccagtgcccaccaggaggatctgcgcacggtgcacagcccaccagagcactacagccttttattgagtggggcaagtgctgggctgtggtcgtgccctgacagcatcttccccaggcagcggctctgtggaggaggccatactcccctagttggccactggggccaccaccctgaccaccactgtgcccctcattgttactgccttgtgagataaaaactgattaaacctttgtggctgtggttggctga

SEQ ID NO: 452474 - DNA, 2278 bp, Homo sapiens
tgaaacatcaccacacagtaccaccatccgtcacacctaaagcattggacaggagtcctccgtgtcctgaaatgttcactcgggcagcgcccggttaccacatggccaagctgatcatcaagttggtcacctccatcggcgacgtcgtcaatcatgacccagttgtgggtgacaggttgaaagtgatcttcctggagaactaccgtgtgtccttggctgagaaagtgatcccggccgctgatctgtcgcagcagatctccactgcaggcaccgaggcctcaggcacaggcaacatgaagttcatgctcaacggggccctcaccatcggcaccatggacggcgccaacgtggagatggccgaggaggccggggccgagaacctcttcatcttcggcctgcgggtggaggatgtcgaggccttggaccggaaagggtacaatgccagggagtactacgaccacctgcccgagctgaagcaggccgtggaccagatcagcagtggctttttttctcccaaggagccagactgcttcaaggacatcgtgaacatgctgatgcaccatgacaggttcaaggtgtttgcagactatgaagcctacatgcagtgccaggcacaggtggaccagctgtaccggaaccccaaggagtggaccaagaaggtcatcaggaacatcgcctgctcgggcaagttctccagtgaccggaccatcacggagtatgcacgggagatctggggtgtggagccctccgacctgcagatcccgccccccaacatcccccgggactaggcacaccctgccttggcgggaccagcgggcatttgttttcttgctgactttgcacctccttttttccccaaacactttgccagccactggtggtccctgcttttctgagtaccatgtttccaggaggggccatgggggtcagggtggttttgagagagcagggtaaggaaggaatgtgctagaagtgctcctagtttcttgtaaaggaagccagagttgacagtacaaagggtcgtggccagccctgcagcttcagcacctgccccacccagagtgggagtcaggtggagccacctgctgggctcccccagaactttgcacacatcttgctatgtattagccgatgtctttagtgttgagcctctggattctggggtctgggccagtggccatagtgaagcctgggaatgagtgttactgcagcatctgggctgccagccacagggaagggccaagccccatgtagccccagtcatcctgcccagccctgcctcctggccatgccgggaggggtcggatcctctaggcatcgccttcacagccccctgccccctgccctctgtcctggctctgcacctggtatatgggtcatggacccagatggggctttccctttgtagccatccaatgggcattgtgtgggtgcttggaacccgggatgactgagggggacactggagtgggtgcttgtgtctgctgtctcagaggccttggtcaggatgaagttggctgacacagcttagcttggttttgcttattcaaaagagaaaataactacacatggaaatgaaactagctgaagccttttcttgttttagcaactgaaaattgtacttggtcacttttgtgcttgaggaggcccattttctgcctggcagggggcaggtctgtgccctcccgctgactcctgctgtgtcctgaggtgcatttcctgttgtacacacaagggccaggctccattctccctccctttccaccagtgccacagcctcgtctggaaaaaggaccaggggtcccggaggaacccatttgtgctctgcttggacagcaggcctggcactgggaggtgggggtgagcccctcacagccttgcccctccccaaggctggcaacctgcctcccattgcccaagagagagggcagggaacaggctactgtccttccctgtggaattgccgagaaatctagcaccttgcatgctggatctgggctgcggggaggctctttttctccctggcctccagtgcccaccaggaggatctgcgcacggtgcacagcccaccagagcactacagccttttattgagtggggcaagtgctgggctgtggtcgtgccctgacagcatcttccccaggcagcggctctgtggaggaggccatactcccctagttggccactggggccaccaccctgaccaccactgtgcccctcattgttactgccttgtgagataaaaactgattaaacctttgtggctgtggttggctga

SEQ ID NO: 452475 - DNA, 3113 bp, Homo sapiens
cccgcagagccgcagtgccgggcgccagagcagcggcgccagagcagctgcaccatcccggcgttcgcgtgtgccgccgctttcctcctccatctcttttcctccgcctccgccggcgcgatggcgaagccgctgacggacagcgagaagcggaagcagatcagcgtgcgcggcctggcggggctaggcgacgtggccgaggtgcggaagagcttcaaccggcacttgcacttcacgctggtcaaggaccgcaatgtggccacgccccgcgactacttcttcgcgctggcgcacacggtgcgcgaccacctcgtgggccgctggatccgcacgcagcagcactactacgagcgcgaccccaagcgcatttattatctttccctggaattctacatgggtcgcacgctgcagaacacgatggtgaacctgggccttcagaatgcctgcgatgaagccatctatcagttggggttagacttggaggaactcgaggagatagaagaagatgctggccttgggaatggaggcctggggaggctggcagcgtgtttccttgactcaatggctaccttgggcctggcagcatacggctatggaatccgctatgaatttgggatttttaaccagaagattgtcaatggctggcaggtagaggaggccgatgactggctgcgctacggcaacccctgggagaaagcgcggcctgagtatatgcttcccgtgcacttctacggacgcgtggagcacacccccgacggcgtgaagtggctggacacacaggtggtgctggccatgccctacgacaccccagtgcccggctacaagaacaacaccgtcaacaccatgcggctgtggtccgccaaggctcccaacgacttcaagctgcaggacttcaacgtgggagactacatcgaggcggtcctggaccggaacttggctgagaacatctccagggtcctgtatccaaatgataacttctttgaggggaaggagctgcggctgaagcaggagtacttcgtggtggccgccacgctccaggacatcatccgccgcttcaagtcgtccaagttcggctgccgggaccctgtgagaacctgtttcgagacgttcccagacaaggtggccatccagctgaacgacacccaccccgccctctccatccctgagctcatgcggatcctggtggacgtggagaaggtggactgggacaaggcctgggaaatcacgaagaagacctgtgcatacaccaaccacactgtgctgcctgaggccttggagcgctggcccgtgtccatgtttgagaagctgctgccgcggcacctggagataatctatgccatcaaccagcggcacctggaccacgtggccgcgctgtttcccggcgatgtggaccgcctgcgcaggatgtctgtgatcgaggagggggactgcaagcggatcaacatggcccacctgtgtgtgattgggtcccatgctgtcaatggtgtggcgaggatccactcggagatcgtgaaacagtcggtctttaaggatttttatgaactggagccagagaagttccagaataagaccaatggcatcaccccccgccggtggctgctgctgtgcaacccggggctggccgataccatcgtggagaaaattggggaggagttcctgactgacctgagccagctgaagaagctgctgccgctggtcagtgacgaggtgttcatcagggacgtggccaaggtcaaacaggagaacaagctcaagttctcggccttcctggagaaggagtacaaggtgaagatcaacccctcctccatgttcgatgtgcatgtgaagaggatccacgagtacaagcggcagctgctcaactgcctgcacgtcgtcaccctgtacaatcgaatcaagagagacccggccaaggcttttgtgcccaggactgttatgattgggggcaaggcagcgcccggttaccacatggccaagctgatcatcaagttggtcacctccatcggcgacgtcgtcaatcatgacccagttgtgggtgacaggttgaaagtgatcttcctggagaactaccgtgtgtccttggctgagaaagtgatcccggccgctgatctgtcgcagcagatctccactgcaggcaccgaggcctcaggcacaggcaacatgaagttcatgctcaacggggccctcaccatcggcaccatggacggcgccaacgtggagatggccgaggaggccggggccgagaacctcttcatcttcggcctgcgggtggaggatgtcgaggccttggaccggaaagggtacaatgccagggagtactacgaccacctgcccgagctgaagcaggccgtggaccagatcagcagtggctttttttctcccaaggagccagactgcttcaaggacatcgtgaacatgctgatgcaccatgacaggttcaaggtgtttgcagactatgaagcctacatgcagtgccaggcacaggtggaccagctgtaccggaaccccaaggagtggaccaagaaggtcatcaggaacatcgcctgctcgggcaagttctccagtgaccggaccatcacggagtatgcacgggagatctggggtgtggagccctccgacctgcagatcccgccccccaacatcccccgggactaggcacaccctgccttggcgggaccagcgggcatttgttttcttgctgactttgcacctccttttttccccaaacactttgccagccactggtggtccctgcttttctgagtaccatgtttccaggaggggccatgggggtcagggtggttttgagagagcagggtaaggaaggaatgtgctagaagtgctcctagtttcttgtaaaggaagccagatgcccaccaggaggatctgcgcacggtgcacagcccaccagagcactacagccttttattgagtggggcaagtgctgggctgtggtcgtgccctgacagcatcttccccaggcagcggctctgtggaggaggccatactcccctagttggccactggggccaccaccctgaccaccactgtgcccctcattgttactgccttgtgagataaaaactgattaaacctttgtggctgtggttggctga

SEQ ID NO: 452476 - DNA, 943 bp, Homo sapiens
cgcttggggctttcgagtttccagctgtggtggtctgggctctccctctgtatcgcctggggctttcgagttgccatccaatgggcattgtgtgggtgcttggaacccgggatgactgagggggacactggagtgggtgcttgtgtctgctgtctcagaggccttggtcaggatgaagttggctgacacagcttagcttggttttgcttattcaaaagagaaaataactacacatggaaatgaaactagctgaagccttttcttgttttagcaactgaaaattgtacttggtcacttttgtgcttgaggaggcccattttctgcctggcagggggcaggtctgtgccctcccgctgactcctgctgtgtcctgaggtgcatttcctgttgtacacacaagggccaggctccattctccctccctttccaccagtgccacagcctcgtctggaaaaaggaccaggggtcccggaggaacccatttgtgctctgcttggacagcaggcctggcactgggaggtgggggtgagcccctcacagccttgcccctccccaaggctggcaacctgcctcccattgcccaagagagagggcagggaacaggctactgtccttccctgtggaattgccgagaaatctagcaccttgcatgctggatctgggctgcggggaggctctttttctccctggcctccagtgcccaccaggaggatctgcgcacggtgcacagcccaccagagcactacagccttttattgagtggggcaagtgctgggctgtggtcgtgccctgacagcatcttccccaggcagcggctctgtggaggaggccatactcccctagttggccactggggccaccaccctgaccaccactgtgcccctcattgttactgccttgtgagataaaaactgattaaacctttgtggctgtggttggctga

SEQ ID NO: 452477 - DNA, 2485 bp, Homo sapiens
cccgcagagccgcagtgccgggcgccagagcagcggcgccagagcagctgcaccatcccggcgttcgcgtgtgccgccgctttcctcctccatctcttttcctccgcctccgccggcgcgatggcgaagccgctgacggacagcgagaagcggaagcagatcagcgtgcgcggcctggcggggctaggcgacgtggccgaggtgcggaagagcttcaaccggcacttgcacttcacgctggtcaaggaccgcaatgtggccacgccccgcgactacttcttcgcgctggcgcacacggtgcgcgaccacctcgtgggccgctggatccgcacgcagcagcactactacgagcgcgaccccaagcgcatttattatctttccctggaattctacatgggtcgcacgctgcagaacacgatggtgaacctgggccttcagaatgcctgcgatgaagccatctatcagttggggttagacttggaggaactcgaggagatagaagaagatgctggccttgggaatggaggcctggggaggctggcagcgtgtttccttgactcaatggctaccttgggcctggcagcatacggctatggaatccgctatgaatttgggatttttaaccagaagattgtcaatggctggcaggtagaggaggccgatgactggctgcgctacggcaacccctgggagaaagcgcggcctgagtatatgcttcccgtgcacttctacggacgcgtggagcacacccccgacggcgtgaagtggctggacacacaggtggtgctggccatgccctacgacaccccagtgcccggctacaagaacaacaccgtcaacaccatgcggctgtggtccgccaaggctcccaacgacttcaagctgcaggacttcaacgtgggagactacatcgaggcggtcctggaccggaacttggctgagaacatctccagggtcctgtatccaaatgataacttctttgaggggaaggagctgcggctgaagcaggagtacttcgtggtggccgccacgctccaggacatcatccgccgcttcaagtcgtccaagttcggctgccgggaccctgtgagaacctgtttcgagacgttcccagacaaggtggccatccagctgaacgacacccaccccgccctctccatccctgagctcatgcggatcctggtggacgtggagaaggtggactgggacaaggcctgggaaatcacgaagaagacctgtgcatacaccaaccacactgtgctgcctgaggccttggagcgctggcccgtgtccatgtttgagaagctgctgccgcggcacctggagataatctatgccatcaaccagcggcacctggaccacgtggccgcgctgtttcccggcgatgtggaccgcctgcgcaggatgtctgtgatcgaggagggggactgcaagcggatcaacatggcccacctgtgtgtgattgggtcccatgctgtcaatggtgtggcgaggatccactcggagatcgtgaaacagtcggtctttaaggatttttatgaactggagccagagaagttccagaataagaccaatggcatcaccccccgccggtggctgctgctgtgcaacccggggctggccgataccatcgtggagaaaattggggaggagttcctgactgacctgagccagctgaagaagctgctgccgctggtcagtgacgaggtgttcatcagggacgtggccaaggtcaaacaggagaacaagctcaagttctcggccttcctggagaaggagtacaaggtgaagatcaacccctcctccatgttcgatgtgcatgtgaagaggatccacgagtacaagcggcagctgctcaactgcctgcacgtcgtcaccctgtacaatcgaatcaagagagacccggccaaggcttttgtgcccaggactgttatgattgggggcaaggatgtcgaggccttggaccggaaagggtacaatgccagggagtactacgaccacctgcccgagctgaagcaggccgtggaccagatcagcagtggctttttttctcccaaggagccagactgcttcaaggacatcgtgaacatgctgatgcaccatgacaggttcaaggtgtttgcagactatgaagcctacatgcagtgccaggcacaggtggaccagctgtaccggaaccccaaggagtggaccaagaaggtcatcaggaacatcgcctgctcgggcaagttctccagtgaccggaccatcacggagtatgcacgggagatctggggtgtggagccctccgacctgcagatcccgccccccaacatcccccgggactaggcacaccctgccttggcgggaccagcgggcatttgttttcttgctgactttgcacctccttttttccccaaacactttgccagccacactgtgcccctcattgttactgccttgtgagataaaaactgattaaacctttgtggctgtggttggctga

SEQ ID NO: 452478 - DNA, 1129 bp, Homo sapiens
cccgcagagccgcagtgccgggcgccagagcagcggcgccagagcagctgcaccatcccggcgttcgcgtgtgccgccgctttcctcctccatctcttttcctccgcctccgccggcgcgatggcgaagccgctgacggacagcgagaagcggaagcagatcagcgtgcgcggcctggcggggctaggcgacgtggccgaggtgcggaagagcttcaaccggcacttgcacttcacgctggtcaaggaccgcaatgtggccacgccccgcgactacttcttcgcgctggcgcacacggtgcgcgaccacctcgtgggccgctggatccgcacgcagcagcactactacgagcgcgaccccaagcgcatttattatctttccctggaattctacatgggtcgcacgctgcagaacacgatggtgaacctgggccttcagaatgcctgcgatgaagccatctatcagttggggttagacttggaggaactcgaggagatagaagaagatgctggccttgggaatggaggcctggggaggctggcaggtaagttgccccatccaggaggagctctctcggacccgttggcttggttggaggccacgtggtgaggccagggtcaggtaaattggcctcagggtaaattggctttgagtggatgggccagtgtgttcttcagattgaaatcttgccactagtggggggaaagggggaaaatgtatgttttctttcacacaagggacgtgtcatcattatcacgaagaccaatcttgccagcatggagtaagctggtgctgggaggggctcccgatatgctgaccactttccagggcacaagagccagtgattggcagacagcccaaaggatggaaagatgatttctgaacgtggccctgcttgcagcaggcagtttcaactctgatacagtcagcagattgccttgaaataacagggctttgagggtcttcagccctctccacctcccggcctttgtgacatgtgatgggtcaccactgtcttcctgtgaggtcccttttcatcaaatgcaaaactgggcttcctacgctcaagggaagctccagcctcttttgtccccatctcctgacagccccaggggtggccattcaccgc

SEQ ID NO: 452479 - DNA, 519 bp, Homo sapiens
catcttcgaggtcccagccaaggtgctccatttcacttcctgcccctccggccgtctgtttttcaaaagctctgcccaggatttcacagtgagccaagttctgagtggccctctccactaggaatgtggcatcagccactatgtcctagcagatctgctagtgatgacatttctttaacagtcaaaggagcaggtgggattggctttagactgacttcacatctctgctcgagcaggtccctgctcaagggcctcgtaaccacccatggccactggctgctgccctggaccgtgcaggccttgagctcccagggccatcctggggcaggggctgtgccaggcaccaacatggcttgttctccaaggtggcccacctggggcgctggctgctgactcctggcccatcgcctcacaggtacaatgccagggagtactacgaccacctgcccgagctgaagcaggccgtggaccagatcagcagtggctttttttctcccaaggagccagactgcttcaagg

SEQ ID NO: 452480 - DNA, 4252 bp, Homo sapiens
  misc_feature (4215)..(4215): n is a, c, g, or t
  misc_feature (4240)..(4240): n is a, c, g, or t
cccgcagagccgcagtgccgggcgccagagcagcggcgccagagcagctgcaccatcccggcgttcgcgtgtgccgccgctttcctcctccatctcttttcctccgcctccgccggcgcgatggcgaagccgctgacggacagcgagaagcggaagcagatcagcgtgcgcggcctggcggggctaggcgacgtggccgaggtgcggaagagcttcaaccggcacttgcacttcacgctggtcaaggaccgcaatgtggccacgccccgcgactacttcttcgcgctggcgcacacggtgcgcgaccacctcgtgggccgctggatccgcacgcagcagcactactacgagcgcgaccccaagcgcatttattatctttccctggaattctacatgggtcgcacgctgcagaacacgatggtgaacctgggccttcagaatgcctgcgatgaagccatctatcagttggggttagacttggaggaactcgaggagatagaagaagatgctggccttgggaatggaggcctggggaggctggcagcgtgtttccttgactcaatggctaccttgggcctggcagcatacggctatggaatccgctatgaatttgggatttttaaccagaagattgtcaatggctggcaggtagaggaggccgatgactggctgcgctacggcaacccctgggagaaagcgcggcctgagtatatgcttcccgtgcacttctacggacgcgtggagcacacccccgacggcgtgaagtggctggacacacaggtggtgctggccatgccctacgacaccccagtgcccggctacaagaacaacaccgtcaacaccatgcggctgtggtccgccaaggctcccaacgacttcaagctgcaggacttcaacgtgggagactacatcgaggcggtcctggaccggaacttggctgagaacatctccagggtcctgtatccaaatgataacttctttgaggggaaggagctgcggctgaagcaggagtacttcgtggtggccgccacgctccaggacatcatccgccgcttcaagtcgtccaagttcggctgccgggaccctgtgagaacctgtttcgagacgttcccagacaaggtggccatccagctgaacgacacccaccccgccctctccatccctgagctcatgcggatcctggtggacgtggagaaggtggactgggacaaggcctgggaaatcacgaagaagacctgtgcatacaccaaccacactgtgctgcctgaggccttggagcgctggcccgtgtccatgtttgagaagctgctgccgcggcacctggagataatctatgccatcaaccagcggcacctggaccacgtggccgcgctgtttcccggcgatgtggaccgcctgcgcaggatgtctgtgatcgaggagggggactgcaagcggatcaacatggcccacctgtgtgtgattgggtcccatgctgtcaatggtgtggcgaggatccactcggagatcgtgaaacagtcggtctttaaggatttttatgaactggagccagagaagttccagaataagaccaatggcatcaccccccgccggtggctgctgctgtgcaacccggggctggccgataccatcgtggagaaaattggggaggagttcctgactgacctgagccagctgaagaagctgctgccgctggtcagtgacgaggtgttcatcagggacgtggccaaggtcaaacaggagaacaagctcaagttctcggccttcctggagaaggagtacaaggtgaagatcaacccctcctccatgttcgatgtgcatgtgaagaggatccacgagtacaagcggcagctgctcaactgcctgcacgtcgtcaccctgtacaatcgaatcaagagagacccggccaaggcttttgtgcccaggactgttatgattgggggcaaggcagcgcccggttaccacatggccaagctgatcatcaagttggtcacctccatcggcgacgtcgtcaatcatgacccagttgtgggtgacaggttgaaagtgatcttcctggagaactaccgtgtgtccttggctgagaaagtgatcccggccgctgatctgtcgcagcagatctccactgcaggcaccgaggcctcaggcacaggcaacatgaagttcatgctcaacggggccctcaccatcggcaccatggacggcgccaacgtggagatggccgaggaggccggggccgagaacctcttcatcttcggcctgcgggtggaggatgtcgaggccttggaccggaaagggtacaatgccagggagtactacgaccacctgcccgagctgaagcaggccgtggaccagatcagcagtggctttttttctcccaaggagccagactgcttcaaggacatcgtgaacatgctgatgcaccatgacaggttcaaggtgtttgcagactatgaagcctacatgcagtgccaggcacaggtggaccagctgtaccggaaccccaaggagtggaccaagaaggtcatcaggaacatcgcctgctcgggcaagttctccagtgaccggaccatcacggagtatgcacgggagatctggggtgtggagccctccgacctgcagatcccgccccccaacatcccccgggactaggcacaccctgccttggcgggaccagcgggcatttgttttcttgctgactttgcacctccttttttccccaaacactttgccagccactggtggtccctgcttttctgagtaccatgtttccaggaggggccatgggggtcagggtggttttgagagagcagggtaaggaaggaatgtgctagaagtgctcctagtttcttgtaaaggaagccagagttgacagtacaaagggtcgtggccagccctgcagcttcagcacctgccccacccagagtgggagtcaggtggagccacctgctgggctcccccagaactttgcacacatcttgctatgtattagccgatgtctttagtgttgagcctctggattctggggtctgggccagtggccatagtgaagcctgggaatgagtgttactgcagcatctgggctgccagccacagggaagggccaagccccatgtagccccagtcatcctgcccagccctgcctcctggccatgccgggaggggtcggatcctctaggcatcgccttcacagccccctgccccctgccctctgtcctggctctgcacctggtatatgggtcatggacccagatggggctttccctttgtagccatccaatgggcattgtgtgggtgcttggaacccgggatgactgagggggacactggagtgggtgcttgtgtctgctgtctcagaggccttggtcaggatgaagttggctgacacagcttagcttggttttgcttattcaaaagagaaaataactacacatggaaatgaaactagctgaagccttttcttgttttagcaactgaaaattgtacttggtcacttttgtgcttgaggaggcccattttctgcctggcagggggcaggtctgtgccctcccgctgactcctgctgtgtcctgaggtgcatttcctgttgtacacacaagggccaggctccattctccctccctttccaccagtgccacagcctcgtctggaaaaaggaccaggggtcccggaggaacccatttgtgctctgcttggacagcaggcctggcactgggaggtgggggtgagcccctcacagccttgcccctccccaaggctggcaacctgcctcccattgcccaagagagagggcagggaacaggctactgtccttccctgtggaattgccgagaaatctagcaccttgcatgctggatctgggctgcggggaggctctttttctccctggcctccagtgcccaccaggaggatctgcgcacggtgcacagcccaccagagcactacagccttttattgagtggggcaagtgctgggctgtggtcgtgccctgacagcatcttccccaggcagcggctctgtggaggaggccatactcccctagttggccactggggccaccaccctgaccaccactgtgcccctcattgttactgccttgtgagataaaaactgattaaacctttgtggctgtggttggctgaaaaaaaaaaacaaaaaaacttatcgatacccgtccaccctcaatgatgatgatgaatgatgtccaaccccggnaatttccggaaccggtaccttgcanggcgttacccaa

SEQ ID NO: 452481 - DNA, 3212 bp, Homo sapiens
cccgcagagccgcagtgccgggcgccagagcagcggcgccagagcagctgcaccatcccggcgttcgcgtgtgccgccgctttcctcctccatctcttttcctccgcctccgccggcgcgatggcgaagccgctgacggacagcgagaagcggaagcagatcagcgtgcgcggcctggcggggctaggcgacgtggccgaggtgcggaagagcttcaaccggcacttgcacttcacgctggtcaaggaccgcaatgtggccacgccccgcgactacttcttcgcgctggcgcacacggtgcgcgaccacctcgtgggccgctggatccgcacgcagcagcactactacgagcgcgaccccaagcgcatttattatctttccctggaattctacatgggtcgcacgctgcagaacacgatggtgaacctgggccttcagaatgcctgcgatgaagccatctatcagttggggttagacttggaggaactcgaggagatagaagaagatgctggccttgggaatggaggcctggggaggctggcagcgtgtttccttgactcaatggctaccttgggcctggcagcatacggctatggaatccgctatgaatttgggatttttaaccagaagattgtcaatggctggcaggtagaggaggccgatgactggctgcgctacggcaacccctgggagaaagcgcggcctgagtatatgcttcccgtgcacttctacggacgcgtggagcacacccccgacggcgtgaagtggctggacacacaggtggtgctggccatgccctacgacaccccagtgcccggctacaagaacaacaccgtcaacaccatgcggctgtggtccgccaaggctcccaacgacttcaagctgcaggacttcaacgtgggagactacatcgaggcggtcctggaccggaacttggctgagaacatctccagggtcctgtatccaaatgataacttctttgaggggaaggagctgcggctgaagcaggagtacttcgtggtggccgccacgctccaggacatcatccgccgcttcaagtcgtccaagttcggctgccgggaccctgtgagaacctgtttcgagacgttcccagacaaggtggccatccagctgaacgacacccaccccgccctctccatccctgagctcatgcggatcctggtggacgtggagaaggtggactgggacaaggcctgggaaatcacgaagaagacctgtgcatacaccaaccacactgtgctgcctgaggccttggagcgctggcccgtgtccatgtttgagaagctgctgccgcggcacctggagataatctatgccatcaaccagcggcacctggaccacgtggccgcgctgtttcccggcgatgtggaccgcctgcgcaggatgtctgtgatcgaggagggggactgcaagcggatcaacatggcccacctgtgtgtgattgggtcccatgctgtcaatggtgtggcgaggatccactcggagatcgtgaaacagtcggtctttaaggatttttatgaactggagccagagaagttccagaataagaccaatggcatcaccccccgccggtggctgctgctgtgcaacccggggctggccgataccatcgtggagaaaattggggaggagttcctgactgacctgagccagctgaagaagctgctgccgctggtcagtgacgaggtgttcatcagggacgtggccaaggtcaaacaggagaacaagctcaagttctcggccttcctggagaaggagtacaaggtgaagatcaacccctcctccatgttcgatgtgcatgtgaagaggatccacgagtacaagcggcagctgctcaactgcctgcacgtcgtcaccctgtacaatcgaatcaagagagacccggccaaggcttttgtgcccaggactgttatgattgggggcaaggcagcgcccggttaccacatggccaagctgatcatcaagttggtcacctccatcggcgacgtcgtcaatcatgacccagttgtgggtgacaggttgaaagtgatcttcctggagaactaccgtgtgtccttggctgagaaagtgatcccggccgctgatctgtcgcagcagatctccactgcaggcaccgaggcctcaggcacaggcaacatgaagttcatgctcaacggggccctcaccatcggcaccatggacggcgccaacgtggagatggccgaggaggccggggccgagaacctcttcatcttcggcctgcgggtggaggatgtcgaggccttggaccggaaagggtacaatgccagggagtactacgaccacctgcccgagctgaagcaggccgtggaccagatcagcagtggctttttttctcccaaggagccagactgcttcaaggacatcgtgaacatgctgatgcaccatgacaggttcaaggtgtttgcagactatgaagcctacatgcagtgccaggcacaggtggaccagctgtaccggaaccccaaggagtggaccaagaaggtcatcaggaacatcgcctgctcgggcaagttctccagtgaccggaccatcacggagtatgcacgggagatctggggtgtggagccctccgacctgcagatcccgccccccaacatcccccgggactaggcacaccctgccttggcgggaccagcgggcatttgttttcttgctgactttgcacctccttttttccccaaacactttgccagccactggtggtccctgcttttctgagtaccatgtttccaggaggggccatgggggtcagggtggttttgagagagcagggtaaggaaggaatgtgctagaagtgctcccattgcccaagagagagggcagggaacaggctactgtccttccctgtggaattgccgagaaatctagcaccttgcatgctggatctgggctgcggggaggctctttttctccctggcctccagtgcccaccaggaggatctgcgcacggtgcacagcccaccagagcactacagccttttattgagtggggcaagtgctgggctgtggtcgtgccctgacagcatcttccccaggcagcggctctgtggaggaggccatactcccctagttggccactggggccaccaccctgaccaccactgtgcccctcattgttactgccttgtgagataaaaactgattaaacctttgtggctgtggttggctga

SEQ ID NO: 452482 - DNA, 2809 bp, Homo sapiens
cccgcagagccgcagtgccgggcgccagagcagcggcgccagagcagctgcaccatcccggcgttcgcgtgtgccgccgctttcctcctccatctcttttcctccgcctccgccggcgcgatggcgaagccgctgacggacagcgagaagcggaagcagatcagcgtgcgcggcctggcggggctaggcgacgtggccgaggtgcggaagagcttcaaccggcacttgcacttcacgctggtcaaggaccgcaatgtggccacgccccgcgactacttcttcgcgctggcgcacacggtgcgcgaccacctcgtgggccgctggatccgcacgcagcagcactactacgagcgcgaccccaagcgcatttattatctttccctggaattctacatgggtcgcacgctgcagaacacgatggtgaacctgggccttcagaatgcctgcgatgaagccatctatcagttggggttagacttggaggaactcgaggagatagaagaagatgctggccttgggaatggaggcctggggaggctggcagcgtgtttccttgactcaatggctaccttgggcctggcagcatacggctatggaatccgctatgaatttgggatttttaaccagaagattgtcaatggctggcaggtagaggaggccgatgactggctgcgctacggcaacccctgggagaaagcgcggcctgagtatatgcttcccgtgcacttctacggacgcgtggagcacacccccgacggcgtgaagtggctggacacacaggtggtgctggccatgccctacgacaccccagtgcccggctacaagaacaacaccgtcaacaccatgcggctgtggtccgccaaggctcccaacgacttcaagctgcaggacttcaacgtgggagactacatcgaggcggtcctggaccggaacttggctgagaacatctccagggtcctgtatccaaatgataacttctttgaggggaaggagctgcggctgaagcaggagtacttcgtggtggccgccacgctccaggacatcatccgccgcttcaagtcgtccaagttcggctgccgggaccctgtgagaacctgtttcgagacgttcccagacaaggtggccatccagctgaacgacacccaccccgccctctccatccctgagctcatgcggatcctggtggacgtggagaaggtggactgggacaaggcctgggaaatcacgaagaagacctgtgcatacaccaaccacactgtgctgcctgaggccttggagcgctggcccgtgtccatgtttgagaagctgctgccgcggcacctggagataatctatgccatcaaccagcggcacctggaccacgtggccgcgctgtttcccggcgatgtggaccgcctgcgcaggatgtctgtgatcgaggagggggactgcaagcggatcaacatggcccacctgtgtgtgattgggtcccatgctgtcaatggtgtggcgaggatccactcggagatcgtgaaacagtcggtctttaaggatttttatgaactggagccagagaagttccagaataagaccaatggcatcaccccccgccggtggctgctgctgtgcaacccggggctggccgataccatcgtggagaaaattggggaggagttcctgactgacctgagccagctgaagaagctgctgccgctggtcagtgacgaggtgttcatcagggacgtggccaaggtcaaacaggagaacaagctcaagttctcggccttcctggagaaggagtacaaggtgaagatcaacccctcctccatgttcgatgtgcatgtgaagaggatccacgagtacaagcggcagctgctcaactgcctgcacgtcgtcaccctgtacaatcgaatcaagagagacccggccaaggcttttgtgcccaggactgttatgattgggggcaaggcagcgcccggttaccacatggccaagctgatcatcaagttggtcacctccatcggcgacgtcgtcaatcatgacccagttgtgggtgacaggttgaaagtgatcttcctggagaactaccgtgtgtccttggctgagaaagtgatcccggccgctgatctgtcgcagcagatctccactgcaggcaccgaggcctcaggcacaggcaacatgaagttcatgctcaacggggccctcaccatcggcaccatggacggcgccaacgtggagatggccgaggaggccggggccgagaacctcttcatcttcggcctgcgggtggaggatgtcgaggccttggaccggaaagggtacaatgccagggagtactacgaccacctgcccgagctgaagcaggccgtggaccagatcagcagtggctttttttctcccaaggagccagactgcttcaaggacatcgtgaacatgctgatgcaccatgacaggttcaaggtgtttgcagactatgaagcctacatgcagtgccaggcacaggtggaccagctgtaccggaaccccaaggagtggaccaagaaggtcatcaggaacatcgcctgctcgggcaagttctccagtgaccggaccatcacggagtatgcacgggagatctggggtgtggagccctccgacctgcagatcccgccccccaacatcccccgggactaggcacaccctgccttggcgggaccagcgggcatttgttttcttgctgactttgcacctccttttttccccaaacactttgccagccacactgtgcccctcattgttactgccttgtgagataaaaactgattaaacctttgtggctgtggttggctga

SEQ ID NO: 452483 - DNA, 1142 bp, Homo sapiens
cccgcagagccgcagtgccgggcgccagagcagcggcgccagagcagctgcaccatcccggcgttcgcgtgtgccgccgctttcctcctccatctcttttcctccgcctccgccggcgcgatggcgaagccgctgacggacagcgagaagcggaagcagatcagcgtgcgcggcctggcggggctaggcgacgtggccgaggtgcggaagagcttcaaccggcacttgcacttcacgctggtcaaggaccgcaatgtggccacgccccgcgactacttcttcgcgctggcgcacacggtgcgcgaccacctcgtgggccgctggatccgcacgcagcagcactactacgagcgcgaccccaagcgcatttattatctttccctggaattctacatgggtcgcacgctgcagaacacgatggtgaacctgggccttcagaatgcctgcgatgaagccatctatcagttggggttagacttggaggaactcgaggagatagaagaagatgctggccttgggaatggaggcctggggaggctggcagcgtgtttccttgactcaatggctaccttgggcctggcagcatacggctatggaatccgctatgaatttgggatttttaaccagaagattgtcaatggctggcaggtagaggaggccgatgactggctgcgctacggcaacccctgggagaaagcgcggcctgagtatatgcttcccgtgcacttctacggacgcgtggagcacacccccgacggcgtgaagtggctggacacacaggtggtgctggccatgccctacgacaccccagtgcccggctacaagaacaacaccgtcaacaccatgcggctgtggtccgccaaggctcccaacgacttcaagctgcaggactggtgaggagagcaggggtcccagggaggcattggggtgctgggtaatgacctcggccctgggtttctcctctccctgcgggacaggagcctcagaaagggccaagggcaaggtgggcttggggggctctgggaatctcagctctagccctgtatggccaggatctgctgtctccgtccctcctgggtcccagcagctgtcctgcagctgtcagcaggagggcctggctttaataaagagtggacaaactg

SEQ ID NO: 452484 - DNA, 217 bp, Homo sapiens
gctaaaaaccttcaccctctccttccaggcagcgcccggttaccacatggccaagctgatcatcaagttggtcacctccatcggcgacgtcgtcaatcatgacccagttgtgggtgacaggttgaaagtgatcttcctggagaactaccgtgtgtccttggctgagaaaggtaaccctggaagcctgtgttggacagaaaactcactcctgccgggg

SEQ ID NO: 452485 - DNA, 1348 bp, Homo sapiens
gaaccggaacccgcggttataaagtaaaggaacccgagatctgcgcaggggttccctttgccgatttctctcacctcacctttcaaacctaaactcgagcctactgttcaccggcctagcattgctctcgccatggctctcagcgatgctgacgtgcaaaagcagataaagcatatgatggctttcattgaacaagaagccaatgagaaagcagaagaaatagatgcaaaggcagaagaagagttcaacatagagaaaggtcggcttgtgcaaacccaaagactaaagattatggaatattatgagaagaaagagaaacagattgagcagcagaagaaaattcagatgtccaatttgatgaatcaagcgagactcaaagtcctcagagcaagagatgaccttatcacagacctactaaatgaagcaaaacagagactcagcaaggtggtaaaagatacaaccaggtaccaagtgctgctggatggactggttctccagggtttgtaccagttgctggagccccgaatgattgttcgttgcaggaaacaagatttccctctggtaaaggctgcagtgcagaaggcaattcctatgtacaaaattgccaccaaaaacgatgttgatgtccaaattgaccaggagtcctacctgcctgaagacatagctggtggagttgagatctataatggagatcgtaaaataaaggtttccaacaccctggaaagccggctggatctcatagcccagcagatgatgccagaagtccggggagccttgtttggtgcaaatgccaacaggaagtttttggactaagccttcaggaggtggagctcgtcgtcagctctcctgctgtgatgtggaagcttctgatatttgaagaaacacgaatgtctctgtagcttcctcttcactgccccagtattgctctgtatttatcagcgatgcccctctgtcactcatgccttgcctaattgttcacaatggtggaaagcttcatgtaatatgatcaggacccacctccagttcttctgaaagtgtgacagtgtccagccggttctgcagcactaggggagggggcagatggtggttgcatgggcttcctgggtctccactctccgtctggcctaaaggtgatgtatttggtgtttggccctgcagtccccactcttgaggcttaaggcgcatgtggcacaccactccttccagcagtagtcgctttactgttacctgtttaggcctagaagttttccctcatctgtaaatgtgatttaaaatctaagccatgaatatgctttatttattaaaagagttatgcggatttaatgtgatttctagtgtaaggcactac

SEQ ID NO: 452486 - DNA, 800 bp, Homo sapiens
gaggttgcgcagtctacacaccaagacaagggcattcctctgcgggagtaaagggtaccatgtatctttctcaagtctttgaaaatgattatttcctgtgctttttttttgcagagctggtggagttgagatctataatggagatcgtaaaataaaggtttccaacaccctggaaagccggctggatctcatagcccagcagatgatgccagaagtccggggagccttgtttggtgcaaatgccaacaggaagtttttggactaagccttcaggaggtggagctcgtcgtcagctctcctgctgtgatgtggaagcttctgatatttgaagaaacacgaatgtctctgtagcttcctcttcactgccccagtattgctctgtatttatcagcgatgcccctctgtcactcatgccttgcctaattgttcacaatggtggaaagcttcatgtaatatgatcaggacccacctccagttcttctgaaagtgtgacagtgtccagccggttctgcagcactaggggagggggcagatggtggttgcatgggcttcctgggtctccactctccgtctggcctaaaggtgatgtatttggtgtttggccctgcagtccccactcttgaggcttaaggcgcatgtggcacaccactccttccagcagtagtcgctttactgttacctgtttaggcctagaagttttccctcatctgtaaatgtgatttaaaatctaagccatgaatatgctttatttattaaaagagttatgcggatttaatgtgatttctagtgtaaggcactac

SEQ ID NO: 452487 - DNA, 769 bp, Homo sapiens
gaggttgcgcagtctacacaccaagacaagggcattcctctgcgggagtaaagggtaccatgtatctttctcaagtctttgaaaatgattatttcctgtgctttttttttgcagagctggtggagttgagatctataatggagatcgtaaaataaaggtttccaacaccctggaaagccggctggatctcatagcccagcagatgatgccagaagtccggggagccttgtttggtgcaaatgccaacaggaagtttttggactaagccttcaggaggtggagctcgtcgtcagctctcctgctgtgatgtggaagcttctgatatttgaagaaacacgaatgtctctgtagcttcctcttcactgccccagtattgctctgtatttatcagcgatgcccctctgtcactcatgccttgcctaattgttcacaatggtggaaagcttcatgtaatatgatcaggacccacctccagttcttctgaaagtgtgacagtgtccagccggttctgcagcactaggggagggggcagatggtggttgcatgggcttcctgggtctccactctccgtctggcctaaaggtgatgtatttggtgtttggccctgcagtccccactcttgaggcttaaggcgcatgtggcacaccactccttccagcagtagtcgctttactgttacctgtttaggcctagaagttttccctcatctgtaaatgtgatttaaaatctaagccatgaatatgctttatttattaaaagagttatgcgg

SEQ ID NO: 452488 - DNA, 1683 bp, Homo sapiens
gaaccggaacccgcggttataaagtaaaggaacccgagatctgcgcaggggttccctttgccgatttctctcacctcacctttcaaacctaaactcgagcctactgttcaccggcctagcattgctctcgccatggctctcagcgatgctgacgtgcaaaagcagataaagcatatgatggctttcattgaacaagaagccaatgagaaagcagaagaaatagatgcaaaggcagaagaagagttcaacatagagaaaggtcggcttgtgcaaacccaaagactaaagattatggaatattatgagaagaaagagaaacagattgagcagcagaagaaaattcagatgtccaatttgatgaatcaagcgagactcaaagtcctcagagcaagagatgaccttatcacagacctactaaatgaagcaaaacagagactcagcaaggtggtaaaagatacaaccaggtaccaagtgctgctggatggactggttctccagggtttgtaccagttgctggagccccgaatgattgttcgttgcaggaaacaagatttccctctggtaaaggctgcagtgcagaaggcaattcctatgtacaaaattgccaccaaaaacgatgttgatgtccaaattgaccaggagtcctacctgcctgaagacatagctggtggagttgagatctataatggagatcgtaaaataaaggtttccaacaccctggaaagccggctggatctcatagcccagcagatgatgccagaagtccggggagccttgtttggtgcaaatgccaacaggaagtttttggactaagccttcaggaggtggagctcgtcgtcagctctcctgctgtgatgtggaagcttctgatatttgaagaaacacgaatgtctctgtagcttcctcttcactgccccagtattgctctgtatttatcagcgatgcccctctgtcactcatgccttgcctaattgttcacaatggtggaaagcttcatgtaatatgatcaggacccacctccagttcttctgaaagtgtgacagtgtccagccggttctgcagcactaggggagggggcagatggtggttgcatgggcttcctgggtctccactctccgtctggcctaaaggtgatgtatttggtgtttggccctgcagtccccactcttgaggcttaaggcgcatgtggcacaccactccttccagcagtagtcgctttactgttacctgtttaggcctagaagttttccctcatctgtaaatgtgatttaaaatctaagccatgaatatgctttatttattaaaagagttatgcggaaaaaaaaaaaaaaaaaaaaaaaaaaaaaaaaaaaaaagggcgcggcgcgcgcgcccggggcccccgagagaaagcgcttccaaagaccatccgggggggcgcgcgcggggcgcccagaagggaaaggggaacaggggccaaaaccgcggggtcccaaaggagagaacccggggccagagagaaaagggcgcggggagattctctctcacccaaaaaaaaacgcccgcggggggaaaccgagagcggttcgcggaaaaaaatcccaagaggggagttccgagggggccacaaagggggatcctaacaaaaagggggggcccaggggaagcccggaatatccaaataagccccgcccgggggcagac

SEQ ID NO: 452489 - DNA, 1274 bp, Homo sapiens
gaaccggaacccgcggttataaagtaaaggaacccgagatctgcgcaggggttccctttgccgatttctctcacctcacctttcaaacctaaactcgagcctactgttcaccggcctagcattgctctcgccatggctctcagcgatgctgacgtgcaaaagcagataaagcatatgatggctttcattgaacaagaagccaatgagaaagcagaagaaatagatgcaaaggcagaagaagagttcaacatagagaaaggtcggcttgtgcaaacccaaagactaaagattatggaatattatgagaagaaagagaaacagattgagcagcagaagaaaattcagatgtccaatttgatgaatcaagcgagactcaaagtcctcagagcaagagatgaccttatcacagacctactaaatgaagcaaaacagagactcagcaaggtggtaaaagatacaaccaggtaccaagtgctgctggatggactggttctccagggtttgtaccagttgctggagccccgaatgattgttcgttgcaggaaacaagatttccctctggtaaaggctgcagtgcagaaggcaattcctatgtacaaaattgccaccaaaaacgatgttgatgtccaaattgaccaggagtcctacctgcctgaagacatagctggtggagttgagatctataatggagatcgtaaaataaaggtttccaacaccctggaaagccggctggatctcatagcccagcagatgatgccagaagtccggggagccttgtttggtgcaaatgccaacaggaagtttttggactaagccttcaggaggtggagctcgtcgtcagctctcctgctgtgatgtggaagcttctgatatttgaagaaacacgaatgtctctgtagcttcctcttaaaaaaaaaaaaaaaaaaaaaaaaaaaaaaaaaaaaaagggcgcggcgcgcgcgcccggggcccccgagagaaagcgcttccaaagaccatccgggggggcgcgcgcggggcgcccagaagggaaaggggaacaggggccaaaaccgcggggtcccaaaggagagaacccggggccagagagaaaagggcgcggggagattctctctcacccaaaaaaaaacgcccgcggggggaaaccgagagcggttcgcggaaaaaaatcccaagaggggagttccgagggggccacaaagggggatcctaacaaaaagggggggcccaggggaagcccggaatatccaaataagccccgcccgggggcagac

SEQ ID NO: 452490 - DNA, 1300 bp, Homo sapiens
atcgttattcagcatatcccactcacgacgtctttcaaacctaaactcgagcctactgttcaccggcctagcattgctctcgccatggctctcagcgatgctgacgtgcaaaagcagataaagcatatgatggctttcattgaacaagaagccaatgagaaagcagaagaaatagatgcaaaggcagaagaagagttcaacatagagaaaggtcggcttgtgcaaacccaaagactaaagattatggaatattatgagaagaaagagaaacagattgagcagcagaagaaaattcagatgtccaatttgatgaatcaagcgagactcaaagtcctcagagcaagagatgaccttatcacagacctactaaatgaagcaaaacagagactcagcaaggtggtaaaagatacaaccaggtaccaagtgctgctggatggactggttctccagggtttgtaccagttgctggagccccgaatgattgttcgttgcaggaaacaagatttccctctggtaaaggctgcagtgcagaaggcaattcctatgtacaaaattgccaccaaaaacgatgttgatgtccaaattgaccaggagtcctacctgcctgaagacatagctggtggagttgagatctataatggagatcgtaaaataaaggtttccaacaccctggaaagccggctggatctcatagcccagcagatgatgccagaagtccggggagccttgtttggtgcaaatgccaacaggaagtttttggactaagccttcaggaggtggagctcgtcgtcagctctcctgctgtgatgtggaagcttctgatatttgaagaaacacgaatgtctctgtagcttcctcttcactgccccagtattgctctgtatttatcagcgatgcccctctgtcactcatgccttgcctaattgttcacaatggtggaaagcttcatgtaatatgatcaggacccacctccagttcttctgaaagtgtgacagtgtccagccggttctgcagcactaggggagggggcagatggtggttgcatgggcttcctgggtctccactctccgtctggcctaaaggtgatgtatttggtgtttggccctgcagtccccactcttgaggcttaaggcgcatgtggcacaccactccttccagcagtagtcgctttactgttacctgtttaggcctagaagttttccctcatctgtaaatgtgatttaaaatctaagccatgaatatgctttatttattaaaagagttatgcggatttaatgtgatttctagtgtaaggcactac

SEQ ID NO: 452491 - DNA, 1282 bp, Homo sapiens
gaaccggaacccgcggttataaagtaaaggaacccgagatctgcgcaggggttccctttgccgatttctctcacctcacctttcaaacctaaactcgagcctactgttcaccggcctagcattgctctcgccatggctctcagcgatgctgacgtgcaaaagcaggcagaagaagagttcaacatagagaaaggtcggcttgtgcaaacccaaagactaaagattatggaatattatgagaagaaagagaaacagattgagcagcagaagaaaattcagatgtccaatttgatgaatcaagcgagactcaaagtcctcagagcaagagatgaccttatcacagacctactaaatgaagcaaaacagagactcagcaaggtggtaaaagatacaaccaggtaccaagtgctgctggatggactggttctccagggtttgtaccagttgctggagccccgaatgattgttcgttgcaggaaacaagatttccctctggtaaaggctgcagtgcagaaggcaattcctatgtacaaaattgccaccaaaaacgatgttgatgtccaaattgaccaggagtcctacctgcctgaagacatagctggtggagttgagatctataatggagatcgtaaaataaaggtttccaacaccctggaaagccggctggatctcatagcccagcagatgatgccagaagtccggggagccttgtttggtgcaaatgccaacaggaagtttttggactaagccttcaggaggtggagctcgtcgtcagctctcctgctgtgatgtggaagcttctgatatttgaagaaacacgaatgtctctgtagcttcctcttcactgccccagtattgctctgtatttatcagcgatgcccctctgtcactcatgccttgcctaattgttcacaatggtggaaagcttcatgtaatatgatcaggacccacctccagttcttctgaaagtgtgacagtgtccagccggttctgcagcactaggggagggggcagatggtggttgcatgggcttcctgggtctccactctccgtctggcctaaaggtgatgtatttggtgtttggccctgcagtccccactcttgaggcttaaggcgcatgtggcacaccactccttccagcagtagtcgctttactgttacctgtttaggcctagaagttttccctcatctgtaaatgtgatttaaaatctaagccatgaatatgctttatttattaaaagagttatgcggatttaatgtgatttctagtgtaaggcactac

SEQ ID NO: 452492 - DNA, 1260 bp, Homo sapiens
tcggctaggagaggccgggtgtgaatcggccgaggaggagatctgcgcaggggttccctttgccgatttctctcacctcacctttcaaacctaaactcgagcctactgttcaccggcctagcattgctctcgccatggctctcagcgatgctgacgtgcaaaagcagataaagcatatgatggctttcattgaacaagaagccaatgagaaagcagaagaaatagatgcaaaggcagaagaagagttcaacatagagaaaggtcggcttgtgcaaacccaaagactaaagattatggaatattatgagaagaaagagaaacagattgagcagcagaagaaaattcagatgtccaatttgatgaatcaagcgagactcaaagtcctcagagcaagagatgaccttatcacaggtttgtaccagttgctggagccccgaatgattgttcgttgcaggaaacaagatttccctctggtaaaggctgcagtgcagaaggcaattcctatgtacaaaattgccaccaaaaacgatgttgatgtccaaattgaccaggagtcctacctgcctgaagacatagctggtggagttgagatctataatggagatcgtaaaataaaggtttccaacaccctggaaagccggctggatctcatagcccagcagatgatgccagaagtccggggagccttgtttggtgcaaatgccaacaggaagtttttggactaagccttcaggaggtggagctcgtcgtcagctctcctgctgtgatgtggaagcttctgatatttgaagaaacacgaatgtctctgtagcttcctcttcactgccccagtattgctctgtatttatcagcgatgcccctctgtcactcatgccttgcctaattgttcacaatggtggaaagcttcatgtaatatgatcaggacccacctccagttcttctgaaagtgtgacagtgtccagccggttctgcagcactaggggagggggcagatggtggttgcatgggcttcctgggtctccactctccgtctggcctaaaggtgatgtatttggtgtttggccctgcagtccccactcttgaggcttaaggcgcatgtggcacaccactccttccagcagtagtcgctttactgttacctgtttaggcctagaagttttccctcatctgtaaatgtgatttaaaatctaagccatgaatatgctttatttattaaaagagttatgcggatttaatgtgatttctagtgtaaggcactac

SEQ ID NO: 452493 - DNA, 643 bp, Homo sapiens
gaaccggaacccgcggttataaagtaaaggaacccgagatctgcgcaggggttccctttgccgatttctctcacctcacctttcaaacctaaactcgagcctactgttcaccggcctagcattgctctcgccatggctctcagcgatgctgacgtgcaaaagcagataaagcatatgatggctttcattgaacaagaagccaatgagaaagcagaagaaatagatgcaaaggcagaagaagagttcaacatagagaaaggtcggcttgtgcaaacccaaagactaaagattatggaatattatgagaagaaagagaaacagattgagcagcagaagaaaattcagatgtccaatttgatgaatcaagcgagactcaaagtcctcagagcaagagatgaccttatcacaggtggttgcatgggcttcctgggtctccactctccgtctggcctaaaggtgatgtatttggtgtttggccctgcagtccccactcttgaggcttaaggcgcatgtggcacaccactccttccagcagtagtcgctttactgttacctgtttaggcctagaagttttccctcatctgtaaatgtgatttaaaatctaagccatgaatatgctttatttattaaaagagttatgcgg

SEQ ID NO: 452494 - DNA, 479 bp, Homo sapiens
gaaccggaacccgcggttataaagtaaaggaacccgagatctgcgcaggggttccctttgccgatttctctcacctcacctttcaaacctaaactcgagcctactgttcaccggcctagcattgctctcgccatggctctcagcgatgctgacgtgcaaaagcagataaagcatatgatggctttcattgaacaagaagccaatgagaaagcagaagaaatagatgcaaaggcagaagaagagttcaacatagagaaaggtcggcttgtgcaaacccaaagactaaagattatggaatattatgagaagaaagagaaacagattgagcagcagaagaaaattcagatgtccaatttgatgaatcaagcgagactcaaagtcctcagagcaagagatgaccttatcacagtcgacctgtcacgtgtcgctatccaaatatctcagtcaacaaccgaccttcacgttcgctaggtccgcct

SEQ ID NO: 452495 - DNA, 878 bp, Homo sapiens
  misc_feature (671)..(671): n is a, c, g, or t
  misc_feature (676)..(676): n is a, c, g, or t
  misc_feature (684)..(684): n is a, c, g, or t
  misc_feature (687)..(687): n is a, c, g, or t
  misc_feature (692)..(692): n is a, c, g, or t
  misc_feature (697)..(697): n is a, c, g, or t
  misc_feature (705)..(705): n is a, c, g, or t
  misc_feature (707)..(707): n is a, c, g, or t
  misc_feature (715)..(715): n is a, c, g, or t
gaaccggaacccgcggttataaagtaaaggaacccgagatctgcgcaggggttccctttgccgatttctctcacctcacctttcaaacctaaactcgagcctactgttcaccggcctagcattgctctcgccatggctctcagcgatgctgacgtgcaaaagcagataaagcatatgatggctttcattgaacaagaagccaatgagaaagcagaagaaatagatgcaaaggcagaagaagagttcaacatagagaaaggtcggcttgtgcaaacccaaagactaaagattatggaatattatgagaagaaagagaaacagattgagcagcagaagaaaattcagatgtccaatttgatgaatcaagcgagactcaaagtcctcagagcaagagatgaccttatcacagacctactaaatgaagcaaaacagagactcagcaaggtggtaaaagatacaaccaggtaccaagtgctgctggatggactggttctccagggtttgtaccagttgctggagccccgaatgattgttcgttgcaggaaacaagatttccctctggtaaaggctgcagtgcagaaggcaattcctatgtacaaaattgccaccaaaaacgatgttgatgtccaaattgaccaggagtcctacctgcctgaagacatagctgtggngttgnatctatanggngatcntcatnaggttccnancctggaancggtggttttagcgaagatgaggccaagtcggacctgttggggatccacggagttgggtaagcctgagggactccgacccggggggacctttgaaaacagtttgtcttcgccgagggttagagccgaccgcaacaggagttataccctttggaccagagggtg

SEQ ID NO: 452496 - DNA, 1317 bp, Homo sapiens
gaaccggaacccgcggttataaagtaaaggaacccgagatctgcgcaggggttccctttgccgatttctctcacctcacctttcaaacctaaactcgagcctactgttcaccggcctagcattgctctcgccatggctctcagcgatgctgacgtgcaaaagcagataaagcatatgatggctttcattgaacaagaagccaatgagaaagcagaagaaatagatgcaaaggcagaagaagagttcaacatagagaaaggtcggcttgtgcaaacccaaagactaaagattatggaatattatgagaagaaagagaaacagattgagcagcagaagaaaattcagatgtccaatttgatgaatcaagcgagactcaaagtcctcagagcaagagatgaccttatcacagacctactaaatgaagcaaaacagagactcagcaaggtggtaaaagatacaaccaggtaccaagtgctgctggatggactggttctccagggtttgtaccagttgctggagccccgaatgattgttcgttgcaggaaacaagatttccctctggtaaaggctgcagtgcagaaggcaattcctatgtacaaaattgccaccaaaaacgatgttgatgtccaaattgaccaggagtcctacctgcctgaagacatagctggtggagttgagatctataatggagatcgtaaaataaaggtttccaacaccctggaaagccggctggatctcatagcccagcagatgatgccagaagtccggggagccttgtttggtgcaaatgccaacaggaagtttttggactaagccttcaggaggtggagctcgtcgtcagctctcctgctgtgatgtggaagcttctgatatttgaagaaacacgaatgtctctgtagcttcctcttcactgccccagtattgctctgtatttatcagcgatgcccctctgtcactcatgccttgcctaattgttcacaatggtggaaagcttcatgtaatatgatcaggacccacctccagttcttctgaaagtgtgacagtgtccagccggttctgcagcactaggggagggggcagatggtggttgcatgggcttcctgggtctccactctccgtctggcctaaaggtgatgtatttggtgtttggccctgcagtccccactcttgaggcttaaggcgcatgtggcacaccactccttccagcagtagtcgctttactgttacctgtttaggcctagaagttttccctcatctgtaaatgtgatttaaaatctaagccatgaatatgctttatttattaaaagagttatgcgg

SEQ ID NO: 452497 - DNA, 1350 bp, Homo sapiens
tcggctaggagaggccgggtgtgaatcggccgaggaggagatctgcgcaggggttccctttgccgatttctctcacctcacctttcaaacctaaactcgagcctactgttcaccggcctagcattgctctcgccatggctctcagcgatgctgacgtgcaaaagcagataaagcatatgatggctttcattgaacaagaagccaatgagaaagcagaagaaatagatgcaaaggcagaagaagagttcaacatagagaaaggtcggcttgtgcaaacccaaagactaaagattatggaatattatgagaagaaagagaaacagattgagcagcagaagaaaattcagatgtccaatttgatgaatcaagcgagactcaaagtcctcagagcaagagatgaccttatcacagacctactaaatgaagcaaaacagagactcagcaaggtggtaaaagatacaaccaggtaccaagtgctgctggatggactggttctccagggtttgtaccagttgctggagccccgaatgattgttcgttgcaggaaacaagatttccctctggtaaaggctgcagtgcagaaggcaattcctatgtacaaaattgccaccaaaaacgatgttgatgtccaaattgaccaggagtcctacctgcctgaagacatagctggtggagttgagatctataatggagatcgtaaaataaaggtttccaacaccctggaaagccggctggatctcatagcccagcagatgatgccagaagtccggggagccttgtttggtgcaaatgccaacaggaagtttttggactaagccttcaggaggtggagctcgtcgtcagctctcctgctgtgatgtggaagcttctgatatttgaagaaacacgaatgtctctgtagcttcctcttcactgccccagtattgctctgtatttatcagcgatgcccctctgtcactcatgccttgcctaattgttcacaatggtggaaagcttcatgtaatatgatcaggacccacctccagttcttctgaaagtgtgacagtgtccagccggttctgcagcactaggggagggggcagatggtggttgcatgggcttcctgggtctccactctccgtctggcctaaaggtgatgtatttggtgtttggccctgcagtccccactcttgaggcttaaggcgcatgtggcacaccactccttccagcagtagtcgctttactgttacctgtttaggcctagaagttttccctcatctgtaaatgtgatttaaaatctaagccatgaatatgctttatttattaaaagagttatgcggatttaatgtgatttctagtgtaaggcactac

SEQ ID NO: 452498 - DNA, 1442 bp, Homo sapiens
gaaccggaacccgcggttataaagtaaaggaacccgagatctgcgcaggggttccctttgccgatttctctcacctcacctttcaaacctaaactcgagcctactgttcaccggcctagcattgctctcgccatggctctcagcgatgctgacgtgcaaaagcagataaagcatatgatggctttcattgaacaagaagccaatgagaaagcagaagaaatagatgcaaagtagagacggggtttcaccgtgttggccaggatggtctcaatctcttgaccttgtgatccgcctacctcgtcctccccaagtgctgggattacaggcagaagaagagttcaacatagagaaaggtcggcttgtgcaaacccaaagactaaagattatggaatattatgagaagaaagagaaacagattgagcagcagaagaaaattcagatgtccaatttgatgaatcaagcgagactcaaagtcctcagagcaagagatgaccttatcacagacctactaaatgaagcaaaacagagactcagcaaggtggtaaaagatacaaccaggtaccaagtgctgctggatggactggttctccagggtttgtaccagttgctggagccccgaatgattgttcgttgcaggaaacaagatttccctctggtaaaggctgcagtgcagaaggcaattcctatgtacaaaattgccaccaaaaacgatgttgatgtccaaattgaccaggagtcctacctgcctgaagacatagctggtggagttgagatctataatggagatcgtaaaataaaggtttccaacaccctggaaagccggctggatctcatagcccagcagatgatgccagaagtccggggagccttgtttggtgcaaatgccaacaggaagtttttggactaagccttcaggaggtggagctcgtcgtcagctctcctgctgtgatgtggaagcttctgatatttgaagaaacacgaatgtctctgtagcttcctcttcactgccccagtattgctctgtatttatcagcgatgcccctctgtcactcatgccttgcctaattgttcacaatggtggaaagcttcatgtaatatgatcaggacccacctccagttcttctgaaagtgtgacagtgtccagccggttctgcagcactaggggagggggcagatggtggttgcatgggcttcctgggtctccactctccgtctggcctaaaggtgatgtatttggtgtttggccctgcagtccccactcttgaggcttaaggcgcatgtggcacaccactccttccagcagtagtcgctttactgttacctgtttaggcctagaagttttccctcatctgtaaatgtgatttaaaatctaagccatgaatatgctttatttattaaaagagttatgcggatttaatgtgatttctagtgtaaggcactac

SEQ ID NO: 452499 - DNA, 1258 bp, Homo sapiens
gaaccggaacccgcggttataaagtaaaggaacccgagatctgcgcaggggttccctttgccgatttctctcacctcacctttcaaacctaaactcgagcctactgttcaccggcctagcattgctctcgccatggctctcagcgatgctgacgtgcaaaagcagataaagcatatgatggctttcattgaacaagaagccaatgagaaagcagaagaaatagatgcaaaggcagaagaagagttcaacatagagaaaggtcggcttgtgcaaacccaaagactaaagattatggaatattatgagaagaaagagaaacagattgagcagcagaagaaaattcagatgtccaatttgatgaatcaagcgagactcaaagtcctcagagcaagagatgaccttatcacaggtttgtaccagttgctggagccccgaatgattgttcgttgcaggaaacaagatttccctctggtaaaggctgcagtgcagaaggcaattcctatgtacaaaattgccaccaaaaacgatgttgatgtccaaattgaccaggagtcctacctgcctgaagacatagctggtggagttgagatctataatggagatcgtaaaataaaggtttccaacaccctggaaagccggctggatctcatagcccagcagatgatgccagaagtccggggagccttgtttggtgcaaatgccaacaggaagtttttggactaagccttcaggaggtggagctcgtcgtcagctctcctgctgtgatgtggaagcttctgatatttgaagaaacacgaatgtctctgtagcttcctcttcactgccccagtattgctctgtatttatcagcgatgcccctctgtcactcatgccttgcctaattgttcacaatggtggaaagcttcatgtaatatgatcaggacccacctccagttcttctgaaagtgtgacagtgtccagccggttctgcagcactaggggagggggcagatggtggttgcatgggcttcctgggtctccactctccgtctggcctaaaggtgatgtatttggtgtttggccctgcagtccccactcttgaggcttaaggcgcatgtggcacaccactccttccagcagtagtcgctttactgttacctgtttaggcctagaagttttccctcatctgtaaatgtgatttaaaatctaagccatgaatatgctttatttattaaaagagttatgcggatttaatgtgatttctagtgtaaggcactac

SEQ ID NO: 452500 - DNA, 854 bp, Homo sapiens
gaaccggaacccgcggttataaagtaaaggaacccgagatctgcgcaggggttccctttgccgatttctctcacctcacctttcaaacctaaactcgagcctactgttcaccggcctagcattgctctcgccatggctctcagcgatgctgacgtgcaaaagcagataaagcatatgatggctttcattgaacaagaagccaatgagaaagcagaagaaatagatgcaaaggcagaagaagagttcaacatagagaaaggtcggcttgtgcaaacccaaagactaaagattatggaatattatgagaagaaagagaaacagattgagcagcagaagaaaattcagatgtccaatttgatgaatcaagcgagactcaaagtcctcagagcaagagatgaccttatcacagacctactaaatgaagcaaaacagagactcagcaaggtggtaaaagatacaaccaggtaccaagtgctgctggatggactggttctccaggtaccctcatagaccagatctactgttgatagccacagttctgagaaaatttagaatgcctattagagaccagctctattttttcctgctttctcatttctctagtttttttcctttcaccctttttttttcttttagcttttttactttcactcttgaccatatctaaaatgtgtgctgcataggaaaatagtaaatctgtctgcttggataagacttccaggcctactactcaattatgtagtcttacatgacttaagggtcaaatttgcttgcaatggctagctttaaattcccttaatttgattttgccactaaaatacttgctttagatttaggattcagaccaaacactg

SEQ ID NO: 452501 - DNA, 478 bp, Homo sapiens
  misc_feature (387)..(387): n is a, c, g, or t
  misc_feature (442)..(442): n is a, c, g, or t
  misc_feature (457)..(457): n is a, c, g, or t
gaaccggaacccgcggttataaagtaaaggaacccgagatctgcgcaggggttccctttgccgatttctctcacctcacctttcaaacctaaactcgagcctactgttcaccggcctagcattgctctcgccatggctctcagcgatgctgacgtgcaaaagcagataaagcatatgatggctttcattgaacaagaagccaatgagaaagcagaagaaatagatgcaaaggcagaagaagagttcaacatagagaaaggtcggcttgtgcaaacccaaagactaaagattatggaatattatgagaagaaagagaaacagattgagcagcagaagaaaatgtagaaaagaagtagacataggagactccattttgttctgtactangaaaaaattctttttgcccttgggattgctgttaatcctataaccttaccccaancccggtgctctctgnaacatgtgctgtgtccctaag

SEQ ID NO: 452502 - DNA, 1556 bp, Homo sapiens
agtggctctactttcagaagaaagtgtctctcttcctgcttaaacctctgtctctgacggtccctgccaatcgctctggtcgaccccaacacactaggaggacagacacaggctccaaactccactaagtaccagagctgtgattgtgcccgctgagtggactgcgttgtcagggagtgagtgctccatcatcgggagaatccaagcaggaccgccatggaggaaggtcaatattcagagatcgaggagcttcccaggaggcggtgttgcaggcgtgggactcagatcgtgctgctggggctggtgaccgccgctctgtgggctgggctgctgactctgcttctcctgtggcactgggacaccacacagagtctaaaacagctggaagagagggctgcccggaacgtctctcaagtttccaagaacttggaaagccaccacggtgaccagatggcgcagaaatcccagtccacgcagatttcacaggaactggaggaacttcgagctgaacagcagagattgaaatctcaggacttggagctgtcctggaacctgaacgggcttcaagcagatctgagcagcttcaagtcccaggaattgaacgagaggaacgaagcttcagatttgctggaaagactccgggaggaggtgacaaagctaaggatggagttgcaggtgtccagcggctttgtgtgcaacacgtgccctgaaaagtggatcaatttccaacggaagtgctactacttcggcaagggcaccaagcagtgggtccacgcccggtatgcctgtgacgacatggaagggcagctggtcagcatccacagcccggaggagcaggacttcctgaccaagcatgccagccacaccggctcctggattggccttcggaacttggacctgaagggggagtttatctgggtggatgggagccatgtggactacagcaactgggctccaggggagcccaccagccggagccagggcgaggactgcgtgatgatgcggggctccggtcgctggaacgacgccttctgcgaccgtaagctgggcgcctgggtgtgcgaccggctggccacatgcacgccgccagccagcgaaggttccgcggagtccatgggacctgattcaagaccagaccctgacggccgcctgcccaccccctctgcccctctccactcttgagcatggatacagccaggcccagagcaagaccctgaagacccccaaccacggcctaaaagcctctttgtggctgaaaggtccctgtgacattttctgccacccaaacggaggcagctgacacatctcccgctcctctatggcccctgccttcccaggagtacaccccaacagcaccctctccagatgggagtgcccccaacagcacccctctccagatgagagtacaccccaacagcaccctctccagatgcagccccatctcctcagcaccccaggacctgagtatccccagctcaggtggtgagtcctcctgtccagcctgcatcaataaaatggggcagtgatggcctcccacatttgtcccttcttggagg

SEQ ID NO: 452503 - DNA, 656 bp, Homo sapiens
atgggtgcacctgctgtgtagctcaagtgtgatgggctctggagtgccccacttctgatctcaggctgctatctctccacaccagctgtgtctccctgctaaccacgctaccagagctgtgattgtgcccgctgagtggactgcgttgtcagggagtgagtgctccatcatcgggagaatccaagcaggaccgccatggaggaaggtcaatattcagagatcgaggagcttcccaggaggcggtgttgcaggcgtgggactcagatcgtgctgctggggctggtgaccgccgctctgtgggctgggctgctgactctgcttctcctgtggcgtgaggacacccccagctccatgtggtccccccaactcatggggcccttctgtgttccctccttcacccccatctcagagctgggggagcccaacgcatcctctcaaaacccaattttcccatcctgcctcccatcttgccactgccagccctttcccatcccccaccctccagagcccctcaccccacacccagcatccctgtcctccacactttcagcacctccatggcttatacccaagacctccatccccagctgggaggtggggtgcaggcaggtgggggcactgacaatcccccctctccactcctcttctctccccct

SEQ ID NO: 452504 - DNA, 1664 bp, Homo sapiens
atgggtgcacctgctgtgtagctcaagtgtgatgggctctggagtgccccacttctgatctcaggctgctatctctccacaccagctgtgtctccctgctaaccacgctagtgagtccagattgtagactaaacaaaatcagcaaatggcccctgagtgccaccaagtcccagatgctatcctgtgctggtaactaggatttgatggctcaccctaaccatcattaaatcccaaatcagccagagctgtgattgtgcccgctgagtggactgcgttgtcagggagtgagtgctccatcatcgggagaatccaagcaggaccgccatggaggaaggtcaatattcagagatcgaggagcttcccaggaggcggtgttgcaggcgtgggactcagatcgtgctgctggggctggtgaccgccgctctgtgggctgggctgctgactctgcttctcctgtggcactgggacaccacacagagtctaaaacagctggaagagagggctgcccggaacgtctctcaagtttccaagaacttggaaagccaccacggtgaccagatggcgcagaaatcccagtccacgcagatttcacaggaactggaggaacttcgagctgaacagcagagattgaaatctcaggaattgaacgagaggaacgaagcttcagatttgctggaaagactccgggaggaggtgacaaagctaaggatggagttgcaggtgtccagcggctttgtgtgcaacacgtgccctgaaaagtggatcaatttccaacggaagtgctactacttcggcaagggcaccaagcagtgggtccacgcccggtatgcctgtgacgacatggaagggcagctggtcagcatccacagcccggaggagcaggacttcctgaccaagcatgccagccacaccggctcctggattggccttcggaacttggacctgaagggggagtttatctgggtggatgggagccatgtggactacagcaactgggctccaggggagcccaccagccggagccagggcgaggactgcgtgatgatgcggggctccggtcgctggaacgacgccttctgcgaccgtaagctgggcgcctgggtgtgcgaccggctggccacatgcacgccgccagccagcgaaggttccgcggagtccatgggacctgattcaagaccagaccctgacggccgcctgcccaccccctctgcccctctccactcttgagcatggatacagccaggcccagagcaagaccctgaagacccccaaccacggcctaaaagcctctttgtggctgaaaggtccctgtgacattttctgccacccaaacggaggcagctgacacatctcccgctcctctatggcccctgccttcccaggagtacaccccaacagcaccctctccagatgggagtgcccccaacagcaccctctccagatgagagtacaccccaacagcaccctctccagatgagagtacaccccaacagcaccctctccagatgagagtacaccccaacagcaccctctccagatgcagccccatctcctcagcaccccaggacctgagtatccccagctcaggtggtgagtcctcctgtccagcctgcatcaataaaatggggcagtgatggcctcccacatttgtcccttcttggagg

SEQ ID NO: 452505 - DNA, 1619 bp, Homo sapiens
agtggctctactttcagaagaaagtgtctctcttcctgcttaaacctctgtctctgacggtccctgccaatcgctctggtcgaccccaacacactaggaggacagacacaggctccaaactccactaagtaccagagctgtgattgtgcccgctgagtggactgcgttgtcagggagtgagtgctccatcatcgggagaatccaagcaggaccgccatggaggaaggtcaatattcagagatcgaggagcttcccaggaggcggtgttgcaggcgtgggactcagatcgtgctgctggggctggtgaccgccgctctgtgggctgggctgctgactctgcttctcctgtggcactgggacaccacacagagtctaaaacagctggaagagagggctgcccggaacgtctctcaagtttccaagaacttggaaagccaccacggtgaccagatggcgcagaaatcccagtccacgcagatttcacaggaactggaggaacttcgagctgaacagcagagattgaaatctcaggacttggagctgtcctggaacctgaacgggcttcaagcagatctgagcagcttcaagtcccaggaattgaacgagaggaacgaagcttcagatttgctggaaagactccgggaggaggtgacaaagctaaggatggagttgcaggtgtccagcggctttgtgtgcaacacgtgccctgaaaagtggatcaatttccaacggaagtgctactacttcggcaagggcaccaagcagtgggtccacgcccggtatgcctgtgacgacatggaagggcagctggtcagcatccacagcccggaggagcaggacttcctgaccaagcatgccagccacaccggctcctggattggccttcggaacttggacctgaagggggagtttatctgggtggatgggagccatgtggactacagcaactgggctccaggggagcccaccagccggagccagggcgaggactgcgtgatgatgcggggctccggtcgctggaacgacgccttctgcgaccgtaagctgggcgcctgggtgtgcgaccggctggccacatgcacgccgccagccagcgaaggttccgcggagtccatgggacctgattcaagaccagaccctgacggccgcctgcccaccccctctgcccctctccactcttgagcatggatacagccaggcccagagcaagaccctgaagacccccaaccacggcctaaaagcctctttgtggctgaaaggtccctgtgacattttctgccacccaaacggaggcagctgacacatctcccgctcctctatggcccctgccttcccaggagtacaccccaacagcaccctctccagatgggagtgcccccaacagcaccctctccagatgagagtacaccccaacagcaccctctccagatgagagtacaccccaacagcaccctctccagatgagagtacaccccaacagcaccctctccagatgcagccccatctcctcagcaccccaggacctgagtatccccagctcaggtggtgagtcctcctgtccagcctgcatcaataaaatggggcagtgatggcctcccacatttgtcccttcttggagg

SEQ ID NO: 452506 - DNA, 1756 bp, Homo sapiens
atggttgcccgagctgtgttgttacaattgtaatggcgtctgtagtgctgatttctgatctcaccgctgctatctttccatgccacgctgctgtctcgctggctacagaagcgctagtgatctgctggattgtacgagtacacagagaaatcagtgacacactggccccgtgagtgccgagccacacgttaccagactcctagtctcatgtggctgttaatctagcgatatgactggttctagtcgcttaactcgagtcagttaaagtcgccatacatcatgccagagcgtgtgacttgtgcccgatgacttggactgagtagtcatgtaagttactgctccattcactcggagagatatccaaacgagtcaacgccaatcggcaggcagacgtgctccaatcattcgaagagatcagagggacgcttccgcaagcaggccgggtgtggccatcgcgtcgggcacttcagatctggtgcatgcctgggtgctggtgaccagccagctctgatcctcatcgggctgtctcgactctggattactcctgatggcactgggacaccacacagagtctaaaacagctggaagagagggctgcccggaacgtctctcaagtttccaagaacttggaaagccaccacggtgaccagatggcgcagaaatcccagtccacgcagatttcacaggaactggaggaacttcgagctgaacagcagagattgaaatctcaggaattgaacgagaggaacgaagcttcagatttgctggaaagactccgggaggaggtgacaaagctaaggatggagttgcaggtgtccagcggctttgtgtgcaacacgtgccctgaaaagtggatcaatttccaacggaagtgctactacttcggcaagggcaccaagcagtgggtccacgcccggtatgcctgtgacgacatggaagggcagctggtcagcatccacagcccggaggagcaggacttcctgaccaagcatgccagccacaccggctcctggattggccttcggaacttggacctgaagggggagtttatctgggtggatgggagccatgtggactacagcaactgggctccaggggagcccaccagccggagccagggcgaggactgcgtgatgatgcggggctccggtcgctggaacgacgccttctgcgaccgtaagctgggcgcctgggtgtgcgaccggctggccacatgcacgccgccagccagcgaaggttccgcggagtccatgggacctgattcaagaccagaccctgacggccgcctgcccaccccctctgcccctctccactcttgagcatggatacagccaggcccagagcaagaccctgaagacccccaaccacggcctaaaagcctctttgtggctgaaaggtccctgtgacattttctgccacccaaacggaggcagctgacacatctcccgctcctctatggcccctgccttcccaggagtacaccccaacagcaccctctccagatgggagtgcccccaacagcaccctctccagatgagagtacaccccaacagcaccctctccagatgagagtacaccccaacagcaccctctccagatgagagtacaccccaacagcaccctctccagatgcagccccatctcctcagcaccccaggacctgagtatccccagctcaggtggtgagtcctcctgtccagcctgcatcaataaaatggggcagtgatggcctcccacatttgtcccttcttggagg

SEQ ID NO: 452507 - DNA, 3038 bp, Homo sapiens
agcgggcgcggcgagctgagggtggcggcggtcgacatgttccaggtcccggatagcgagggcggccgcgccggctccagggccatgaagcccccaggaggagaatcgagcaatctttttggaagtccagaagaagctactccttccagcaggcctaataggatggcatctaatatttttggaccaacagaagaacctcagaacatacccaagaggacaaatcccccagggggtaaaggaagtggtatctttgacgaatcaacccccgtgcagactcgacagcacctgaacccacctggagggaagaccagcgacatttttgggtctccggtcactgccacttcacgcttggcacacccaaacaaacccaaggatcatgttttcttatgtgaaggagaagaaccaaaatcggatcttaaagctgcaaggagcatcccggctggagcagagccaggtgagaaaggcagcgccagaaaagcaggccccgccaaggagcaggagcccatgcccacagtcgacagccatgagccccggctggggccgcggcctcgctctcacaacaaggtcctgaacccaccgggaggcaaatccagcatctccttctactaagagaagccactgctccacccggagccagaccagaaactcaagagatagggtagccatgttttcatttccttttgcccaaatgagcggggtgggaagagggttagtcttatgtgagcctggctgctcagcgtctcctggccgtcatgacagctgcttggagacccgtgccttccagatggctgggagatgcctctgtggggatgaaatggggcacccctggccatcactcatgtgtagtccaggtttgagaggaactggaaggggggtgagggtggggaggtggggcagggcatggtccttggatcaacagcccgccagctgattggatgtctaggaatgactgaaagaaaccaaaacagcctgtccactgctgctgtgggatggaggaggcgtaagcagaaacactaacagtatattgacctcttagcagaaccgcttccattctggagatcacggctgctaaatccagcatccccacttcattttacccccagcatattgttctgtagtcttttcttgaaacatcttgattgcttttcctcggcagctttcaaaaaaccaaataataatagttatccgtcttctacttcatggaagattgttttggtgccctgaccctctgaagtgcccagttcctgccatctgaaacctcggcctgatctgatctcatgttggaatctgcctgtctttcacacagggctggtcttggtcctttacatgccagttttgcttgtgaattcttgcttttttcctctcatcagccttaagtttaggcgtttgttgttctccagtgatgtagacagttcccttcacaagtcacagttcttcccataaatgaggcccgctgacctctgcgggactttaaaaatctattcagatatttccgagtaagtggcttgtttaaattcttcctgtgtctttctttattccttaattggttggtggaaagaagagatgcttgggaaccttgggttcttaggtttggattctttaataatatctaaaaagctaaattttaaataccagctttacataaatgattgttgactctggtctgtttctgacacctttccagaaaaaagtcaattgttcaggtacaccaaagaggaagaagagctgtggaggccaccctctacaaagctttatagaacttctggatctaactcacaaacaagcttccagaagagactagagaccttaggccaggagatgaaggagttcagtagcaaagtcacacctgtccaattccctgagctttgctcactcagctaatgggatggcaaaggtggtggtgctttcatcttcaggcagaagcctctgcccatccccctcaagggctgcaggcccagttctcatgctgcccttgggtgggcatctgttaacagaggagaacgtctgggtggcggcagcagctttgctctgagtgcctacaaagctaatgcttggtgctagaaacatcatcattattaaacttcagaaaagcagcagccatgttcagtcaggctcatgctgcctcactgcttaagtgcctgcaggagccgcctgccaagctccccttcctacacctggcacactggggtctgcacaaggctttgtcaaccaaagacagcttcccccttttgattgcctgtagactttggagccaagaaacactctgtgtgactctacacacacttcaggtggtttgtgcttcaaagtcattgatgcaacttgaaaggaaacagtttaatggtggaaatgaactaccatttataacttctgtttttttattgagaaaatgattcacgaattccaaatcagattgccaggaagaaataggacgtgacggtactgggccctgtgattctcccagcccttgcagtccgctaggtgagaggaaaagctctttacttccgcccctggcagggacttctgggttatgggagaaaccagagatgggaatgaggaaaatatgaactacagcagaagcccctgggcagctgtgatggagcccctgacattactcttcttgcatctgtcctgccttctttccctctgcgaggcagtggggtgggattcagagtgcttagtctgctcactgggagaagaagagttcctgcgcatgcaagccctgctgtgtggctgtcgtttacatttgggaggtgtcctgtatgtctgtacgttggggactgcctgtatttggaagatttaaaaacctagcatcctgttctcaccctctaagctgcattgagaaatgactcgtctctgtatttgtattaagccttaacacttttcttaagtgcattcggtgccaacattttttagagctgtaccaaaacaaaaagcctgtactcacatcacaatgtcattttgataggagcgttttgttatttttacaaggcagaatggggtgtaacagttgaattaaacttagcaatcacgtgctcaga

SEQ ID NO: 452508 - DNA, 3702 bp, Homo sapiens
agcgggcgcggcgagctgagggtggcggcggtcgacatgttccaggtcccggatagcgagggcggccgcgccggctccagggccatgaagcccccaggaggagaatcgagcaatctttttggaagtccagaagaagctactccttccagcaggcctaataggatggcatctaatatttttggaccaacagaagaacctcagaacatacccaagaggacaaatcccccagggggtaaaggaagtggtatctttgacgaatcaacccccgtgcagactcgacagcacctgaacccacctggagggaagaccagcgacatttttgggtctccggtcactgccacttcacgcttggcacacccaaacaaacccaaggatcatgttttcttatgtgaaggagaagaaccaaaatcggatcttaaagctgcaaggagcatcccggctggagcagagccaggtgagaaaggcagcgccagaaaagcaggccccgccaaggagcaggagcccatgcccacagtcgacagccatgagccccggctggggccgcggcctcgctctcacaacaaggtcctgaacccaccgggaggcaaatccagcatctccttctactaagagaagccactgctccacccggagccagaccagaaactcaagagatagggtagccatgttttcatttccttttgcccaaatgagcggggtgggaagagggttagtcttatgtgagcctggctgctcagcgtctcctggccgtcatgacagctgcttggagacccgtgccttccagatggctgggagatgcctctgtggggatgaaatggggcacccctggccatcactcatgtgtagtccaggtttgagaggaactggaaggggggtgagggtggggaggtggggcagggcatggtccttggatcaacagcccgccagctgattggatgtctaggaatgactgaaagaaaccaaaacagcctgtccactgctgctgtgggatggaggaggcgtaagcagaaacactaacagtatattgacctcttagcagaaccgcttccattctggagatcacggctgctaaatccagcatccccacttcattttacccccagcatattgttctgtagtcttttcttgaaacatcttgattgcttttcctcggcagctttcaaaaaaccaaataataatagttatccgtcttctacttcatggaagattgttttggtgccctgaccctctgaagtgcccagttcctgccatctgaaacctcggcctgatctgatctcatgttggaatctgcctgtctttcacacagggctggtcttggtcctttacatgccagttttgcttgtgaattcttgcttttttcctctcatcagccttaagtttaggcgtttgttgttctccagtgatgtagacagttcccttcacaagtcacagttcttcccataaatgaggcccgctgacctctgcgggactttaaaaatctattcagatatttccgagtaagtggcttgtttaaattcttcctgtgtctttctttattccttaattggttggtggaaagaagagatgcttgggaaccttgggttcttaggtttggattctttaataatatctaaaaagctaaattttaaataccagctttacataaatgattgttgactctggtctgtttctgacacctttccagaaaaaagtcaattgttcaggtacaccaaagaggaagaagagctgtggaggccaccctctacaaagctttatagaacttctggatctaactcacaaacaagcttccagaagagactagagaccttaggccaggagatgaaggagttcagtagcaaagtcacacctgtccaattccctgagctttgctcactcagctaatgggatggcaaaggtggtggtgctttcatcttcaggcagaagcctctgcccatccccctcaagggctgcaggcccagttctcatgctgcccttgggtgggcatctgttaacagaggagaacgtctgggtggcggcagcagctttgctctgagtgcctacaaagctaatgcttggtgctagaaacatcatcattattaaacttcagaaaagcagcagccatgttcagtcaggctcatgctgcctcactgcttaagtgcctgcaggagccgcctgccaagctccccttcctacacctggcacactggggtctgcacaaggctttgtcaaccaaagacagcttcccccttttgattgcctgtagactttggagccaagaaacactctgtgtgactctacacacacttcaggtggtttgtgcttcaaagtcattgatgcaacttgaaaggaaacagtttaatggtggaaatgaactaccatttataacttctgtttttttattgagaaaatgattcacgaattccaaatcagattgccaggaagaaataggacgtgacggtactgggccctgtgattctcccagcccttgcagtccgctaggtgagaggaaaagctctttacttccgcccctggcagggacttctgggttatgggagaaaccagagatgggaatgaggaaaatatgaactacagcagaagcccctgggcagctgtgatggagcccctgacattactcttcttgcatctgtcctgccttctttccctctgcgaggcagtggggtgggattcagagtgcttagtctgctcactgggagaagaagagttcctgcgcatgcaagccctgctgtgtggctgtcgtttacatttgggaggtgtcctgtatgtctgtacgttggggactgcctgtatttggaagatttaaaaacctagcatcctgttctcaccctctaagctgcattgagaaatgactcgtctctgtatttgtattaagccttaacacttttcttaagtgcattcggtgccaacattttttagagctgtaccaaaacaaaaagcctgtactcacatcacaatgtcattttgataggagcgttttgttatttttacaaggcagaatggggtgtaacagttgaattaaacttagcaatcacgtgctcagaagagcttttgcctgtcagttgtgtgtgtcccttatagtcccttcccccacagctcttgctgaaagagtttgccttgttttgttttgttgttttgtatttagccagaggatgccaaaattagtcttctcaaagctttgagtagagtaagtgtgggaataagccagtttttttttttctgtttctgtaacttaaatgaacgggtttttttcccttgtatgccacttgtcctaacatgtccttaaggtgtttaacctgcctctgacctggcttgcaatgcataggtgaggagaagcagagagcttgtcatatgcaagtcctgtcaagaaaacaggtgggcatggtggctcaggtctgtagtctttgggtctttgggaggccagggtgggaggatcacttgagctcaggagtttgagaccagcctagacaacatactacgaccctgtctatacaaaaaaaaacttctctaaattagccggatgtggtggtgcatgcctgtagtcccagctactcgggaggctgagtgaggcaggaggatcacttgagaccaggaggttgtggctgtagtgagtgatgatcatgccactgcacttcagcctggaccacagagcaagaccctgtgtaaaaaaataaaataaaaaacagattggatgtctttaaaaaatgt

SEQ ID NO: 452509 - DNA, 3035 bp, Homo sapiens
  misc_feature (48)..(48): n is a, c, g, or t
cgcgaatccaggtcccagaagcaggagatggccgagaagatggtcccngatagcgagggcggccgcgccggctccagggccatgaagcccccaggaggagaatcgagcaatctttttggaagtccagaagaagctactccttccagcaggcctaataggatggcatctaatatttttggaccaacagaagaacctcagaacatacccaagaggacaaatcccccagggggtaaaggaagtggtatctttgacgaatcaacccccgtgcagactcgacagcacctgaacccacctggagggaagaccagcgacatttttgggtctccggtcactgccacttcacgcttggcacacccaaacaaacccaaggatcatgttttcttatgtgaaggagaagaaccaaaatcggatcttaaagctgcaaggagcatcccggctggagcagagccaggtgagaaaggcagcgccagaaaagcaggccccgccaaggagcaggagcccatgcccacagtcgacagccatgagccccggctggggccgcggcctcgctctcacaacaaggtcctgaacccaccgggaggcaaatccagcatctccttctactaagagaagccactgctccacccggagccagaccagaaactcaagagatagggtagccatgttttcatttccttttgcccaaatgagcggggtgggaagagggttagtcttatgtgagcctggctgctcagcgtctcctggccgtcatgacagctgcttggagacccgtgccttccagatggctgggagatgcctctgtggggatgaaatggggcacccctggccatcactcatgtgtagtccaggtttgagaggaactggaaggggggtgagggtggggaggtggggcagggcatggtccttggatcaacagcccgccagctgattggatgtctaggaatgactgaaagaaaccaaaacagcctgtccactgctgctgtgggatggaggaggcgtaagcagaaacactaacagtatattgacctcttagcagaaccgcttccattctggagatcacggctgctaaatccagcatccccacttcattttacccccagcatattgttctgtagtcttttcttgaaacatcttgattgcttttcctcggcagctttcaaaaaaccaaataataatagttatccgtcttctacttcatggaagattgttttggtgccctgaccctctgaagtgcccagttcctgccatctgaaacctcggcctgatctgatctcatgttggaatctgcctgtctttcacacagggctggtcttggtcctttacatgccagttttgcttgtgaattcttgcttttttcctctcatcagccttaagtttaggcgtttgttgttctccagtgatgtagacagttcccttcacaagtcacagttcttcccataaatgaggcccgctgacctctgcgggactttaaaaatctattcagatatttccgagtaagtggcttgtttaaattcttcctgtgtctttctttattccttaattggttggtggaaagaagagatgcttgggaaccttgggttcttaggtttggattctttaataatatctaaaaagctaaattttaaataccagctttacataaatgattgttgactctggtctgtttctgacacctttccagaaaaaagtcaattgttcaggtacaccaaagaggaagaagagctgtggaggccaccctctacaaagctttatagaacttctggatctaactcacaaacaagcttccagaagagactagagaccttaggccaggagatgaaggagttcagtagcaaagtcacacctgtccaattccctgagctttgctcactcagctaatgggatggcaaaggtggtggtgctttcatcttcaggcagaagcctctgcccatccccctcaagggctgcaggcccagttctcatgctgcccttgggtgggcatctgttaacagaggagaacgtctgggtggcggcagcagctttgctctgagtgcctacaaagctaatgcttggtgctagaaacatcatcattattaaacttcagaaaagcagcagccatgttcagtcaggctcatgctgcctcactgcttaagtgcctgcaggagccgcctgccaagctccccttcctacacctggcacactggggtctgcacaaggctttgtcaaccaaagacagcttcccccttttgattgcctgtagactttggagccaagaaacactctgtgtgactctacacacacttcaggtggtttgtgcttcaaagtcattgatgcaacttgaaaggaaacagtttaatggtggaaatgaactaccatttataacttctgtttttttattgagaaaatgattcacgaattccaaatcagattgccaggaagaaataggacgtgacggtactgggccctgtgattctcccagcccttgcagtccgctaggtgagaggaaaagctctttacttccgcccctggcagggacttctgggttatgggagaaaccagagatgggaatgaggaaaatatgaactacagcagaagcccctgggcagctgtgatggagcccctgacattactcttcttgcatctgtcctgccttctttccctctgcgaggcagtggggtgggattcagagtgcttagtctgctcactgggagaagaagagttcctgcgcatgcaagccctgctgtgtggctgtcgtttacatttgggaggtgtcctgtatgtctgtacgttggggactgcctgtatttggaagatttaaaaacctagcatcctgttctcaccctctaagctgcattgagaaatgactcgtctctgtatttgtattaagccttaacacttttcttaagtgcattcggtgccaacattttttagagctgtaccaaaacaaaaagcctgtactcacatcacaatgtcattttgataggagcgttttgttatttttacaaggcagaatggggtgtaacagttgaattaaacttagcaatcacgtgctcaga

SEQ ID NO: 452510 - DNA, 3296 bp, Homo sapiens
agcgggcgcggcgagctgagggtggcggcggtcgacatgttccaggtcccggatagcgagggcggccgcgccggctccagggccatgaagcccccaggaggagaatcgagcaatctttttggaagtccagaagaagctactccttccagcaggcctaataggatggcatctaatatttttggaccaacagaagaacctcagaacatacccaagaggacaaatcccccagggggtaaaggaagtggtatctttgacgaatcaacccccgtgcagactcgacagcacctgaacccacctggagggaagaccagcgacatttttgggtctccggtcactgccacttcacgcttggcacacccaaacaaacccaaggatcatgttttcttatgtgaaggagaagaaccaaaatcggatcttaaagctgcaaggagcatcccggctggagcagagccaggtgagaaaggcagcgccagaaaagcaggccccgccaaggagcaggagcccatgcccacagtcgacagccatgagccccggctggggccgcggcctcgctctcacaacaaggtcctgaacccaccgggaggcaaatccagcatctccttctactaagagaagccactgctccacccggagccagaccagaaactcaagagatagggtagccatgttttcatttccttttgcccaaatgagcggggtgggaagagggttagtcttatgtgagcctggctgctcagcgtctcctggccgtcatgacagctgcttggagacccgtgccttccagatggctgggagatgcctctgtggggatgaaatggggcacccctggccatcactcatgtgtagtccaggtttgagaggaactggaaggggggtgagggtggggaggtggggcagggcatggtccttggatcaacagcccgccagctgattggatgtctaggaatgactgaaagaaaccaaaacagcctgtccactgctgctgtgggatggaggaggcgtaagcagaaacactaacagtatattgacctcttagcagaaccgcttccattctggagatcacggctgctaaatccagcatccccacttcattttacccccagcatattgttctgtagtcttttcttgaaacatcttgattgcttttcctcggcagctttcaaaaaaccaaataataatagttatccgtcttctacttcatggaagattgttttggtgccctgaccctctgaagtgcccagttcctgccatctgaaacctcggcctgatctgatctcatgttggaatctgcctgtctttcacacagggctggtcttggtcctttacatgccagttttgcttgtgaattcttgcttttttcctctcatcagccttaagtttaggcgtttgttgttctccagtgatgtagacagttcccttcacaagtcacagttcttcccataaatgaggcccgctgacctctgcgggactttaaaaatctattcagatatttccgagtaagtggcttgtttaaattcttcctgtgtctttctttattccttaattggttggtggaaagaagagatgcttgggaaccttgggttcttaggtttggattctttaataatatctaaaaagctaaattttaaataccagctttacataaatgattgttgactctggtctgtttctgacacctttccagaaaaaagtcaattgttcaggtacaccaaagaggaagaagagctgtggaggccaccctctacaaagctttatagaacttctggatctaactcacaaacaagcttccagaagagactagagaccttaggccaggagatgaaggagttcagtagcaaagtcacacctgtccaattccctgagctttgctcactcagctaatgggatggcaaaggtggtggtgctttcatcttcaggcagaagcctctgcccatccccctcaagggctgcaggcccagttctcatgctgcccttgggtgggcatctgttaacagaggagaacgtctgggtggcggcagcagctttgctctgagtgcctacaaagctaatgcttggtgctagaaacatcatcattattaaacttcagaaaagcagcagccatgttcagtcaggctcatgctgcctcactgcttaagtgcctgcaggagccgcctgccaagctccccttcctacacctggcacactggggtctgcacaaggctttgtcaaccaaagacagcttcccccttttgattgcctgtagactttggagccaagaaacactctgtgtgactctacacacacttcaggtggtttgtgcttcaaagtcattgatgcaacttgaaaggaaacagtttaatggtggaaatgaactaccatttataacttctgtttttttattgagaaaatgattcacgaattccaaatcagattgccaggaagaaataggacgtgacggtactgggccctgtgattctcccagcccttgcagtccgctaggtgagaggaaaagctctttacttccgcccctggcagggacttctgggttatgggagaaaccagagatgggaatgaggaaaatatgaactacagcagaagcccctgggcagctgtgatggagcccctgacattactcttcttgcatctgtcctgccttctttccctctgcgaggcagtggggtgggattcagagtgcttagtctgctcactgggagaagaagagttcctgcgcatgcaagccctgctgtgtggctgtcgtttacatttgggaggtgtcctgtatgtctgtacgttggggactgcctgtatttggaagatttaaaaacctagcatcctgttctcaccctctaagctgcattgagaaatgactcgtctctgtatttgtattaagccttaacacttttcttaagtgcattcggtgccaacattttttagagctgtaccaaaacaaaaagcctgtactcacatcacaatgtcattttgataggagcgttttgttatttttacaaggcagaatggggtgtaacagttgaattaaacttagcaatcacgtgctcagatggctctaaaaaaaaaaaaaaaacaacaaaaaaaaaactttttggggcgcgcgccttgggcccctctcgaaagaaagctctcttataacacaatcttgggttgggcggcgggggccccaagtttatgttatgtgtaaccttgggctcatacgtggctccccagagggagaactcgggcgcaagacactaggtgtgtggatttcctcccatataaaaaaccccggggggcaaccgagtgtttttgaaaaatctccgatg

SEQ ID NO: 452511 - DNA, 2895 bp, Homo sapiens
agcgggcgcggcgagctgagggtggcggcggtcgacatgttccaggtcccggatagcgagggcggccgcgccggctccagggccatgaagcccccaggaggagaatcgagcaatctttttggaagtccagaagaagctactccttccagcaggcctaataggatggcatctaatatttttggaccaacagaagaacctcagaacatacccaagaggacaaatcccccaggatcatgttttcttatgtgaaggagaagaaccaaaatcggatcttaaagctgcaaggagcatcccggctggagcagagccaggtgagaaaggcagcgccagaaaagcaggccccgccaaggagcaggagcccatgcccacagtcgacagccatgagccccggctggggccgcggcctcgctctcacaacaaggtcctgaacccaccgggaggcaaatccagcatctccttctactaagagaagccactgctccacccggagccagaccagaaactcaagagatagggtagccatgttttcatttccttttgcccaaatgagcggggtgggaagagggttagtcttatgtgagcctggctgctcagcgtctcctggccgtcatgacagctgcttggagacccgtgccttccagatggctgggagatgcctctgtggggatgaaatggggcacccctggccatcactcatgtgtagtccaggtttgagaggaactggaaggggggtgagggtggggaggtggggcagggcatggtccttggatcaacagcccgccagctgattggatgtctaggaatgactgaaagaaaccaaaacagcctgtccactgctgctgtgggatggaggaggcgtaagcagaaacactaacagtatattgacctcttagcagaaccgcttccattctggagatcacggctgctaaatccagcatccccacttcattttacccccagcatattgttctgtagtcttttcttgaaacatcttgattgcttttcctcggcagctttcaaaaaaccaaataataatagttatccgtcttctacttcatggaagattgttttggtgccctgaccctctgaagtgcccagttcctgccatctgaaacctcggcctgatctgatctcatgttggaatctgcctgtctttcacacagggctggtcttggtcctttacatgccagttttgcttgtgaattcttgcttttttcctctcatcagccttaagtttaggcgtttgttgttctccagtgatgtagacagttcccttcacaagtcacagttcttcccataaatgaggcccgctgacctctgcgggactttaaaaatctattcagatatttccgagtaagtggcttgtttaaattcttcctgtgtctttctttattccttaattggttggtggaaagaagagatgcttgggaaccttgggttcttaggtttggattctttaataatatctaaaaagctaaattttaaataccagctttacataaatgattgttgactctggtctgtttctgacacctttccagaaaaaagtcaattgttcaggtacaccaaagaggaagaagagctgtggaggccaccctctacaaagctttatagaacttctggatctaactcacaaacaagcttccagaagagactagagaccttaggccaggagatgaaggagttcagtagcaaagtcacacctgtccaattccctgagctttgctcactcagctaatgggatggcaaaggtggtggtgctttcatcttcaggcagaagcctctgcccatccccctcaagggctgcaggcccagttctcatgctgcccttgggtgggcatctgttaacagaggagaacgtctgggtggcggcagcagctttgctctgagtgcctacaaagctaatgcttggtgctagaaacatcatcattattaaacttcagaaaagcagcagccatgttcagtcaggctcatgctgcctcactgcttaagtgcctgcaggagccgcctgccaagctccccttcctacacctggcacactggggtctgcacaaggctttgtcaaccaaagacagcttcccccttttgattgcctgtagactttggagccaagaaacactctgtgtgactctacacacacttcaggtggtttgtgcttcaaagtcattgatgcaacttgaaaggaaacagtttaatggtggaaatgaactaccatttataacttctgtttttttattgagaaaatgattcacgaattccaaatcagattgccaggaagaaataggacgtgacggtactgggccctgtgattctcccagcccttgcagtccgctaggtgagaggaaaagctctttacttccgcccctggcagggacttctgggttatgggagaaaccagagatgggaatgaggaaaatatgaactacagcagaagcccctgggcagctgtgatggagcccctgacattactcttcttgcatctgtcctgccttctttccctctgcgaggcagtggggtgggattcagagtgcttagtctgctcactgggagaagaagagttcctgcgcatgcaagccctgctgtgtggctgtcgtttacatttgggaggtgtcctgtatgtctgtacgttggggactgcctgtatttggaagatttaaaaacctagcatcctgttctcaccctctaagctgcattgagaaatgactcgtctctgtatttgtattaagccttaacacttttcttaagtgcattcggtgccaacattttttagagctgtaccaaaacaaaaagcctgtactcacatcacaatgtcattttgataggagcgttttgttatttttacaaggcagaatggggtgtaacagttgaattaaacttagcaatcacgtgctcaga

SEQ ID NO: 452512 - DNA, 3207 bp, Homo sapiens
agcgggcgcggcgagctgagggtggcggcggtcgacatgttccaggtcccggatagcgagggcggccgcgccggctccagggccatgaagcccccaggaggagaatcgagcaatctttttggaagtccagaagaagctactccttccagcaggcctaataggatggcatctaatatttttggaccaacagaagaacctcagaacatacccaagaggacaaatcccccagggggtaaaggaagtggtatctttgacgaatcaacccccgtgcagactcgacagcacctgaacccacctggagggaagaccagcgacatttttgggtctccggtcactgccacttcacgcttggcacacccaaacaaacccaaggatcatgttttcttatgtgaaggagaagaaccaaaatcggatcttaaagctgcaaggagcatcccggctggagcagagccaggtgagaaaggcagcgccagaaaagcaggccccgccaaggagcaggagcccatgcccacagtcgacagccatgagccccggctggggccgcggcctcgctctcacaacaaggtcctgaacccaccgggaggcaaatccagcatctccttctactaagagaagccactgctccacccggagccagaccagaaactcaagagatagggtagccatgttttcatttccttttgcccaaatgagcggggtgggaagagggttagtcttatgtgagcctggctgctcagcgtctcctggccgtcatgacagctgcttggagacccgtgccttccagatggctgggagatgcctctgtggggatgaaatggggcacccctggccatcactcatgtgtagtccaggtttgagaggaactggaaggggggtgagggtggggaggtggggcagggcatggtccttggatcaacagcccgccagctgattggatgtctaggaatgactgaaagaaaccaaaacagcctgtccactgctgctgtgggatggaggaggcgtaagcagaaacactaacagtatattgacctcttagcagaaccgcttccattctggagatcacggctgctaaatccagcatccccacttcattttacccccagcatattgttctgtagtcttttcttgaaacatcttgattgcttttcctcggcagctttcaaaaaaccaaataataatagttatccgtcttctacttcatggaagattgttttggtgccctgaccctctgaagtgcccagttcctgccatctgaaacctcggcctgatctgatctcatgttggaatctgcctgtctttcacacagggctggtcttggtcctttacatgccagttttgcttgtgaattcttgcttttttcctctcatcagccttaagtttaggcgtttgttgttctccagtgatgtagacagttcccttcacaagtcacagttcttcccataaatgaggcccgctgacctctgcgggactttaaaaatctattcagatatttccgagtaagtggcttgtttaaattcttcctgtgtctttctttattccttaattggttggtggaaagaagagatgcttgggaaccttgggttcttaggtttggattctttaataatatctaaaaagctaaattttaaataccagctttacataaatgattgttgactctggtctgtttctgacacctttccagaaaaaagtcaattgttcaggtacaccaaagaggaagaagagctgtggaggccaccctctacaaagctttatagaacttctggatctaactcacaaacaagcttccagaagagactagagaccttaggccaggagatgaaggagttcagtagcaaagtcacacctgtccaattccctgagctttgctcactcagctaatgggatggcaaaggtggtggtgctttcatcttcaggcagaagcctctgcccatccccctcaagggctgcaggcccagttctcatgctgcccttgggtgggcatctgttaacagaggagaacgtctgggtggcggcagcagctttgctctgagtgcctacaaagctaatgcttggtgctagaaacatcatcattattaaacttcagaaaagcagcagccatgttcagtcaggctcatgctgcctcactgcttaagtgcctgcaggagccgcctgccaagctccccttcctacacctggcacactggggtctgcacaaggctttgtcaaccaaagacagcttcccccttttgattgcctgtagactttggagccaagaaacactctgtgtgactctacacacacttcaggtggtttgtgcttcaaagtcattgatgcaacttgaaaggaaacagtttaatggtggaaatgaactaccatttataacttctgtttttttattgagaaaatgattcacgaattccaaatcagattgccaggaagaaataggacgtgacggtactgggccctgtgattctcccagcccttgcagtccgctaggtgagaggaaaagctctttacttccgcccctggcagggacttctgggttatgggagaaaccagagatgggaatgaggaaaatatgaactacagcagaagcccctgggcagctgtgatggagcccctgacattactcttcttgcatctgtcctgccttctttccctctgcgaggcagtggggtgggattcagagtgcttagtctgctcactgggagaagaagagttcctgcgcatgcaagccctgctgtgtggctgtcgtttacatttgggaggtgtcctgtatgtctgtacgttggggactgcctgtatttggaagatttaaaaacctagcatcctgttctcaccctctaagctgcattgagaaatgactcgtctctgtatttgtattaagccttaacacttttcttaagtgcattcggtgccaacattttttagagctgtaccaaaacaaaaagcctgtactcacatcgacacagtaccacgacacagtgcaccacgacacagcactgtgtcgtggtagaatatcccatttctgagttttaagaactctgaaatgtgcaaagtacaaataagtactctcttgcattcctattttagtcaaaagatccaggctccaaattgcttaatacatctttgagtagtattgcagacaattttaattgaaaattatattcaaaatactgattccaattcctacatgaactgtaacccaattagtcaaccacgaca

SEQ ID NO: 452513 - DNA, 2261 bp, Homo sapiens
  misc_feature (48)..(48): n is a, c, g, or t
cgcgaatccaggtcccagaagcaggagatggccgagaagatggtcccngatagcgagggcggccgcgccggctccagggccatgaagcccccaggaggagaatcgagcaatctttttggaagtccagaagaagctactccttccagcaggctgattggatgtctaggaatgactgaaagaaaccaaaacagcctgtccactgctgctgtgggatggaggaggcgtaagcagaaacactaacagtatattgacctcttagcagaaccgcttccattctggagatcacggctgctaaatccagcatccccacttcattttacccccagcatattgttctgtagtcttttcttgaaacatcttgattgcttttcctcggcagctttcaaaaaaccaaataataatagttatccgtcttctacttcatggaagattgttttggtgccctgaccctctgaagtgcccagttcctgccatctgaaacctcggcctgatctgatctcatgttggaatctgcctgtctttcacacagggctggtcttggtcctttacatgccagttttgcttgtgaattcttgcttttttcctctcatcagccttaagtttaggcgtttgttgttctccagtgatgtagacagttcccttcacaagtcacagttcttcccataaatgaggcccgctgacctctgcgggactttaaaaatctattcagatatttccgagtaagtggcttgtttaaattcttcctgtgtctttctttattccttaattggttggtggaaagaagagatgcttgggaaccttgggttcttaggtttggattctttaataatatctaaaaagctaaattttaaataccagctttacataaatgattgttgactctggtctgtttctgacacctttccagaaaaaagtcaattgttcaggtacaccaaagaggaagaagagctgtggaggccaccctctacaaagctttatagaacttctggatctaactcacaaacaagcttccagaagagactagagaccttaggccaggagatgaaggagttcagtagcaaagtcacacctgtccaattccctgagctttgctcactcagctaatgggatggcaaaggtggtggtgctttcatcttcaggcagaagcctctgcccatccccctcaagggctgcaggcccagttctcatgctgcccttgggtgggcatctgttaacagaggagaacgtctgggtggcggcagcagctttgctctgagtgcctacaaagctaatgcttggtgctagaaacatcatcattattaaacttcagaaaagcagcagccatgttcagtcaggctcatgctgcctcactgcttaagtgcctgcaggagccgcctgccaagctccccttcctacacctggcacactggggtctgcacaaggctttgtcaaccaaagacagcttcccccttttgattgcctgtagactttggagccaagaaacactctgtgtgactctacacacacttcaggtggtttgtgcttcaaagtcattgatgcaacttgaaaggaaacagtttaatggtggaaatgaactaccatttataacttctgtttttttattgagaaaatgattcacgaattccaaatcagattgccaggaagaaataggacgtgacggtactgggccctgtgattctcccagcccttgcagtccgctaggtgagaggaaaagctctttacttccgcccctggcagggacttctgggttatgggagaaaccagagatgggaatgaggaaaatatgaactacagcagaagcccctgggcagctgtgatggagcccctgacattactcttcttgcatctgtcctgccttctttccctctgcgaggcagtggggtgggattcagagtgcttagtctgctcactgggagaagaagagttcctgcgcatgcaagccctgctgtgtggctgtcgtttacatttgggaggtgtcctgtatgtctgtacgttggggactgcctgtatttggaagatttaaaaacctagcatcctgttctcaccctctaagctgcattgagaaatgactcgtctctgtatttgtattaagccttaacacttttcttaagtgcattcggtgccaacattttttagagctgtaccaaaacaaaaagcctgtactcacatcacaatgtcattttgataggagcgttttgttatttttacaaggcagaatggggtgtaacagttgaattaaacttagcaatcacgtgctcaga

SEQ ID NO: 452514 - DNA, 2280 bp, Homo sapiens
agcgggcgcggcgagctgagggtggcggcggtcgacatgttccaggtcccggatagcgagggcggccgcgccggctccagggccatgaagcccccaggaggagaatcgagcaatctttttggaagtccagaagaagctactccttccagcaggcctaataggatggcatctaatatttttggaccaacagaagaacctcagaacatacccaagaggacaaatcccccagggggtaaaggaagtggtatctttgacgaatcaacccccgtgcagactcgacagcacctgaacccacctggagggaagaccagcgacatttttgggtctccggtcactgccacttcacgcttggcacacccaaacaaacccaaggatcatgttttcttatgtgaaggagaagaaccaaaatcggatcttaaagctgcaaggagcatcccggctggagcagagccaggtgagaaaggcagcgccagaaaagcaggccccgccaaggagcaggagcccatgcccacagtcgacagccatgagccccggctggggccgcggcctcgctctcacaacaaggtcctgaacccaccgggaggcaaatccagcatctccttctactaagagaagccactgctccacccggagccagaccagaaactcaagagatagggtagccatgttttcatttccttttgcccaaatgagcggggtgggaagagggttagtcttatgtgagcctggctgctcagcgtctcctggccgtcatgacagctgcttggagacccgtgccttccagatggctgggagatgcctctgtggggatgaaatggggcacccctggccatcactcatgtgtagtccaggtttgagaggaactggaaggggggtgagggtggggaggtggggcagggcatggtccttggatcaacagcccgccagctgattggatgtctaggaatgactgaaagaaaccaaaacagcctgtccactgctgctgtgggatggaggaggcgtaagcagaaacactaacagtatattgacctcttagcagaaccgcttccattctggagatcacggctgctaaatccagcatccccacttcattttacccccagcatattgttctgtagtcttttcttgaaacatcttgattgcttttcctcggcagctttcaaaaaaccaaataataatagttatccgtcttctacttcatggaagattgttttggtgccctgaccctctgaagtgcccagttcctgccatctgaaacctcggcctgatctgatctcatgttggaatctgcctgtctttcacacagggctggtcttggtcctttacatgccagttttgcttgtgaattcttgcttttttcctctcatcagccttaagtttaggcgtttgttgttctccagtgatgtagacagttcccttcacaagtcacagttcttcccataaatgaggcccgctgacctctgcgggactttaaaaatctattcagatatttccgagtaagtggcttgtttaaattcttcctgtgtctttctttattccttaattggttggtggaaagaagagatgcttgggaaccttgggttcttaggtttggattctttaataatatctaaaaagctaaattttaaataccagctttacataaatgattgttgactctggtctgtttctgacacctttccagaaaaaagtcaattgttcaggtacaccaaagaggaagaagagctgtggaggccaccctctacaaagctttatagaacttctggatctaactcacaaacaagcttccagaagagactagagaccttaggccaggagatgaaggagttcagtagcaaagtcacacctgtccaattccctgagctttgctcactcagctaatgggatggcaaaggtggtggtgctttcatcttcaggcagaagcctctgcccatccccctcaagggctgcaggcccagttctcatgctgcccttgggtgggcatctgttaacagaggagaacgtctgggtggcggcagcagctttgctctgagtgcctacaaagctaatgcttggtgctagaaacatcatccctataatggataactgccctgttctctccttccttgccctcttcttggaattggaagtatttttcaaagacagaggcaaaacaatcttcgttcaacatgccagcttgatgcacaatgaatccttgggatccggaagattttcatggcatattgcaaagagacattttattctgagtctggattaaccaagaacttccgtacaccctct

SEQ ID NO: 452515 - DNA, 1170 bp, Homo sapiens
ggagccgcctgccaagctcccttctacacctgcacactgggtctgcacaaggctgcctctgcccatccccctcaagggctgcaggcccagttctcatgctgcccttgggtgggcatctgttaacagaggagaacgtctgggtggcggcagcagctttgctctgagtgcctacaaagctaatgcttggtgctagaaacatcatcattattaaacttcagaaaagcagcagccatgttcagtcaggctcatgctgcctcactgcttaagtgcctgcaggagccgcctgccaagctccccttcctacacctggcacactggggtctgcacaaggctttgtcaaccaaagacagcttcccccttttgattgcctgtagactttggagccaagaaacactctgtgtgactctacacacacttcaggtggtttgtgcttcaaagtcattgatgcaacttgaaaggaaacagtttaatggtggaaatgaactaccatttataacttctgtttttttattgagaaaatgattcacgaattccaaatcagattgccaggaagaaataggacgtgacggtactgggccctgtgattctcccagcccttgcagtccgctaggtgagaggaaaagctctttacttccgcccctggcagggacttctgggttatgggagaaaccagagatgggaatgaggaaaatatgaactacagcagaagcccctgggcagctgtgatggagcccctgacattactcttcttgcatctgtcctgccttctttccctctgcgaggcagtggggtgggattcagagtgcttagtctgctcactgggagaagaagagttcctgcgcatgcaagccctgctgtgtggctgtcgtttacatttgggaggtgtcctgtatgtctgtacgttggggactgcctgtatttggaagatttaaaaacctagcatcctgttctcaccctctaagctgcattgagaaatgactcgtctctgtatttgtattaagccttaacacttttcttaagtgcattcggtgccaacattttttagagctgtaccaaaacaaaaagcctgtactcacatcacaatgtcattttgataggagcgttttgttatttttacaaggcagaatggggtgtaacagttgaattaaacttagcaatcacgtgctcaga

SEQ ID NO: 452516 - DNA, 858 bp, Homo sapiens
agcgggcgcggcgagctgagggtggcggcggtcgacatgttccaggtcccggatagcgagggcggccgcgccggctccagggccatgaagcccccaggaggagaatcgagcaatctttttggaagtccagaagaagctactccttccagcaggcctaataggatggcatctaatatttttggaccaacagaagaacctcagaacatacccaagaggacaaatcccccagggggtaaaggaagtggtatctttgacgaatcaacccccgtgcagactcgacagcacctgaacccacctggagggaagaccagcgacatttttgggtctccggtcactgccacttcacgcttggcacacccaaacaaacccaaggtatggactgcattcagacgtgacagcgcagcagcgggtatgccaggtgctctttccaaaaaggctccaaggcagatgcgacatgtttttagggagaatcatggtgggtgccgtagattatcctggatgcaagcattagtcatcgagtttggaagttcccctgagtcacccaggaaacagtccagccttgtgctgactgaagccgtgggggaagctcttctgtgctggtggcggacgcccactgcagacgggctgtggcggctcctcactgcagtgctgcggggcgcggagaagcggtggggagcggaacgtgccgcagacgagctgggcccttgtccgtcttccactcttcctgtttcaccttgcagaggaaaagtgacagttcttttctgatgggcttttccccgcacagtcaaggtcctcggctggttacctgtggagattgtcagcacttgactgaagcgtagctgacgcctctgacccagt

SEQ ID NO: 452517 - DNA, 3061 bp, Homo sapiens
gcggccgcgccggctccaggaaatggcaactgctgacaggaagtttggcatccacctcccccagcctcctgagtggacaggggccctgggcaccacttcagagggccatgaagcccccaggaggagaatcgagcaatctttttggaagtccagaagaagctactccttccagcaggcctaataggatggcatctaatatttttggaccaacagaagaacctcagaacatacccaagaggacaaatcccccagggggtaaaggaagtggtatctttgacgaatcaacccccgtgcagactcgacagcacctgaacccacctggagggaagaccagcgacatttttgggtctccggtcactgccacttcacgcttggcacacccaaacaaacccaaggatcatgttttcttatgtgaaggagaagaaccaaaatcggatcttaaagctgcaaggagcatcccggctggagcagagccaggtgagaaaggcagcgccagaaaagcaggccccgccaaggagcaggagcccatgcccacagtcgacagccatgagccccggctggggccgcggcctcgctctcacaacaaggtcctgaacccaccgggaggcaaatccagcatctccttctactaagagaagccactgctccacccggagccagaccagaaactcaagagatagggtagccatgttttcatttccttttgcccaaatgagcggggtgggaagagggttagtcttatgtgagcctggctgctcagcgtctcctggccgtcatgacagctgcttggagacccgtgccttccagatggctgggagatgcctctgtggggatgaaatggggcacccctggccatcactcatgtgtagtccaggtttgagaggaactggaaggggggtgagggtggggaggtggggcagggcatggtccttggatcaacagcccgccagctgattggatgtctaggaatgactgaaagaaaccaaaacagcctgtccactgctgctgtgggatggaggaggcgtaagcagaaacactaacagtatattgacctcttagcagaaccgcttccattctggagatcacggctgctaaatccagcatccccacttcattttacccccagcatattgttctgtagtcttttcttgaaacatcttgattgcttttcctcggcagctttcaaaaaaccaaataataatagttatccgtcttctacttcatggaagattgttttggtgccctgaccctctgaagtgcccagttcctgccatctgaaacctcggcctgatctgatctcatgttggaatctgcctgtctttcacacagggctggtcttggtcctttacatgccagttttgcttgtgaattcttgcttttttcctctcatcagccttaagtttaggcgtttgttgttctccagtgatgtagacagttcccttcacaagtcacagttcttcccataaatgaggcccgctgacctctgcgggactttaaaaatctattcagatatttccgagtaagtggcttgtttaaattcttcctgtgtctttctttattccttaattggttggtggaaagaagagatgcttgggaaccttgggttcttaggtttggattctttaataatatctaaaaagctaaattttaaataccagctttacataaatgattgttgactctggtctgtttctgacacctttccagaaaaaagtcaattgttcaggtacaccaaagaggaagaagagctgtggaggccaccctctacaaagctttatagaacttctggatctaactcacaaacaagcttccagaagagactagagaccttaggccaggagatgaaggagttcagtagcaaagtcacacctgtccaattccctgagctttgctcactcagctaatgggatggcaaaggtggtggtgctttcatcttcaggcagaagcctctgcccatccccctcaagggctgcaggcccagttctcatgctgcccttgggtgggcatctgttaacagaggagaacgtctgggtggcggcagcagctttgctctgagtgcctacaaagctaatgcttggtgctagaaacatcatcattattaaacttcagaaaagcagcagccatgttcagtcaggctcatgctgcctcactgcttaagtgcctgcaggagccgcctgccaagctccccttcctacacctggcacactggggtctgcacaaggctttgtcaaccaaagacagcttcccccttttgattgcctgtagactttggagccaagaaacactctgtgtgactctacacacacttcaggtggtttgtgcttcaaagtcattgatgcaacttgaaaggaaacagtttaatggtggaaatgaactaccatttataacttctgtttttttattgagaaaatgattcacgaattccaaatcagattgccaggaagaaataggacgtgacggtactgggccctgtgattctcccagcccttgcagtccgctaggtgagaggaaaagctctttacttccgcccctggcagggacttctgggttatgggagaaaccagagatgggaatgaggaaaatatgaactacagcagaagcccctgggcagctgtgatggagcccctgacattactcttcttgcatctgtcctgccttctttccctctgcgaggcagtggggtgggattcagagtgcttagtctgctcactgggagaagaagagttcctgcgcatgcaagccctgctgtgtggctgtcgtttacatttgggaggtgtcctgtatgtctgtacgttggggactgcctgtatttggaagatttaaaaacctagcatcctgttctcaccctctaagctgcattgagaaatgactcgtctctgtatttgtattaagccttaacacttttcttaagtgcattcggtgccaacattttttagagctgtaccaaaacaaaaagcctgtactcacatcacaatgtcattttgataggagcgttttgttatttttacaaggcagaatggggtgtaacagttgaattaaacttagcaatcacgtgctcaga

SEQ ID NO: 452518 - DNA, 3094 bp, Homo sapiens
  misc_feature (3070)..(3070): n is a, c, g, or t
  misc_feature (3078)..(3078): n is a, c, g, or t
  misc_feature (3081)..(3081): n is a, c, g, or t
agcgggcgcggcgagctgagggtggcggcggtcgacatgttccaggtcccggatagcgagggcggccgcgccggctccagggccatgaagcccccaggaggagaatcgagcaatctttttggaagtccagaagaagctactccttccagcaggcctaataggatggcatctaatatttttggaccaacagaagaacctcagaacatacccaagaggacaaatcccccagggggtaaaggaagtggtatctttgacgaatcaacccccgtgcagactcgacagcacctgaacccacctggagggaagaccagcgacatttttgggtctccggtcactgccacttcacgcttggcacacccaaacaaacccaaggatcatgttttcttatgtgaaggagaagaaccaaaatcggatcttaaagctgcaaggagcatcccggctggagcagagccaggtgagaaaggcagcgccagaaaagcaggccccgccaaggagcaggagcccatgcccacagtcgacagccatgagccccggctggggccgcggcctcgctctcacaacaaggtcctgaacccaccgggaggcaaatccagcatctccttctactaagagaagccactgctccacccggagccagaccagaaactcaagagatagggtagccatgttttcatttccttttgcccaaatgagcggggtgggaagagggttagtcttatgtgagcctggctgctcagcgtctcctggccgtcatgacagctgcttggagacccgtgccttccagatggctgggagatgcctctgtggggatgaaatggggcacccctggccatcactcatgtgtagtccaggtttgagaggaactggaaggggggtgagggtggggaggtggggcagggcatggtccttggatcaacagcccgccagctgattggatgtctaggaatgactgaaagaaaccaaaacagcctgtccactgctgctgtgggatggaggaggcgtaagcagaaacactaacagtatattgacctcttagcagaaccgcttccattctggagatcacggctgctaaatccagcatccccacttcattttacccccagcatattgttctgtagtcttttcttgaaacatcttgattgcttttcctcggcagctttcaaaaaaccaaataataatagttatccgtcttctacttcatggaagattgttttggtgccctgaccctctgaagtgcccagttcctgccatctgaaacctcggcctgatctgatctcatgttggaatctgcctgtctttcacacagggctggtcttggtcctttacatgccagttttgcttgtgaattcttgcttttttcctctcatcagccttaagtttaggcgtttgttgttctccagtgatgtagacagttcccttcacaagtcacagttcttcccataaatgaggcccgctgacctctgcgggactttaaaaatctattcagatatttccgagtaagtggcttgtttaaattcttcctgtgtctttctttattccttaattggttggtggaaagaagagatgcttgggaaccttgggttcttaggtttggattctttaataatatctaaaaagctaaattttaaataccagctttacataaatgattgttgactctggtctgtttctgacacctttccagaaaaaagtcaattgttcaggtacaccaaagaggaagaagagctgtggaggccaccctctacaaagctttatagaacttctggatctaactcacaaacaagcttccagaagagactagagaccttaggccaggagatgaaggagttcagtagcaaagtcacacctgtccaattccctgagctttgctcactcagctaatgggatggcaaaggtggtggtgctttcatcttcaggcagaagcctctgcccatccccctcaagggctgcaggcccagttctcatgctgcccttgggtgggcatctgttaacagaggagaacgtctgggtggcggcagcagctttgctctgagtgcctacaaagctaatgcttggtgctagaaacatcatcattattaaacttcagaaaagcagcagccatgttcagtcaggctcatgctgcctcactgcttaagtgcctgcaggagccgcctgccaagctccccttcctacacctggcacactggggtctgcacaaggctttgtcaaccaaagacagcttcccccttttgattgcctgtagactttggagccaagaaacactctgtgtgactctacacacacttcaggtggtttgtgcttcaaagtcattgatgcaacttgaaaggaaacagtttaatggtggaaatgaactaccatttataacttctgtttttttattgagaaaatgattcacgaattccaaatcagattgccaggaagaaataggacgtgacggtactgggccctgtgattctcccagcccttgcagtccgctaggtgagaggaaaagctctttacttccgcccctggcagggacttctgggttatgggagaaaccagagatgggaatgaggaaaatatgaactacagcagaagcccctgggcagctgtgatggagcccctgacattactcttcttgcatctgtcctgccttctttccctctgcgaggcagtggggtgggattcagagtgcttagtctgctcactgggagaagaagagttcctgcgcatgcaagccctgctgtgtggctgtcgtttacatttgggaggtgtcctgtatgtctgtacgttggggactgcctgtatttggaagatttaaaaacctagcatcctgttctcaccctctaagctgcattgagaaatgactcgtctctgtatttgtattaagccttaacacttttcttaagtgcattcggtgccaacattttttagagctgtaccaaaacaaaaagcctgtactcacatcacaatgtcattttgataggagcgttttgttatttttacaaggcagaatggggtgtaacagttgaattaaacttagcaatcacgtgctcagaaaaaaatcgaggcctggatcgacgatatccanttaatcgnggntgtacagcaagca

SEQ ID NO: 452519 - DNA, 3096 bp, Homo sapiens
agcgggcgcggcgagctgagggtggcggcggtcgacatgttccaggtcccggatagcgagggcggccgcgccggctccagggccatgaagcccccaggaggagaatcgagcaatctttttggaagtccagaagaagctactccttccagcaggcctaataggatggcatctaatatttttggaccaacagaagaacctcagaacatacccaagaggacaaatcccccagggggtaaaggaagtggtatctttgacgaatcaacccccgtgcagactcgacagcacctgaacccacctggagggaagaccagcgacatttttgggtctccggtcactgccacttcacgcttggcacacccaaacaaacccaaggatcatgttttcttatgtgaaggagaagaaccaaaatcggatcttaaagctgcaaggagcatcccggctggagcagagccaggtgagaaaggcagcgccagaaaagcaggccccgccaaggagcaggagcccatgcccacagtcgacagccatgagccccggctggggccgcggcctcgctctcacaacaaggtcctgaacccaccgggaggcaaatccagcatctccttctactaagagaagccactgctccacccggagccagaccagaaactcaagagatagggtagccatgttttcatttccttttgcccaaatgagcggggtgggaagagggttagtcttatgtgagcctggctgctcagcgtctcctggccgtcatgacagctgcttggagacccgtgccttccagatggctgggagatgcctctgtggggatgaaatggggcacccctggccatcactcatgtgtagtccaggtttgagaggaactggaaggggggtgagggtggggaggtggggcagggcatggtccttggatcaacagcccgccagctgattggatgtctaggaatgactgaaagaaaccaaaacagcctgtccactgctgctgtgggatggaggaggcgtaagcagaaacactaacagtatattgacctcttagcagaaccgcttccattctggagatcacggctgctaaatccagcatccccacttcattttacccccagcatattgttctgtagtcttttcttgaaacatcttgattgcttttcctcggcagctttcaaaaaaccaaataataatagttatccgtcttctacttcatggaagattgttttggtgccctgaccctctgaagtgcccagttcctgccatctgaaacctcggcctgatctgatctcatgttggaatctgcctgtctttcacacagggctggtcttggtcctttacatgccagttttgcttgtgaattcttgcttttttcctctcatcagccttaagtttaggcgtttgttgttctccagtgatgtagacagttcccttcacaagtcacagttcttcccataaatgaggcccgctgacctctgcgggactttaaaaatctattcagatatttccgagtaagtggcttgtttaaattcttcctgtgtctttctttattccttaattggttggtggaaagaagagatgcttgggaaccttgggttcttaggtttggattctttaataatatctaaaaagctaaattttaaataccagctttacataaatgattgttgactctggtctgtttctgacacctttccagaaaaaagtcaattgttcaggtacaccaaagaggaagaagagctgtggaggccaccctctacaaagctttatagaacttctggatctaactcacaaacaagcttccagaagagactagagaccttaggccaggagatgaaggagttcagtagcaaagtcacacctgtccaattccctgagctttgctcactcagctaatgggatggcaaaggtggtggtgctttcatcttcaggcagaagcctctgcccatccccctcaagggctgcaggcccagttctcatgctgcccttgggtgggcatctgttaacagaggagaacgtctgggtggcggcagcagctttgctctgagtgcctacaaagctaatgcttggtgctagaaacatcatcattattaaacttcagaaaagcagcagccatgttcagtcaggctcatgctgcctcactgcttaagtgcctgcaggagccgcctgccaagctccccttcctacacctggcacactggggtctgcacaaggctttgtcaaccaaagacagcttcccccttttgattgcctgtagactttggagccaagaaacactctgtgtgactctacacacacttcaggtggtttgtgcttcaaagtcattgatgcaacttgaaaggaaacagtttaatggtggaaatgaactaccatttataacttctgtttttttattgagaaaatgattcacgaattccaaatcagattgccaggaagaaataggacgtgacggtactgggccctgtgattctcccagcccttgcagtccgctaggtgagaggaaaagctctttacttccgcccctggcagggacttctgggttatgggagaaaccagagatgggaatgaggaaaatatgaactacagcagaagcccctgggcagctgtgatggagcccctgacattactcttcttgcatctgtcctgccttctttccctctgcgaggcagtggggtgggattcagagtgcttagtctgctcactgggagaagaagagttcctgcgcatgcaagccctgctgtgtggctgtcgtttacatttgggaggtgtcctgtatgtctgtacgttggggactgcctgtatttggaagatttaaaaacctagcatcctgttctcaccctctaagctgcattgagaaatgactcgtctctgtatttgtattaagccttaacacttttcttaagtgcattcggtgccaacattttttagagctgtaccaaaacaaaaagcctgtactcacatcacaatgtcattttgataggagcgttttgttatttttacaaggcagaatggggtgtaacagttgaattaaacttagcaatcacgtgctcagaaaaaaaaacaaagcttgtgcatgtaaacgaaaaaaaaaaagtctgcgcggccgcgaat

SEQ ID NO: 452520 - DNA, 2753 bp, Homo sapiens
agcgggcgcggcgagctgagggtggcggcggtcgacatgttccaggtcccggatagcgagggcggccgcgccggctccagggccatgaagcccccaggaggagaatcgagcaatctttttggaagtccagaagaagctactccttccagcaggcctaataggatggcatctaatatttttggaccaacagaagaacctcagaacatacccaagaggacaaatcccccagggggtaaaggaagtggtatctttgacgaatcaacccccgtgcagactcgacagcacctgaacccacctggagggaagaccagcgacatttttgggtctccggtcactgccacttcacgcttggcacacccaaacaaacccaagggtagccatgttttcatttccttttgcccaaatgagcggggtgggaagagggttagtcttatgtgagcctggctgctcagcgtctcctggccgtcatgacagctgcttggagacccgtgccttccagatggctgggagatgcctctgtggggatgaaatggggcacccctggccatcactcatgtgtagtccaggtttgagaggaactggaaggggggtgagggtggggaggtggggcagggcatggtccttggatcaacagcccgccagctgattggatgtctaggaatgactgaaagaaaccaaaacagcctgtccactgctgctgtgggatggaggaggcgtaagcagaaacactaacagtatattgacctcttagcagaaccgcttccattctggagatcacggctgctaaatccagcatccccacttcattttacccccagcatattgttctgtagtcttttcttgaaacatcttgattgcttttcctcggcagctttcaaaaaaccaaataataatagttatccgtcttctacttcatggaagattgttttggtgccctgaccctctgaagtgcccagttcctgccatctgaaacctcggcctgatctgatctcatgttggaatctgcctgtctttcacacagggctggtcttggtcctttacatgccagttttgcttgtgaattcttgcttttttcctctcatcagccttaagtttaggcgtttgttgttctccagtgatgtagacagttcccttcacaagtcacagttcttcccataaatgaggcccgctgacctctgcgggactttaaaaatctattcagatatttccgagtaagtggcttgtttaaattcttcctgtgtctttctttattccttaattggttggtggaaagaagagatgcttgggaaccttgggttcttaggtttggattctttaataatatctaaaaagctaaattttaaataccagctttacataaatgattgttgactctggtctgtttctgacacctttccagaaaaaagtcaattgttcaggtacaccaaagaggaagaagagctgtggaggccaccctctacaaagctttatagaacttctggatctaactcacaaacaagcttccagaagagactagagaccttaggccaggagatgaaggagttcagtagcaaagtcacacctgtccaattccctgagctttgctcactcagctaatgggatggcaaaggtggtggtgctttcatcttcaggcagaagcctctgcccatccccctcaagggctgcaggcccagttctcatgctgcccttgggtgggcatctgttaacagaggagaacgtctgggtggcggcagcagctttgctctgagtgcctacaaagctaatgcttggtgctagaaacatcatcattattaaacttcagaaaagcagcagccatgttcagtcaggctcatgctgcctcactgcttaagtgcctgcaggagccgcctgccaagctccccttcctacacctggcacactggggtctgcacaaggctttgtcaaccaaagacagcttcccccttttgattgcctgtagactttggagccaagaaacactctgtgtgactctacacacacttcaggtggtttgtgcttcaaagtcattgatgcaacttgaaaggaaacagtttaatggtggaaatgaactaccatttataacttctgtttttttattgagaaaatgattcacgaattccaaatcagattgccaggaagaaataggacgtgacggtactgggccctgtgattctcccagcccttgcagtccgctaggtgagaggaaaagctctttacttccgcccctggcagggacttctgggttatgggagaaaccagagatgggaatgaggaaaatatgaactacagcagaagcccctgggcagctgtgatggagcccctgacattactcttcttgcatctgtcctgccttctttccctctgcgaggcagtggggtgggattcagagtgcttagtctgctcactgggagaagaagagttcctgcgcatgcaagccctgctgtgtggctgtcgtttacatttgggaggtgtcctgtatgtctgtacgttggggactgcctgtatttggaagatttaaaaacctagcatcctgttctcaccctctaagctgcattgagaaatgactcgtctctgtatttgtattaagccttaacacttttcttaagtgcattcggtgccaacattttttagagctgtaccaaaacaaaaagcctgtactcacatcacaatgtcattttgataggagcgttttgttatttttacaaggcagaatggggtgtaacagttgaattaaacttagcaatcacgtgctcaga

SEQ ID NO: 452521 - DNA, 2984 bp, Homo sapiens
agcgggcgcggcgagctgagggtggcggcggtcgacatgttccaggtcccggatagcgagggcggccgcgccggctccagggccatgaagcccccaggaggagaatcgagcaatctttttggaagtccagaagaagctactccttccagcaggcctaataggatggcatctaatatttttggaccaacagaagaacctcagaacatacccaagaggacaaatcccccagggggtaaaggaagtggtatctttgacgaatcaacccccgtgcagactcgacagcacctgaacccacctggagggaagaccagcgacatttttgggtctccggtcactgccacttcacgcttggcacacccaaacaaacccaaggatcatgttttcttatgtgaaggagaagaaccaaaatcggatcttaaagctgcaaggagcatcccggctggagcagagccaggtgagaaaggcagcgccagaaaagcaggccccgccaaggagcaggagcccatgcccacagtcgacagccatgagccccggctggggccgcggcctcgctctcacaacaaggtcctgaacccaccgggaggcaaatccagcatctccttctactaagagaagccactgctccacccggagccagaccagaaactcaagagatagggtagccatgttttcatttccttttgcccaaatgagcggggtgggaagagggttagtcttatgtgagcctggctgctcagcgtctcctggccgtcatgacagctgcttggagacccgtgccttccagatggctgggagatgcctctgtggggatgaaatggggcacccctggccatcactcatgtgtagtccaggtttgagaggaactggaaggggggtgagggtggggaggtggggcagggcatggtccttggatcaacagcccgccagctgattggatgtctaggaatgactgaaagaaaccaaaacagcctgtccactgctgctgtgggatggaggaggcgtaagcagaaacactaacagtatattgacctcttagcagaaccgcttccattctggagatcacggctgctaaatccagcatccccacttcattttacccccagcatattgttctgtagtcttttcttgaaacatcttgattgcttttcctcggcagctttcaagccctgaccctctgaagtgcccagttcctgccatctgaaacctcggcctgatctgatctcatgttggaatctgcctgtctttcacacagggctggtcttggtcctttacatgccagttttgcttgtgaattcttgcttttttcctctcatcagccttaagtttaggcgtttgttgttctccagtgatgtagacagttcccttcacaagtcacagttcttcccataaatgaggcccgctgacctctgcgggactttaaaaatctattcagatatttccgagtaagtggcttgtttaaattcttcctgtgtctttctttattccttaattggttggtggaaagaagagatgcttgggaaccttgggttcttaggtttggattctttaataatatctaaaaagctaaattttaaataccagctttacataaatgattgttgactctggtctgtttctgacacctttccagaaaaaagtcaattgttcaggtacaccaaagaggaagaagagctgtggaggccaccctctacaaagctttatagaacttctggatctaactcacaaacaagcttccagaagagactagagaccttaggccaggagatgaaggagttcagtagcaaagtcacacctgtccaattccctgagctttgctcactcagctaatgggatggcaaaggtggtggtgctttcatcttcaggcagaagcctctgcccatccccctcaagggctgcaggcccagttctcatgctgcccttgggtgggcatctgttaacagaggagaacgtctgggtggcggcagcagctttgctctgagtgcctacaaagctaatgcttggtgctagaaacatcatcattattaaacttcagaaaagcagcagccatgttcagtcaggctcatgctgcctcactgcttaagtgcctgcaggagccgcctgccaagctccccttcctacacctggcacactggggtctgcacaaggctttgtcaaccaaagacagcttcccccttttgattgcctgtagactttggagccaagaaacactctgtgtgactctacacacacttcaggtggtttgtgcttcaaagtcattgatgcaacttgaaaggaaacagtttaatggtggaaatgaactaccatttataacttctgtttttttattgagaaaatgattcacgaattccaaatcagattgccaggaagaaataggacgtgacggtactgggccctgtgattctcccagcccttgcagtccgctaggtgagaggaaaagctctttacttccgcccctggcagggacttctgggttatgggagaaaccagagatgggaatgaggaaaatatgaactacagcagaagcccctgggcagctgtgatggagcccctgacattactcttcttgcatctgtcctgccttctttccctctgcgaggcagtggggtgggattcagagtgcttagtctgctcactgggagaagaagagttcctgcgcatgcaagccctgctgtgtggctgtcgtttacatttgggaggtgtcctgtatgtctgtacgttggggactgcctgtatttggaagatttaaaaacctagcatcctgttctcaccctctaagctgcattgagaaatgactcgtctctgtatttgtattaagccttaacacttttcttaagtgcattcggtgccaacattttttagagctgtaccaaaacaaaaagcctgtactcacatcacaatgtcattttgataggagcgttttgttatttttacaaggcagaatggggtgtaacagttgaattaaacttagcaatcacgtgctcaga

SEQ ID NO: 452522 - DNA, 1084 bp, Homo sapiens
agcgggcgcggcgagctgagggtggcggcggtcgacatgttccaggtcccggatagcgagggcggccgcgccggctccagggccatgaagcccccaggaggagaatcgagcaatctttttggaagtccagaagaagctactccttccagcaggcctaataggatggcatctaatatttttggaccaacagaagaacctcagaacatacccaagaggacaaatcccccagtggggtctgcacaaggctttgtcaaccaaagacagcttcccccttttgattgcctgtagactttggagccaagaaacactctgtgtgactctacacacacttcaggtggtttgtgcttcaaagtcattgatgcaacttgaaaggaaacagtttaatggtggaaatgaactaccatttataacttctgtttttttattgagaaaatgattcacgaattccaaatcagattgccaggaagaaataggacgtgacggtactgggccctgtgattctcccagcccttgcagtccgctaggtgagaggaaaagctctttacttccgcccctggcagggacttctgggttatgggagaaaccagagatgggaatgaggaaaatatgaactacagcagaagcccctgggcagctgtgatggagcccctgacattactcttcttgcatctgtcctgccttctttccctctgcgaggcagtggggtgggattcagagtgcttagtctgctcactgggagaagaagagttcctgcgcatgcaagccctgctgtgtggctgtcgtttacatttgggaggtgtcctgtatgtctgtacgttggggactgcctgtatttggaagatttaaaaacctagcatcctgttctcaccctctaagctgcattgagaaatgactcgtctctgtatttgtattaagccttaacacttttcttaagtgcattcggtgccaacattttttagagctgtaccaaaacaaaaagcctgtactcacatcacaatgtcattttgataggagcgttttgttatttttacaaggcagaatggggtgtaacagttgaattaaacttagcaatcacgtgctcaga

SEQ ID NO: 452523 - DNA, 2707 bp, Homo sapiens
ggcgcttccggtgcgacgctgtctctccatgccaggactgagttgtgggggagggaggcggttagcgggctttagcgccttttctggcggcggtagatttgaagcgcttcaaaggaccggacccagagaagaggaaaactctaccggtgcaggagcacagggatcagttgtccttgtttttttttggtcttttcttcatttgaagattaagtattggagccatgggaataaaggttcaacgtcctcgatgtttttttgacattgccattaacaatcaacctgctggaagagttgtctttgaattattttctgatgtgtgccccaaaacatgcgagaactttcgttgtctttgtacaggtgaaaaggggaccgggaaatcaactcagaaaccattacattataagagttgtctctttcacagagttgtcaaggattttatggttcaaggtggtgacttcagtgaaggaaatggacgaggaggggaatctatctatggaggattttttgaagacgagagtttcgctgttaaacacaacaaagaatttctcttgtcaatggccaacagagggaaggatacaaatggttcacagttcttcataacaacgaaaccaactcctcatttagatgggcatcatgttgtttttggacaagtaatctctggtcaagaagttgtaagagagattgaaaaccagaaaacagatgcagctagcaaaccgtttgcggaggtacggatactcagttgtggagagctgattcccaaatctaaagttaagaaagaagaaaagaaaaggcataaatcatcatcatcttcctcctcctcatctagtgactcagatagctcaagtgattctcagtcctcttctgattcctctgattccgaaagtgctactgaagagaaatcaaagaaaagaaaaaagaaacatcggaaaaattcccgaaaacacaagaaagaaaagaaaaagcgaaagaaaagcaagaagagtgcatctagtgagagtgaagctgaaaatcttgaagcacaaccccagtctactgtccgtccagaagagatccctcctatacctgaaaatagattcctaatgagaaaaagtcctcctaaagctgatgagaaggaaaggaaaaacagagagagagaaagggaaagagagtgtaatccacctaactcccagcctgcttcataccagagacgacttttagttactagatctggcaggaaaattaaaggaagaggaccaaggcgttatcgaactccttccagatccagatcaagggatcgtttcagacgtagtgagactcctccacattggaggcaagagatgcagagagctcaaagaatgagggtatcaagtggtgaaagatggatcaagggggataagagtgagttgaatgaaataaaagaaaatcagagaagtccagttagagtaaaagagagaaaaataacagatcacaggaatgtatctgagagtccaaacagaaaaaatgaaaaggagaagaaagttaaagaccataaatctaacagcaaagagagagacatcagaagaaattcagaaaaagatgacaagtataaaaacaaagtgaagaaaagggccaaatctaaaagtaggagtaagagcaaagagaaatcaaagagtaaagaaagagattcaaaacataatagaaatgaagaaaagaggatgaggtcaaggagtaaaggaagggatcatgaaaatgttaaagaaaaagaaaagcagtctgattctaaaggaaaagatcaggaaaggagtagaagtaaagagaagtctaaacagttagaatcaaagagtaatgagcatgatcacagtaaaagtaaggaaaaggatagacgcgcacaatccaggagtagagaatgtgatataactaaaggtaaacacagttataatagcagaacaagagaacgaagcagaagtagggacagaagcagaagagtgcgatcaagaacccatgacagagatcgcagcagaagcaaggagtaccatagatacagagaacaggaatacaggagaagaggacggtcacgaagccgagagagaagaacaccaccaggaagatcaagaagtaaagataggaggagaaggaggagagactcacggagctcagagagagaagaaagtcaaagcagaaacaaagacaaatacagaaaccaagagagtaagagctcacacagaaaagaaaattctgagagtgagaaaagaatgtactctaaaagtcgtgatcataatagctcaaataacagcagggaaaaaaaggctgatagagatcaaagtcccttctcaaaaataaaacaaagcagtcaggacaatgaattaaagtcctccatgttgaaaaataaggaggatgagaagatcagatcctcagtggaaaaagaaaaccaaaaatcaaaaggtcaagaaaatgaccatgtacatgaaaaaaataaaaaatttgatcatgaatcaagccctggaacagatgaagacaaaagcggatgagtgagttatataaacttacttccattctgtttcggattttaagtttgagagacttgctaatgaatctcctttatgttgttttccttttcattgtttttggattgttttatgtttgtccttttttttcttaatgtggatttcattgagttgattttttgataatctgcaatctggataatttgtactgctaaagttttaataaactcgacatgagaaaaaca

SEQ ID NO: 452524 - DNA, 3234 bp, Homo sapiens
gacattggtcattcaggttttatttatgacaacttcttagaacacacacatccaatctaggaacagaaatgtacaacatggggcttaaataactttcatacactatgtacagccatcggcagaggtacaaaacatatatacaccttgtgctagtcacatcatggaggacagcaggagcctaatgaagcctgcagcctgggcaggacatgattgctagaaaagagttggtgggcagggcagggccctgattcatctcaggggtcttctctgatcctcggctctttgtggaggagtttctatttcctacttccctgcaaggccctcaggacatggttcacaggactgaactagatgtgataggcgcttcaaaggaccggacccagagaagaggaaaactctaccggtgcaggagcacagggatcagttgtccttgtttttttttggtcttttcttcatttgaagattaagtattggagccatgggaataaaggttcaacgtcctcgatgtttttttgacattgccattaacaatcaacctgctggaagagttgtctttgaattattttctgatgtgtgccccaaaacatgcgagaactttcgttgtctttgtacaggtgaaaaggggaccgggaaatcaactcagaaaccattacattataagagttgtctctttcacagagttgtcaaggattttatggttcaaggtggtgacttcagtgaaggaaatggacgaggaggggaatctatctatggaggattttttgaagacgagagtttcgctgttaaacacaacaaagaatttctcttgtcaatggccaacagagggaaggatacaaatggttcacagttcttcataacaacgaaaccaactcctcatttagatgggcatcatgttgtttttggacaagtaatctctggtcaagaagttgtaagagagattgaaaaccagaaaacagatgcagctagcaaaccgtttgcggaggtacggatactcagttgtggagagctgattcccaaatctaaagttaagaaagaagaaaagaaaaggcataaatcatcatcatcttcctcctcctcatctagtgactcagatagctcaagtgattctcagtcctcttctgattcctctgattccgaaagtgctactgaagagaaatcaaagaaaagaaaaaagaaacatcggaaaaattcccgaaaacacaagaaagaaaagaaaaagcgaaagaaaagcaagaagagtgcatctagtgagagtgaagctgaaaatcttgaagcacaaccccagtctactgtccgtccagaagagatccctcctatacctgaaaatagattcctaatgagaaaaagtcctcctaaagctgatgagaaggaaaggaaaaacagagagagagaaagggaaagagagtgtaatccacctaactcccagcctgcttcataccagagacgacttttagttactagatctggcaggaaaattaaaggaagaggaccaaggcgttatcgaactccttccagatccagatcaagggatcgtttcagacgtagtgagactcctccacattggaggcaagagatgcagagagctcaaagaatgagggtatcaagtggtgaaagatggatcaagggggataagagtgagttgaatgaaataaaagaaaatcagagaagtccagttagagtaaaagagagaaaaataacagatcacaggaatgtatctgagagtccaaacagaaaaaatgaaaaggagaagaaagttaaagaccataaatctaacagcaaagagagagacatcagaagaaattcagaaaaagatgacaagtataaaaacaaagtgaagaaaagggccaaatctaaaagtaggagtaagagcaaagagaaatcaaagagtaaagaaagagattcaaaacataatagaaatgaagaaaagaggatgaggtcaaggagtaaaggaagggatcatgaaaatgttaaagaaaaagaaaagcagtctgattctaaaggaaaagatcaggaaaggagtagaagtaaagagaagtctaaacagttagaatcaaagagtaatgagcatgatcacagtaaaagtaaggaaaaggatagacgcgcacaatccaggagtagagaatgtgatataactaaaggtaaacacagttataatagcagaacaagagaacgaagcagaagtagggacagaagcagaagagtgcgatcaagaacccatgacagagatcgcagcagaagcaaggagtaccatagatacagagaacaggaatacaggagaagaggacggtcacgaagccgagagagaagaacaccaccaggaagatcaagaagtaaagataggaggagaaggaggagagactcacggagctcagagagagaagaaagtcaaagcagaaacaaagacaaatacagaaaccaagagagtaagagctcacacagaaaagaaaattctgagagtgagaaaagaatgtactctaaaagtcgtgatcataatagctcaaataacagcagggaaaaaaaggctgatagagatcaaagtcccttctcaaaaataaaacaaagcagtcaggacaatgaattaaagtcctccatgttgaaaaataaggaggatgagaagatcagatcctcagtggaaaaagaaaaccaaaaatcaaaaggtcaagaaaatgaccatgtacatgaaaaaaataaaaaatttgatcatgaatcaagccctggaacagatgaagacaaaagcggatgagtgagttatataaacttacttccattctgtttcggattttaagtttgagagacttgctaatgaatctcctttatgttgttttccttttcattgtttttggattgttttatgtttgtccttttttttcttaatgtggatttcattgagttgattttttgataatctgcaatctggataatttgtactgctaaagttttaataaactcgacatgagaaaaacaaaaatgacaaacacacaaaaaaaaacatttttggggggcacatcaccctcgaaaagagttttgtgaacccattttgtgtggggccgcggccccaatagtgtagtgacagagttggccaagaggggtacaagagaagaatcgtggcatgactagtgtgggattctcacccattaaaaagccgcgcggaaccggatgtttaggaaaaacatccgaggtggattcggaggcaacagggattcatcacgggggtcagaggaaccctattaaatc

SEQ ID NO: 452525 - DNA, 2807 bp, Homo sapiens
aggaagtccctgaggaccgcagcagtgcctttgccgctgttgcagaaggagaaggcttgcagtcgagccccggggcctggggacggtccttcctctgccagcccccgccctccccactcaggcgcacacctccctcactgacgcattttgccgcacaagctgtaacatggcggcagcgactgcggcctgaactctagggagccgggttgatttttaaagcttcaaaatcctaagactcagcactgttgcggggagcacagggatcagttgtccttgtttttttttggtcttttcttcatttgaagattaagtattggagccatgggaataaaggttcaacgtcctcgatgtttttttgacattgccattaacaatcaacctgctggaagagttgtctttgaattattttctgatgtgtgccccaaaacatgcgagaactttcgttgtctttgtacaggtgaaaaggggaccgggaaatcaactcagaaaccattacattataagagttgtctctttcacagagttgtcaaggattttatggttcaaggtggtgacttcagtgaaggaaatggacgaggaggggaatctatctatggaggattttttgaagacgagagtttcgctgttaaacacaacaaagaatttctcttgtcaatggccaacagagggaaggatacaaatggttcacagttcttcataacaacgaaaccaactcctcatttagatgggcatcatgttgtttttggacaagtaatctctggtcaagaagttgtaagagagattgaaaaccagaaaacagatgcagctagcaaaccgtttgcggaggtacggatactcagttgtggagagctgattcccaaatctaaagttaagaaagaagaaaagaaaaggcataaatcatcatcatcttcctcctcctcatctagtgactcagatagctcaagtgattctcagtcctcttctgattcctctgattccgaaagtgctactgaagagaaatcaaagaaaagaaaaaagaaacatcggaaaaattcccgaaaacacaagaaagaaaagaaaaagcgaaagaaaagcaagaagagtgcatctagtgagagtgaagctgaaaatcttgaagcacaaccccagtctactgtccgtccagaagagatccctcctatacctgaaaatagattcctaatgagaaaaagtcctcctaaagctgatgagaaggaaaggaaaaacagagagagagaaagggaaagagagtgtaatccacctaactcccagcctgcttcataccagagacgacttttagttactagatctggcaggaaaattaaaggaagaggaccaaggcgttatcgaactccttccagatccagatcaagggatcgtttcagacgtagtgagactcctccacattggaggcaagagatgcagagagctcaaagaatgagggtatcaagtggtgaaagatggatcaagggggataagagtgagttgaatgaaataaaagaaaatcagagaagtccagttagagtaaaagagagaaaaataacagatcacaggaatgtatctgagagtccaaacagaaaaaatgaaaaggagaagaaagttaaagaccataaatctaacagcaaagagagagacatcagaagaaattcagaaaaagatgacaagtataaaaacaaagtgaagaaaagggccaaatctaaaagtaggagtaagagcaaagagaaatcaaagagtaaagaaagagattcaaaacataatagaaatgaagaaaagaggatgaggtcaaggagtaaaggaagggatcatgaaaatgttaaagaaaaagaaaagcagtctgattctaaaggaaaagatcaggaaaggagtagaagtaaagagaagtctaaacagttagaatcaaagagtaatgagcatgatcacagtaaaagtaaggaaaaggatagacgcgcacaatccaggagtagagaatgtgatataactaaaggtaaacacagttataatagcagaacaagagaacgaagcagaagtagggacagaagcagaagagtgcgatcaagaacccatgacagagatcgcagcagaagcaaggagtaccatagatacagagaacaggaatacaggagaagaggacggtcacgaagccgagagagaagaacaccaccaggaagatcaagaagtaaagataggaggagaaggaggagagactcacggagctcagagagagaagaaagtcaaagcagaaacaaagacaaatacagaaaccaagagagtaagagctcacacagaaaagaaaattctgagagtgagaaaagaatgtactctaaaagtcgtgatcataatagctcaaataacagcagggaaaaaaaggctgatagagatcaaagtcccttctcaaaaataaaacaaagcagtcaggacaatgaattaaagtcctccatgttgaaaaataaggaggatgagaagatcagatcctcagtggaaaaagaaaaccaaaaatcaaaaggtcaagaaaatgaccatgtacatgaaaaaaataaaaaatttgatcatgaatcaagccctggaacagatgaagacaaaagcggatgagtgagttatataaacttacttccattctgtttcggattttaagtttgagagacttgctaatgaatctcctttatgttgttttccttttcattgtttttggattgttttatgtttgtccttttttttcttaatgtggatttcattgagttgattttttgataatctgcaatctggataatttgtactgctaaagttttaataaactcgacatgagaaaaaca

SEQ ID NO: 452526 - DNA, 2654 bp, Homo sapiens
ggcgcttccggtgcgacgctgtctctccatgccaggactgagttgtgggggagggaggcggttagcgggctttagcgccttttctggcggcggtagatttgaagcgcttcaaaggaccggacccagagaagaggaaaactctaccggtgcaggagcacagggatcagttgtccttgtttttttttggtcttttcttcatttgaagattaagtattggagccatgggaataaaggttcaacgtcctcgatgtttttttgacattgccattaacaatcaacctgctggaagagttgtctttgaattattttctgatgtgtgccccaaaacatgcgagaactttcgttgtctttgtacaggtgaaaaggggaccgggaaatcaactcagaaaccattacattataagagttgtctctttcacagagttgtcaaggattttatggttcaaggtggtgacttcagtgaaggaaatggacgaggaggggaatctatctatggaggattttttgaagacgagagtttcgctgttaaacacaacaaagaatttctcttgtcaatggccaacagagggaaggatacaaatggttcacagttcttcataacaacgaaaccaactcctcatttagatgggcatcatgttgtttttggacaagtaatctctggtcaagaagttgtaagagagattgaaaaccagaaaacagatgcagctagcaaaccgtttgcggaggtacggatactcagttgtggagagctgattcccaaatctaaagttaagaaagaagaaaagaaaaggcataaatcatcatcatcttcctcctcctcatctagtgactcagatagctcaagtgattctcagtcctcttctgattcctctgattccgaaagtgctactgaagagaaatcaaagaaaagaaaaaagaaacatcggaaaaattcccgaaaacacaagaaagaaaagaaaaagcgaaagaaaagcaagaagagtgcatctagtgagagtgaagctgaaaatcttgaagcacaaccccagtctactgtccgtccagaagagatccctcctatacctgaaaatagattcctaatgagaaaaagtcctcctaaagctgatgagaaggaaaggaaaaacagagagagagaaagggaaagagagtgtaatccacctaactcccagcctgcttcataccagagacgacttttagttactagatctggcaggaaaattaaaggaagaggaccaaggcgttatcgaactccttccagatccagatcaagggatcgtttcagacgtagtgagactcctccacattggaggcaagagatgcagagagctcaaagaatgagggtatcaagtggtgaaagatggatcaagggggataagagtgagttgaatgaaataaaagaaaatcagagaagtccagttagagtaaaagagagaaaaataacagatcacaggaatgtatctgagagtccaaacagaaaaaatgaaaaggagaagaaagttaaagaccataaatctaacagcaaagagagagacatcagaagaaattcagaaaaagatgacaagtataaaaacaaagtgaagaaaagggccaaatctaaaagtaggagtaagagcaaagagaaatcaaagagtaaagaaagagattcaaaacataatagaaatgaagaaaagaggatgaggtcaaggagtaaaggaagggatcatgaaaatgttaaagaaaaagaaaagcagtctgattctaaaggaaaagatcaggaaaggagtagaagtaaagagaagtctaaacagttagaatcaaagagtaatgagcatgatcacagtaaaagtaaggaaacacagttataatagcagaacaagagaacgaagcagaagtagggacagaagcagaagagtgcgatcaagaacccatgacagagatcgcagcagaagcaaggagtaccatagatacagagaacaggaatacaggagaagaggacggtcacgaagccgagagagaagaacaccaccaggaagatcaagaagtaaagataggaggagaaggaggagagactcacggagctcagagagagaagaaagtcaaagcagaaacaaagacaaatacagaaaccaagagagtaagagctcacacagaaaagaaaattctgagagtgagaaaagaatgtactctaaaagtcgtgatcataatagctcaaataacagcagggaaaaaaaggctgatagagatcaaagtcccttctcaaaaataaaacaaagcagtcaggacaatgaattaaagtcctccatgttgaaaaataaggaggatgagaagatcagatcctcagtggaaaaagaaaaccaaaaatcaaaaggtcaagaaaatgaccatgtacatgaaaaaaataaaaaatttgatcatgaatcaagccctggaacagatgaagacaaaagcggatgagtgagttatataaacttacttccattctgtttcggattttaagtttgagagacttgctaatgaatctcctttatgttgttttccttttcattgtttttggattgttttatgtttgtccttttttttcttaatgtggatttcattgagttgattttttgataatctgcaatctggataatttgtactgctaaagttttaataaactcgacatgagaaaaaca

SEQ ID NO: 452527 - DNA, 2463 bp, Homo sapiens
ggcgcttccggtgcgacgctgtctctccatgccaggactgagttgtgggggagggaggcggttagcgggctttagcgccttttctggcggcggtagatttgaagcgcttcaaaggaccggacccagagaagaggaaaactctaccggtgcaggagcacagggatcagttgtccttgtttttttttggtcttttcttcatttgaagattaagtattggagccatgggaataaaggttcaacgtcctcgatgtttttttgacattgccattaacaatcaacctgctggaagagttgtctttgaattattttctgatgtgtgccccaaaacatgcgagaactttcgttgtctttgtacaggtgaaaaggggaccgggaaatcaactcagaaaccattacattataagagttgtctctttcacagagttgtcaaggattttatggttcaaggtggtgacttcagtgaaggaaatggacgaggaggggaatctatctatggaggattttttgaagacgagagtttcgctgttaaacacaacaaagaatttctcttgtcaatggccaacagagggaaggatacaaatggttcacagttcttcataacaacgaaaccaactcctcatttagatgggcatcatgttgtttttggacaagtaatctctggtcaagaagttgtaagagagattgaaaaccagaaaacagatgcagctagcaaaccgtttgcggaggtacggatactcagttgtggagagctgattcccaaatctaaagttaagaaagaagaaaagaaaaggcataaatcatcatcatcttcctcctcctcatctagtgactcagatagctcaagtgattctcagtcctcttctgattcctctgattccgaaagtgctactgaagagaaatcaaagaaaagaaaaaagaaacatcggaaaaattcccgaaaacacaagaaagaaaagaaaaagcgaaagaaaagcaagaagagtgcatctagtgagagtgaagctgaaaatcttgaagcacaaccccagtctactgtccgtccagaagagatccctcctatacctgaaaatagattcctaatgagaaaaagtcctcctaaagctgatgagaaggaaaggaaaaacagagagagagaaagggaaagagagtgtaatccacctaactcccagcctgcttcataccagagacgacttttagttactagatctggcaggaaaattaaaggaagaggaccaaggcgttatcgaactccttccagatccagatcaagggatcgtttcagacgtagtgagactcctccacattggaggcaagagatgcagagagctcaaagaatgagggtatcaagtggtgaaagatggatcaagggggataagagtgagttgaatgaaataaaagaaaatcagagaagtccagttagagtaaaagagagaaaaataacagatcacaggaatgtatctgagagtccaaacagaaaaaatgaaaaggagaagaaagttaaagaccataaatctaacagcaaagagagagacatcagaagaaattcagaaaaagatgacaagtataaaaacaaagtgaagaaaagggccaaatctaaaagtaggagtaagagcaaagagaaatcaaagagtaaagaaagagattcaaaacataatagaaatgaagaaaagaggatgaggtcaaggagtaaaggaagggatcatgaaaatgttaaagaaaaagaaaagcagtctgattctaaaggaaaagatcaggaaaggagtagaagtaaagagaagtaggacggtcacgaagccgagagagaagaacaccaccaggaagatcaagaagtaaagataggaggagaaggaggagagactcacggagctcagagagagaagaaagtcaaagcagaaacaaagacaaatacagaaaccaagagagtaagagctcacacagaaaagaaaattctgagagtgagaaaagaatgtactctaaaagtcgtgatcataatagctcaaataacagcagggaaaaaaaggctgatagagatcaaagtcccttctcaaaaataaaacaaagcagtcaggacaatgaattaaagtcctccatgttgaaaaataaggaggatgagaagatcagatcctcagtggaaaaagaaaaccaaaaatcaaaaggtcaagaaaatgaccatgtacatgaaaaaaataaaaaatttgatcatgaatcaagccctggaacagatgaagacaaaagcggatgagtgagttatataaacttacttccattctgtttcggattttaagtttgagagacttgctaatgaatctcctttatgttgttttccttttcattgtttttggattgttttatgtttgtccttttttttcttaatgtggatttcattgagttgattttttgataatctgcaatctggataatttgtactgctaaagttttaataaactcgacatgagaaaaaca

SEQ ID NO: 452528 - DNA, 2749 bp, Homo sapiens
aggaagtccctgaggaccgcagcagtgcctttgccgctgttgcagaaggagaaggcttgcagtcgagccccggggcctggggacggtccttcctctgccagcccccgccctccccactcaggcgcacacctccctcactgacgcattttgccgcacaagctgtaacatggcggcagcgactgcggcctgaactctagggagccgggttgatttttaaagcttcaaaatcctaagactcagcactgttgcggggagcacagggatcagttgtccttgtttttttttggtcttttcttcatttgaagattaagtattggagccatgggaataaaggttcaacgtcctcgatgtttttttgacattgccattaacaatcaacctgctggaagagttgtctttgaattattttctgatgtgtgccccaaaacatgcgagaactttcgttgtctttgtacagtcacagagttgtcaaggattttatggttcaaggtggtgacttcagtgaaggaaatggacgaggaggggaatctatctatggaggattttttgaagacgagagtttcgctgttaaacacaacaaagaatttctcttgtcaatggccaacagagggaaggatacaaatggttcacagttcttcataacaacgaaaccaactcctcatttagatgggcatcatgttgtttttggacaagtaatctctggtcaagaagttgtaagagagattgaaaaccagaaaacagatgcagctagcaaaccgtttgcggaggtacggatactcagttgtggagagctgattcccaaatctaaagttaagaaagaagaaaagaaaaggcataaatcatcatcatcttcctcctcctcatctagtgactcagatagctcaagtgattctcagtcctcttctgattcctctgattccgaaagtgctactgaagagaaatcaaagaaaagaaaaaagaaacatcggaaaaattcccgaaaacacaagaaagaaaagaaaaagcgaaagaaaagcaagaagagtgcatctagtgagagtgaagctgaaaatcttgaagcacaaccccagtctactgtccgtccagaagagatccctcctatacctgaaaatagattcctaatgagaaaaagtcctcctaaagctgatgagaaggaaaggaaaaacagagagagagaaagggaaagagagtgtaatccacctaactcccagcctgcttcataccagagacgacttttagttactagatctggcaggaaaattaaaggaagaggaccaaggcgttatcgaactccttccagatccagatcaagggatcgtttcagacgtagtgagactcctccacattggaggcaagagatgcagagagctcaaagaatgagggtatcaagtggtgaaagatggatcaagggggataagagtgagttgaatgaaataaaagaaaatcagagaagtccagttagagtaaaagagagaaaaataacagatcacaggaatgtatctgagagtccaaacagaaaaaatgaaaaggagaagaaagttaaagaccataaatctaacagcaaagagagagacatcagaagaaattcagaaaaagatgacaagtataaaaacaaagtgaagaaaagggccaaatctaaaagtaggagtaagagcaaagagaaatcaaagagtaaagaaagagattcaaaacataatagaaatgaagaaaagaggatgaggtcaaggagtaaaggaagggatcatgaaaatgttaaagaaaaagaaaagcagtctgattctaaaggaaaagatcaggaaaggagtagaagtaaagagaagtctaaacagttagaatcaaagagtaatgagcatgatcacagtaaaagtaaggaaaaggatagacgcgcacaatccaggagtagagaatgtgatataactaaaggtaaacacagttataatagcagaacaagagaacgaagcagaagtagggacagaagcagaagagtgcgatcaagaacccatgacagagatcgcagcagaagcaaggagtaccatagatacagagaacaggaatacaggagaagaggacggtcacgaagccgagagagaagaacaccaccaggaagatcaagaagtaaagataggaggagaaggaggagagactcacggagctcagagagagaagaaagtcaaagcagaaacaaagacaaatacagaaaccaagagagtaagagctcacacagaaaagaaaattctgagagtgagaaaagaatgtactctaaaagtcgtgatcataatagctcaaataacagcagggaaaaaaaggctgatagagatcaaagtcccttctcaaaaataaaacaaagcagtcaggacaatgaattaaagtcctccatgttgaaaaataaggaggatgagaagatcagatcctcagtggaaaaagaaaaccaaaaatcaaaaggtcaagaaaatgaccatgtacatgaaaaaaataaaaaatttgatcatgaatcaagccctggaacagatgaagacaaaagcggatgagtgagttatataaacttacttccattctgtttcggattttaagtttgagagacttgctaatgaatctcctttatgttgttttccttttcattgtttttggattgttttatgtttgtccttttttttcttaatgtggatttcattgagttgattttttgataatctgcaatctggataatttgtactgctaaagttttaataaactcgacatgagaaaaaca

SEQ ID NO: 452529 - DNA, 2118 bp, Homo sapiens
tcaacgctttatacttccgaacaactcctctttagatgggcatcatgttgtttttggacaagtaatctctggtcaagaagttgtaagagagattgaaaaccagaaaacagatgcagctagcaaaccgtttgcggaggtacggatactcagttgtggagagctgattcccaaatctaaagttaagaaagaagaaaagaaaaggcataaatcatcatcatcttcctcctcctcatctagtgactcagatagctcaagtgattctcagtcctcttctgattcctctgattccgaaagtgctactgaagagaaatcaaagaaaagaaaaaagaaacatcggaaaaattcccgaaaacacaagaaagaaaagaaaaagcgaaagaaaagcaagaagagtgcatctagtgagagtgaagctgaaaatcttgaagcacaaccccagtctactgtccgtccagaagagatccctcctatacctgaaaatagattcctaatgagaaaaagtcctcctaaagctgatgagaaggaaaggaaaaacagagagagagaaagggaaagagagtgtaatccacctaactcccagcctgcttcataccagagacgacttttagttactagatctggcaggaaaattaaaggaagaggaccaaggcgttatcgaactccttccagatccagatcaagggatcgtttcagacgtagtgagactcctccacattggaggcaagagatgcagagagctcaaagaatgagggtatcaagtggtgaaagatggatcaagggggataagagtgagttgaatgaaataaaagaaaatcagagaagtccagttagagtaaaagagagaaaaataacagatcacaggaatgtatctgagagtccaaacagaaaaaatgaaaaggagaagaaagttaaagaccataaatctaacagcaaagagagagacatcagaagaaattcagaaaaagatgacaagtataaaaacaaagtgaagaaaagggccaaatctaaaagtaggagtaagagcaaagagaaatcaaagagtaaagaaagagattcaaaacataatagaaatgaagaaaagaggatgaggtcaaggagtaaaggaagggatcatgaaaatgttaaagaaaaagaaaagcagtctgattctaaaggaaaagatcaggaaaggagtagaagtaaagagaagtctaaacagttagaatcaaagagtaatgagcatgatcacagtaaaagtaaggaaaaggatagacgcgcacaatccaggagtagagaatgtgatataactaaaggtaaacacagttataatagcagaacaagagaacgaagcagaagtagggacagaagcagaagagtgcgatcaagaacccatgacagagatcgcagcagaagcaaggagtaccatagatacagagaacaggaatacaggagaagaggacggtcacgaagccgagagagaagaacaccaccaggaagatcaagaagtaaagataggaggagaaggaggagagactcacggagctcagagagagaagaaagtcaaagcagaaacaaagacaaatacagaaaccaagagagtaagagctcacacagaaaagaaaattctgagagtgagaaaagaatgtactctaaaagtcgtgatcataatagctcaaataacagcagggaaaaaaaggctgatagagatcaaagtcccttctcaaaaataaaacaaagcagtcaggacaatgaattaaagtcctccatgttgaaaaataaggaggatgagaagatcagatcctcagtggaaaaagaaaaccaaaaatcaaaaggtcaagaaaatgaccatgtacatgaaaaaaataaaaaatttgatcatgaatcaagccctggaacagatgaagacaaaagcggatgagtgagttatataaacttacttccattctgtttcggattttaagtttgagagacttgctaatgaatctcctttatgttgttttccttttcattgtttttggattgttttatgtttgtccttttttttcttaatgtggatttcattgagttgattttttgataatctgcaatctggataatttgtactgctaaagttttaataaactcgacatgagaaaaaca

SEQ ID NO: 452530 - DNA, 2559 bp, Homo sapiens
taccctttttaaagttactgcttccttaactgaaataaaatttcaatttaaaatgactttttgtagagtccccaaaacattctattcatcatgggcaattgacttccctctgttatgagtctcctcttgagctaaatttcttaattattagaagactgcttgggcactgaaatataagcccatgccagtgaaatccatttcttatctctccatgttgctgtaaagcagtttttctgttatttccctgcactagttctgccaatcttgataataagagggaaagtggaaaactacaagattagaacatgggactcttcattgttattctgtgcttttaaaaaaaattcttattcagatgtttgttaacattagtttagcattttagactcacctattttttaaagttctttggattaatagataaaactttgaccagtgaattctggagatctggactctaatcctgagtcttgactcctttcctgtacttcccagttcacatagctggatgatctaagtgctaaatactgaacttagtgagaatctgcagaaaatttaaatctccttccacaaagtttgtctaaaaattgttgatcaaaacctttttgtttttattaaagttaagaaagaagaaaagaaaaggcataaatcatcatcatcttcctcctcctcatctagtgactcagatagctcaagtgattctcagtcctcttctgattcctctgattccgaaagtgctactgaagagaaatcaaagaaaagaaaaaagaaacatcggaaaaattcccgaaaacacaagaaagaaaagaaaaagcgaaagaaaagcaagaagagtgcatctagtgagagtgaagctgaaaatcttgaagcacaaccccagtctactgtccgtccagaagagatccctcctatacctgaaaatagattcctaatgagaaaaagtcctcctaaagctgatgagaaggaaaggaaaaacagagagagagaaagggaaagagagtgtaatccacctaactcccagcctgcttcataccagagacgacttttagttactagatctggcaggaaaattaaaggaagaggaccaaggcgttatcgaactccttccagatccagatcaagggatcgtttcagacgtagtgagactcctccacattggaggcaagagatgcagagagctcaaagaatgagggtatcaagtggtgaaagatggatcaagggggataagagtgagttgaatgaaataaaagaaaatcagagaagtccagttagagtaaaagagagaaaaataacagatcacaggaatgtatctgagagtccaaacagaaaaaatgaaaaggagaagaaagttaaagaccataaatctaacagcaaagagagagacatcagaagaaattcagaaaaagatgacaagtataaaaacaaagtgaagaaaagggccaaatctaaaagtaggagtaagagcaaagagaaatcaaagagtaaagaaagagattcaaaacataatagaaatgaagaaaagaggatgaggtcaaggagtaaaggaagggatcatgaaaatgttaaagaaaaagaaaagcagtctgattctaaaggaaaagatcaggaaaggagtagaagtaaagagaagtctaaacagttagaatcaaagagtaatgagcatgatcacagtaaaagtaaggaaaaggatagacgcgcacaatccaggagtagagaatgtgatataactaaaggtaaacacagttataatagcagaacaagagaacgaagcagaagtagggacagaagcagaagagtgcgatcaagaacccatgacagagatcgcagcagaagcaaggagtaccatagatacagagaacaggaatacaggagaagaggacggtcacgaagccgagagagaagaacaccaccaggaagatcaagaagtaaagataggaggagaaggaggagagactcacggagctcagagagagaagaaagtcaaagcagaaacaaagacaaatacagaaaccaagagagtaagagctcacacagaaaagaaaattctgagagtgagaaaagaatgtactctaaaagtcgtgatcataatagctcaaataacagcagggaaaaaaaggctgatagagatcaaagtcccttctcaaaaataaaacaaagcagtcaggacaatgaattaaagtcctccatgttgaaaaataaggaggatgagaagatcagatcctcagtggaaaaagaaaaccaaaaatcaaaaggtcaagaaaatgaccatgtacatgaaaaaaataaaaaatttgatcatgaatcaagccctggaacagatgaagacaaaagcggatgagtgagttatataaacttacttccattctgtttcggattttaagtttgagagacttgctaatgaatctcctttatgttgttttccttttcattgtttttggattgttttatgtttgtccttttttttcttaatgtggatttcattgagttgattttttgataatctgcaatctggataatttgtactgctaaagttttaataaactcgacatgagaaaaaca

SEQ ID NO: 452531 - DNA, 1201 bp, Homo sapiens
ggcgcttccggtgcgacgctgtctctccatgccaggactgagttgtgggggagggaggcggttagcgggctttagcgccttttctggcggcggtagatttgaagcgcttcaaaggaccggacccagagaagaggaaaactctaccggtgcaggagcacagggatcagttgtccttgtttttttttggtcttttcttcatttgaagattaagtattggagccatgggaataaaggttcaacgtcctcgatgtttttttgacattgccattaacaatcaacctgctggaagagttgtctttgaattattttctgatgtgtgccccaaaacatgcgagaactttcgttgtctttgtacaggtgaaaaggggaccgggaaatcaactcagaaaccattacattataagagttgtctctttcacagagttgtcaaggattttatggttcaaggtggtgacttcagtgaaggaaatggacgaggaggggaatctatctatggaggattttttgaagacgagagtttcgctgttaaacacaacaaagaatttctcttgtcaatggccaacagagggaaggatacaaatggttcacagttcttcataacaacgaaaccaactcctcatttagatgggcatcatgttgtttttggacaagtaatctctggtcaagaagttgtaagagagattgaaaaccagaaaacagatgcagctagcaaaccgtttgcggaggtacggatactcagttgtggagagctgattcccaaatctaaagttaagaaagaagaaaagaaaaggcataaatcatcatcatcttcctcctcctcatctagtgactcagatagctcaagtgattctcagtcctcttctgattcctctgattccgaaagtgctactgaagagaaatcaaagaaaagaaaaaagaaacatcggaaaaattcccgaaaacacaagaaagaaaagaaaaagcgaaagaaaagcaagaagagtgcatctagtgagagtgaagctgaaaatcttgaagcacaaccccagtctactgtccgtccagaagagatccctcctatacctgaaaatagattcctaatgagaaaaagtcctcctaaagctgatgagaaggaaaggaaaaacagagagagagaaagggaaagagagtgatacattactcagctgtgaaattacaatacacggagccgttccactagggc

SEQ ID NO: 452532 - DNA, 1452 bp, Homo sapiens
agttcgacggagaaactctccacagaacatctgtgttgttaactaagctttccaacaggtataaaaatcatctcaaagaatgagggtatcaagtggtgaaagatggatcaagggggataagagtgagttgaatgaaataaaagaaaatcagagaagtccagttagagtaaaagagagaaaaataacagatcacaggaatgtatctgagagtccaaacagaaaaaatgaaaaggagaagaaagttaaagaccataaatctaacagcaaagagagagacatcagaagaaattcagaaaaagatgacaagtataaaaacaaagtgaagaaaagggccaaatctaaaagtaggagtaagagcaaagagaaatcaaagagtaaagaaagagattcaaaacataatagaaatgaagaaaagaggatgaggtcaaggagtaaaggaagggatcatgaaaatgttaaagaaaaagaaaagcagtctgattctaaaggaaaagatcaggaaaggagtagaagtaaagagaagtctaaacagttagaatcaaagagtaatgagcatgatcacagtaaaagtaaggaaaaggatagacgcgcacaatccaggagtagagaatgtgatataactaaaggtaaacacagttataatagcagaacaagagaacgaagcagaagtagggacagaagcagaagagtgcgatcaagaacccatgacagagatcgcagcagaagcaaggagtaccatagatacagagaacaggaatacaggagaagaggacggtcacgaagccgagagagaagaacaccaccaggaagatcaagaagtaaagataggaggagaaggaggagagactcacggagctcagagagagaagaaagtcaaagcagaaacaaagacaaatacagaaaccaagagagtaagagctcacacagaaaagaaaattctgagagtgagaaaagaatgtactctaaaagtcgtgatcataatagctcaaataacagcagggaaaaaaaggctgatagagatcaaagtcccttctcaaaaataaaacaaagcagtcaggacaatgaattaaagtcctccatgttgaaaaataaggaggatgagaagatcagatcctcagtggaaaaagaaaaccaaaaatcaaaaggtcaagaaaatgaccatgtacatgaaaaaaataaaaaatttgatcatgaatcaagccctggaacagatgaagacaaaagcggatgagtgagttatataaacttacttccattctgtttcggattttaagtttgagagacttgctaatgaatctcctttatgttgttttccttttcattgtttttggattgttttatgtttgtccttttttttcttaatgtggatttcattgagttgattttttgataatctgcaatctggataatttgtactgctaaagttttaataaactcgacatgagaaaaaca

SEQ ID NO: 452533 - DNA, 290 bp, Homo sapiens
atatcattttagctaataatatctacagttcttttcctaataacatttccccaattctttttcttattttttaggagtgagttgaatgaaataaaagaaaatcagagaagtccagttagagtaaaagagagaaaaataacagatcacaggaatgtatctgagagtccaaacagaaaaaatgaaaaggagaagaaagttaaagaccataaatctaacagcaaagagagagacatcagaagaaattcagaaaaagatgacaagtataaaaacaaagtgaagaaaagggccaa

SEQ ID NO: 452534 - DNA, 597 bp, Homo sapiens
ggcgggcggatcacgatgtcaggaaattgagaccatcctggctaacacggtgaaatgccgtctctactaaaaatacaaaaattagctgggcgtggtgatgggcgcctgtagtcccagctactcaggaggctgaggcaggagaatggcgtgaacccaggaggtggagcttaacagtgagccgagattgggccactgcactccagcctgggcaacagagcgagactccatctcaaaaaaaaagatgagaggggaaattgattcatatttgattctcttctttcataacctaactttattatctaagtaagttgtgtgtggcactaaataatacatcagatatgaatagaagtgaagatgaaatttttttggaggttatatctataatgtaactgaaaactttacttctctatagacgagagtttcgctgttaaacacaacaaagaatttctcttgtcaatggccaacagagggaaggatacaaatggttcacagttcttcatgtaagtatttattatctgatgatttaaaacatcccatttttgggccgggcacggtggctcatgcctgtaatcccaggactttgggaggctgaggcgg

SEQ ID NO: 452535 - DNA, 2964 bp, Homo sapiens
gacattggtcattcaggttttatttatgacaacttcttagaacacacacatccaatctaggaacagaaatgtacaacatggggcttaaataactttcatacactatgtacagccatcggcagaggtacaaaacatatatacaccttgtgctagtcacatcatggaggacagcaggagcctaatgaagcctgcagcctgggcaggacatgattgctagaaaagagttggtgggcagggcagggccctgattcatctcaggggtcttctctgatcctcggctctttgtggaggagtttctatttcctacttccctgcaaggccctcaggacatggttcacaggactgaactagatgtgataggcgcttcaaaggaccggacccagagaagaggaaaactctaccggtgcaggagcacagggatcagttgtccttgtttttttttggtcttttcttcatttgaagattaagtattggagccatgggaataaaggttcaacgtcctcgatgtttttttgacattgccattaacaatcaacctgctggaagagttgtctttgaattattttctgatgtgtgccccaaaacatgcgagaactttcgttgtctttgtacaggtgaaaaggggaccgggaaatcaactcagaaaccattacattataagagttgtctctttcacagagttgtcaaggattttatggttcaaggtggtgacttcagtgaaggaaatggacgaggaggggaatctatctatggaggattttttgaagacgagagtttcgctgttaaacacaacaaagaatttctcttgtcaatggccaacagagggaaggatacaaatggttcacagttcttcataacaacgaaaccaactcctcatttagatgggcatcatgttgtttttggacaagtaatctctggtcaagaagttgtaagagagattgaaaaccagaaaacagatgcagctagcaaaccgtttgcggaggtacggatactcagttgtggagagctgattcccaaatctaaagttaagaaagaagaaaagaaaaggcataaatcatcatcatcttcctcctcctcatctagtgactcagatagctcaagtgattctcagtcctcttctgattcctctgattccgaaagtgctactgaagagaaatcaaagaaaagaaaaaagaaacatcggaaaaattcccgaaaacacaagaaagaaaagaaaaagcgaaagaaaagcaagaagagtgcatctagtgagagtgaagctgaaaatcttgaagcacaaccccagtctactgtccgtccagaagagatccctcctatacctgaaaatagattcctaatgagaaaaagtcctcctaaagctgatgagaaggaaaggaaaaacagagagagagaaagggaaagagagtgtaatccacctaactcccagcctgcttcataccagagacgacttttagttactagatctggcaggaaaattaaaggaagaggaccaaggcgttatcgaactccttccagatccagatcaagggatcgtttcagacgtagtgagactcctccacattggaggcaagagatgcagagagctcaaagaatgagggtatcaagtggtgaaagatggatcaagggggataagagtgagttgaatgaaataaaagaaaatcagagaagtccagttagagtaaaagagagaaaaataacagatcacaggaatgtatctgagagtccaaacagaaaaaatgaaaaggagaagaaagttaaagaccataaatctaacagcaaagagagagacatcagaagaaattcagaaaaagatgacaagtataaaaacaaagtgaagaaaagggccaaatctaaaagtaggagtaagagcaaagagaaatcaaagagtaaagaaagagattcaaaacataatagaaatgaagaaaagaggatgaggtcaaggagtaaaggaagggatcatgaaaatgttaaagaaaaagaaaagcagtctgattctaaaggaaaagatcaggaaaggagtagaagtaaagagaagtctaaacagttagaatcaaagagtaatgagcatgatcacagtaaaagtaaggaaaaggatagacgcgcacaatccaggagtagagaatgtgatataactaaaggtaaacacagttataatagcagaacaagagaacgaagcagaagtagggacagaagcagaagagtgcgatcaagaacccatgacagagatcgcagcagaagcaaggagtaccatagatacagagaacaggaatacaggagaagaggacggtcacgaagccgagagagaagaacaccaccaggaagatcaagaagtaaagataggaggagaaggaggagagactcacggagctcagagagagaagaaagtcaaagcagaaacaaagacaaatacagaaaccaagagagtaagagctcacacagaaaagaaaattctgagagtgagaaaagaatgtactctaaaagtcgtgatcataatagctcaaataacagcagggaaaaaaaggctgatagagatcaaagtcccttctcaaaaataaaacaaagcagtcaggacaatgaattaaagtcctccatgttgaaaaataaggaggatgagaagatcagatcctcagtggaaaaagaaaaccaaaaatcaaaaggtcaagaaaatgaccatgtacatgaaaaaaataaaaaatttgatcatgaatcaagccctggaacagatgaagacaaaagcggatgagtgagttatataaacttacttccattctgtttcggattttaagtttgagagacttgctaatgaatctcctttatgttgttttccttttcattgtttttggattgttttatgtttgtccttttttttcttaatgtggatttcattgagttgattttttgataatctgcaatctggataatttgtactgctaaagttttaataaactcgacatgagaaaaaca

SEQ ID NO: 452536 - DNA, 4409 bp, Homo sapiens
gacattggtcattcaggttttatttatgacaacttcttagaacacacacatccaatctaggaacagaaatgtacaacatggggcttaaataactttcatacactatgtacagccatcggcagaggtacaaaacatatatacaccttgtgctagtcacatcatggaggacagcaggagcctaatgaagcctgcagcctgggcaggacatgattgctagaaaagagttggtgggcagggcagggccctgattcatctcaggggtcttctctgatcctcggctctttgtggaggagtttctatttcctacttccctgcaaggccctcaggacatggttcacaggactgaactagatgtgataggcgcttcaaaggaccggacccagagaagaggaaaactctaccggtgcaggagcacagggatcagttgtccttgtttttttttggtcttttcttcatttgaagattaagtattggagccatgggaataaaggttcaacgtcctcgatgtttttttgacattgccattaacaatcaacctgctggaagagttgtctttgaattattttctgatgtgtgccccaaaacatgcgagaactttcgttgtctttgtacaggtgaaaaggggaccgggaaatcaactcagaaaccattacattataagagttgtctctttcacagagttgtcaaggattttatggttcaaggtggtgacttcagtgaaggaaatggacgaggaggggaatctatctatggaggattttttgaagacgagagtttcgctgttaaacacaacaaagaatttctcttgtcaatggccaacagagggaaggatacaaatggttcacagttcttcataacaacgaaaccaactcctcatttagatgggcatcatgttgtttttggacaagtaatctctggtcaagaagttgtaagagagattgaaaaccagaaaacagatgcagctagcaaaccgtttgcggaggtacggatactcagttgtggagagctgattcccaaatctaaagttaagaaagaagaaaagaaaaggcataaatcatcatcatcttcctcctcctcatctagtgactcagatagctcaagtgattctcagtcctcttctgattcctctgattccgaaagtgctactgaagagaaatcaaagaaaagaaaaaagaaacatcggaaaaattcccgaaaacacaagaaagaaaagaaaaagcgaaagaaaagcaagaagagtgcatctagtgagagtgaagctgaaaatcttgaagcacaaccccagtctactgtccgtccagaagagatccctcctatacctgaaaatagattcctaatgagaaaaagtcctcctaaagctgatgagaaggaaaggaaaaacagagagagagaaagggaaagagagtgtaatccacctaactcccagcctgcttcataccagagacgacttttagttactagatctggcaggaaaattaaaggaagaggaccaaggcgttatcgaactccttccagatccagatcaagggatcgtttcagacgtagtgagactcctccacattggaggcaagagatgcagagagctcaaagaatgagggtatcaagtggtgaaagatggatcaagggggataagagtgagttgaatgaaataaaagaaaatcagagaagtccagttagagtaaaagagagaaaaataacagatcacaggaatgtatctgagagtccaaacagaaaaaatgaaaaggagaagaaagttaaagaccataaatctaacagcaaagagagagacatcagaagaaattcagaaaaagatgacaagtataaaaacaaagtgaagaaaagggccaaatctaaaagtaggagtaagagcaaagagaaatcaaagagtaaagaaagagattcaaaacataatagaaatgaagaaaagaggatgaggtcaaggagtaaaggaagggatcatgaaaatgttaaagaaaaagaaaagcagtctgattctaaaggaaaagatcaggaaaggagtagaagtaaagagaagtctaaacagttagaatcaaagagtaatgagcatgatcacagtaaaagtaaggaaaaggatagacgcgcacaatccaggagtagagaatgtgatataactaaaggtaaacacagttataatagcagaacaagagaacgaagcagaagtagggacagaagcagaagagtgcgatcaagaacccatgacagagatcgcagcagaagcaaggagtaccatagatacagagaacaggaatacaggagaagaggacggtcacgaagccgagagagaagaacaccaccaggaagatcaagaagtaaagataggaggagaaggaggagagactcacggagctcagagagagaagaaagtcaaagcagaaacaaagacaaatacagaaaccaagagagtaagagctcacacagaaaagaaaattctgagagtgagaaaagaatgtactctaaaagtcgtgatcataatagctcaaataacagcagggaaaaaaaggctgatagagatcaaagtcccttctcaaaaataaaacaaagcagtcaggacaatgaattaaagtcctccatgttgaaaaataaggaggatgagaagatcagatcctcagtggaaaaagaaaaccaaaaatcaaaaggtcaagaaaatgaccatgtacatgaaaaaaataaaaaatttgatcatgaatcaagccctggaacagatgaagacaaaagcggatgagtgagttatataaacttacttccattctgtttcggattttaagtttgagagacttgctaatgaatctcctttatgttgttttccttttcattgtttttggattgttttatgtttgtccttttttttcttaatgtggatttcattgagttgattttttgataatctgcaatctggataatttgtactgctaaagttttaataaactcgacatgagaaaaacactttggtgtagtactgtgtgctgtgtttaactattttatgtatgcattactgtgttgcaacaattagccaatagcatcctaatttgtttagtcagccatttggaatggttgcaatgcattgttgcaaaagcttgtgtttctcatgattaaagtaactttagaagccactagaagacatcttgtatagattttctgattgcgttataaatagaggtttgcagcggtttcttttaattacacagaagcagggtcctaataacctgagatcttaaatcatcacttttgattttatagtaatttgtgctttaaaatagatgtatttatattgcacttcatactctattctttatagttcgagccatagcttgtttcctattaatgcttttcctgtctagttgtgttttacttaactgcctataaaaatcgtaagagtaatttttttcagttgatgtactgattgagcttgagttgctgttatacagcatttgacaggaactataccttggaaaatcagattgtgattctcagttctgtgttgcttttggtttgaagagttttgggaacgttttaattattaattacccttctctaaactttaaaaaaaaaaaagcttttctcattaaaacataccatttgtgcaggtccttaagctatacagattctaaaaattgttagtattgagacattaacttctaagatttctcttttttggcctccaacctatatagaattgagtgttaactctgcatggattttgtttgttttaattgaactgacttctctaactctcatagctgtgagttccaaatggcaagaaaatgcatcttttctatatatgtatcacgataggctatagcatgtttatgactctggtttctttctcttcaggtggttttataccattactgttaatgttattttaacttggcatgtataacattgccatatagagtagagtagaaagttgcaaattttgatagtttacagagttaaacactaaacatatccaaagtccatttagagttttgggtgttgtattttgccatttttgtgatgtgtggccttttattctgtaatctcttctaaataaaacattgaacatccagcaaacataaaacctgcctcatttgaaaaggaatttcaaaattccaattaataggattctctagagagttttgtactttaatatttgtcagtgtagtgtcaactctgttaccaaggtagcttcttggtaaatccagtagctactcaatgctatttgtactgaataaagcaattattaacatgatacttcccactattgattaatgcaatattgatatatttggcgttgtggtagctgttgcagaatgaatagtgtaatgaccataagattgcttggaaaattgtaatacagatatccacaatgaattctttccaaaatttttttttccgatgataaaagt

SEQ ID NO: 452537 - DNA, 3483 bp, Homo sapiens
ggcgcttccggtgcgacgctgtctctccatgccaggactgagttgtgggggagggaggcggttagcgggctttagcgccttttctggcggcggtagatttgaagcgcttcaaaggaccggacccagagaagaggaaaactctaccggtgcaggagcacagggatcagttgtccttgtttttttttggtcttttcttcatttgaagattaagtattggagccatgggaataaaggttcaacgtcctcgatgtttttttgacattgccattaacaatcaacctgctggaagagttgtctttgaattattttctgatgtgtgccccaaaacatgcgagaactttcgttgtctttgtacaggtgaaaaggggaccgggaaatcaactcagaaaccattacattataagagttgtctctttcacagagttgtcaaggattttatggttcaaggtggtgacttcagtgaaggaaatggacgaggaggggaatctatctatggaggattttttgaagacgagagtttcgctgttaaacacaacaaagaatttctcttgtcaatggccaacagagggaaggatacaaatggttcacagttcttcataacaacgaaaccaactcctcatttagatgggcatcatgttgtttttggacaagtaatctctggtcaagaagttgtaagagagattgaaaaccagaaaacagatgcagctagcaaaccgtttgcggaggtacggatactcagttgtggagagctgattcccaaatctaaagttaagaaagaagaaaagaaaaggcataaatcatcatcatcttcctcctcctcatctagtgactcagatagctcaagtgattctcagtcctcttctgattcctctgattccgaaagtgctactgaagagaaatcaaagaaaagaaaaaagaaacatcggaaaaattcccgaaaacacaagaaagaaaagaaaaagcgaaagaaaagcaagaagaggtcttaattttacttttctaatgctagctttatattctgatttcctttctgtaaatctgttaggattttgggtcaattatatgaaactgttaaaatagtgagaaatatagcatggagcgtaggacttttgatattccacagtctatagattaaattttgggtacgttcattttcttttgaaagaaaacctatcagttcatttttttgtgtactcaatgaaataatacagctttggtgttacagatttgtgtgtttataggaggattatgggatttatgaaaattgcagaaaaccaccagttgtttttcctattttcagtagcagtcccctttgctcttacgatagcataaggatagaaagcagataatgtcagtgtattttactttcttttccattttgcttgaaataatctgtgtttgtactaaaacttgtcttcatctgcctatggctcaaatgcagttaatttctttacccatgttttaaagtattttaaatttatcagagtgcattgtcacatagtttcatattttttatccattttgtaggaaaatattttttgagagtgtgataatcgaaacgttttgttttgtttgttttttgattggttagttggtttgtcagaggaatagaagatttttcccatgcgatcacatctttggtaaggacaggatgtttatattatagtgatataaaggaaagaaataccaacaattggatacttccgtaaggacataataaccaactgtaacttgttttgtgtgtttctgtctgttaagtgcatctagtgagagtgaagctgaaaatcttgaagcacaaccccagtctactgtccgtccagaagagatccctcctatacctgaaaatagattcctaatgagaaaaagtcctcctaaagctgatgagaaggaaaggaaaaacagagagagagaaagggaaagagagtgtaatccacctaactcccagcctgcttcataccagagacgacttttagttactagatctggcaggaaaattaaaggaagaggaccaaggcgttatcgaactccttccagatccagatcaagggatcgtttcagacgtagtgagactcctccacattggaggcaagagatgcagagagctcaaagaatgagggtatcaagtggtgaaagatggatcaagggggataagagtgagttgaatgaaataaaagaaaatcagagaagtccagttagagtaaaagagagaaaaataacagatcacaggaatgtatctgagagtccaaacagaaaaaatgaaaaggagaagaaagttaaagaccataaatctaacagcaaagagagagacatcagaagaaattcagaaaaagatgacaagtataaaaacaaagtgaagaaaagggccaaatctaaaagtaggagtaagagcaaagagaaatcaaagagtaaagaaagagattcaaaacataatagaaatgaagaaaagaggatgaggtcaaggagtaaaggaagggatcatgaaaatgttaaagaaaaagaaaagcagtctgattctaaaggaaaagatcaggaaaggagtagaagtaaagagaagtctaaacagttagaatcaaagagtaatgagcatgatcacagtaaaagtaaggaaaaggatagacgcgcacaatccaggagtagagaatgtgatataactaaaggtaaacacagttataatagcagaacaagagaacgaagcagaagtagggacagaagcagaagagtgcgatcaagaacccatgacagagatcgcagcagaagcaaggagtaccatagatacagagaacaggaatacaggagaagaggacggtcacgaagccgagagagaagaacaccaccaggaagatcaagaagtaaagataggaggagaaggaggagagactcacggagctcagagagagaagaaagtcaaagcagaaacaaagacaaatacagaaaccaagagagtaagagctcacacagaaaagaaaattctgagagtgagaaaagaatgtactctaaaagtcgtgatcataatagctcaaataacagcagggaaaaaaaggctgatagagatcaaagtcccttctcaaaaataaaacaaagcagtcaggacaatgaattaaagtcctccatgttgaaaaataaggaggatgagaagatcagatcctcagtggaaaaagaaaaccaaaaatcaaaaggtcaagaaaatgaccatgtacatgaaaaaaataaaaaatttgatcatgaatcaagccctggaacagatgaagacaaaagcggatgagtgagttatataaacttacttccattctgtttcggattttaagtttgagagacttgctaatgaatctcctttatgttgttttccttttcattgtttttggattgttttatgtttgtccttttttttcttaatgtggatttcattgagttgattttttgataatctgcaatctggataatttgtactgctaaagttttaataaactcgacatgagaaaaaca

SEQ ID NO: 452538 - DNA, 2653 bp, Homo sapiens
ggcgcttccggtgcgacgctgtctctccatgccaggactgagttgtgggggagggaggcggttagcgggctttagcgccttttctggcggcggtagatttgaagcgcttcaaaggaccggacccagagaagaggaaaactctaccggtgcaggagcacagggatcagttgtccttgtttttttttggtcttttcttcatttgaagattaagtattggagccatgggaataaaggttcaacgtcctcgatgtttttttgacattgccattaacaatcaacctgctggaagagttgtctttgaattattttctgatgtgtgccccaaaacatgcgagaactttcgttgtctttgtacaggtgaaaaggggaccgggaaatcaactcagaaaccattacattataagagttgtctctttcacagagttgtcaaggattttatggttcaaggtggtgacttcagtgaaggaaatggacgaggaggggaatctatctatggaggattttttgaagacgagagtttcgctgttaaacacaacaaagaatttctcttgtcaatggccaacagagggaaggatacaaatggttcacagttcttcataacaacgaaaccaactcctcatttagatgggcatcatgttgtttttggacaagtaatctctggtcaagaagttgtaagagagattgaaaaccagaaaacagatgcagctagcaaaccgtttgcggaggtacggatactcagttgtggagagctgattcccaaatctaaagttaagaaagaagaaaagaaaaggcataaatcatcatcatcttcctcctcctcatctagtgactcagatagctcaagtgattctcagtcctcttctgattcctctgattccgaaagtgctactgaagagaaatcaaagaaaagaaaaaagaaacatcggaaaaattcccgaaaacacaagaaagaaaagaaaaagcgaaagaaaagcaagaagagtgcatctagtgagagtgaagctgaaaatcttgaagcacaaccccagtctactgtccgtccagaagagatccctcctatacctgaaaatagattcctaatgagaaaaagtcctcctaaagctgatgagaaggaaaggaaaaacagagagagagaaagggaaagagagtgtaatccacctaactcccagcctgcttcataccagagacgacttttagttactagatctggcaggaaggatcgtttcagacgtagtgagactcctccacattggaggcaagagatgcagagagctcaaagaatgagggtatcaagtggtgaaagatggatcaagggggataagagtgagttgaatgaaataaaagaaaatcagagaagtccagttagagtaaaagagagaaaaataacagatcacaggaatgtatctgagagtccaaacagaaaaaatgaaaaggagaagaaagttaaagaccataaatctaacagcaaagagagagacatcagaagaaattcagaaaaagatgacaagtataaaaacaaagtgaagaaaagggccaaatctaaaagtaggagtaagagcaaagagaaatcaaagagtaaagaaagagattcaaaacataatagaaatgaagaaaagaggatgaggtcaaggagtaaaggaagggatcatgaaaatgttaaagaaaaagaaaagcagtctgattctaaaggaaaagatcaggaaaggagtagaagtaaagagaagtctaaacagttagaatcaaagagtaatgagcatgatcacagtaaaagtaaggaaaaggatagacgcgcacaatccaggagtagagaatgtgatataactaaaggtaaacacagttataatagcagaacaagagaacgaagcagaagtagggacagaagcagaagagtgcgatcaagaacccatgacagagatcgcagcagaagcaaggagtaccatagatacagagaacaggaatacaggagaagaggacggtcacgaagccgagagagaagaacaccaccaggaagatcaagaagtaaagataggaggagaaggaggagagactcacggagctcagagagagaagaaagtcaaagcagaaacaaagacaaatacagaaaccaagagagtaagagctcacacagaaaagaaaattctgagagtgagaaaagaatgtactctaaaagtcgtgatcataatagctcaaataacagcagggaaaaaaaggctgatagagatcaaagtcccttctcaaaaataaaacaaagcagtcaggacaatgaattaaagtcctccatgttgaaaaataaggaggatgagaagatcagatcctcagtggaaaaagaaaaccaaaaatcaaaaggtcaagaaaatgaccatgtacatgaaaaaaataaaaaatttgatcatgaatcaagccctggaacagatgaagacaaaagcggatgagtgagttatataaacttacttccattctgtttcggattttaagtttgagagacttgctaatgaatctcctttatgttgttttccttttcattgtttttggattgttttatgtttgtccttttttttcttaatgtggatttcattgagttgattttttgataatctgcaatctggataatttgtactgctaaagttttaataaactcgacatgagaaaaaca

SEQ ID NO: 452539 - DNA, 1838 bp, Homo sapiens
ggcgcttccggtgcgacgctgtctctccatgccaggactgagttgtgggggagggaggcggttagcgggctttagcgccttttctggcggcggtagatttgaagcgcttcaaaggaccggacccagagaagaggaaaactctaccggtgcaggagcacagggatcagttgtccttgtttttttttggtcttttcttcatttgaagattaagtattggagccatgggaataaaggttcaacgtcctcgatgtttttttgacattgccattaacaatcaacctgctggaagagttgtctttgaattattttctgatgtgtgccccaaaacatgcgagaactttcgttgtctttgtacaggtgaaaaggggaccgggaaatcaactcagaaaccattacattataagagttgtctctttcacagagttgtcaaggattttatggttcaaggtggtgacttcagtgaaggaaatggacgaggaggggaatctatctatggaggattttttgaagacgagagtttcgctgttaaacacaacaaagaatttctcttgtcaatggccaacagagggaaggatacaaatggttcacagttcttcataacaacgaaaccaactcctcatttagatgggcatcatgttgtttttggacaagtaatctctggtcaagaagttgtaagagagattgaaaaccagaaaacagatgcagctagcaaaccgtttgcggaggtacggatactcagttgtggagagctgattcccaaatctaaagttaagaaagaagaaaagaaaaggcataaatcatcatcatcttcctcctcctcatctagtgactcagatagctcaagtgattctcagtcctcttctgattcctctgattccgaaagtgctactgaagagaaatcaaagaaaagaaaaaagaaacatcggaaaaattcccgaaaacacaagaaagaaaagaaaaagcgaaagaaaagcaagaagagtgcatctagtgagagtgaagctgaaaatcttgaagcacaaccccagtctactgtccgtccagaagagatccctcctatacctgaaaatagattcctaatgagaaaaagtcctcctaaagctgatgagaaggaaaggaaaaacagagagagagaaagggaaagagagtgtaatccacctaactcccagcctgcttcataccagagacgacttttagttactagatctggcaggaaaattaaaggaagaggaccaaggcgttatcgaactccttccagatccagatcaagggatcgtttcagacgtagtgagactcctccacattggaggcaagagatgcagagagctcaaagaatgagggtatcaagtggtgaaagatggatcaagggggataagagtgagttgaatgaaataaaagaaaatcagagaagtccagttagagtaaaagagagaaaaataacagatcacaggaatgtatctgagagtccaaacagaaaaaatgaaaaggagaagaaagttaaagaccataaatctaacagcaaagagagagacatcagaagaaattcagaaaaagatgacaagtataaaaacaaagtgaagaaaagggccaaatctaaaagtaggagtaagagcaaagagaaatcaaagagtaaagaaagagattcaaaacataatagaaatgaagaaaagaggatgaggtcaaggagtaaaggaagggatcatgaaaatgttaaagaaaaagaaaagcagtctgattctaaaggaaaagatcaggaatgaaataaaagaaaatcagagaagtccagttagagtaaaagagagaaaaataacagatcacaggaatgtatctgagagtcc

SEQ ID NO: 452540 - DNA, 1567 bp, Homo sapiens
ggcgcttccggtgcgacgctgtctctccatgccaggactgagttgtgggggagggaggcggttagcgggctttagcgccttttctggcggcggtagatttgaagcgcttcaaaggaccggacccagagaagaggaaaactctaccggtgcaggagcacagggatcagttgtccttgtttttttttggtcttttcttcatttgaagattaagtattggagccatgggaataaaggttcaacgtcctcgatgtttttttgacattgccattaacaatcaacctgctggaagagttgtctttgaattattttctgatgtgtgccccaaaacatgcgagaactttcgttgtctttgtacaggtgaaaaggggaccgggaaatcaactcagaaaccattacattataagagttgtctctttcacagagttgtcaaggattttatggttcaaggtggtgacttcagtgaaggaaatggacgaggaggggaatctatctatggaggattttttgaagacgagagtttcgctgttaaacacaacaaagaatttctcttgtcaatggccaacagagggaaggatacaaatggttcacagttcttcataacaacgaaaccaactcctcatttagatgggcatcatgttgtttttggacaagtaatctctggtcaagaagttgtaagagagattgaaaaccagaaaacagatgcagctagcaaaccgtttgcggaggtacggatactcagttgtggagagctgattcccaaatctaaagttaagaaagaagaaaagaaaaggcataaatcatcatcatcttcctcctcctcatctagtgactcagatagctcaagtgattctcagtcctcttctgattcctctgattccgaaagtgctactgaagagaaatcaaagaaaagaaaaaagaaacatcggaaaaattcccgaaaacacaagaaagaaaagaaaaagcgaaagaaaagcaagaagagtgcatctagtgagagtgaagctgaaaatcttgaagcacaaccccagtctactgtccgtccagaagagatccctcctatacctgaaaatagattcctaatgagaaaaagtcctcctaaagctgatgagaaggaaaggaaaaacagagagagagaaagggaaagagagtgtaatccacctaactcccagcctgcttcataccagagacgacttttagttactagatctggcaggaaaattaaaggaagaggaccaagggtaggtgattctttccccagagatcttcacaatattgcatttgtcttccttaaataattttagggtgtttcttaaatattattttaatgtgcaagtaactaaaatttaggggagatgcaggcattgaattatatattctctttcttaagcagcttctgtatgttggtacttcccaacagaaaatccatgagatatgaatagattttacatttacatggtataaaatgggatcgaggtctttcttgtctcccgtgtttcttggcaatcactgtatctctattcttgttaaaaataaataaaaattaaccctattcttgtattttattctt

SEQ ID NO: 452541 - DNA, 1598 bp, Homo sapiens
agaggcccggaacacacaagacaagcataccatcagatcgtcacatactagacttcacccatggtgcgaagtatagagaactcatactttactaaagttggcaggagtgttcacagaagaggaccaaggcgttatcgaactccttccagatccagatcaagggatcgtttcagacgtagtgagactcctccacattggaggcaagagatgcagagagctcaaagaatgagggtatcaagtggtgaaagatggatcaagggggataagagtgagttgaatgaaataaaagaaaatcagagaagtccagttagagtaaaagagagaaaaataacagatcacaggaatgtatctgagagtccaaacagaaaaaatgaaaaggagaagaaagttaaagaccataaatctaacagcaaagagagagacatcagaagaaattcagaaaaagatgacaagtataaaaacaaagtgaagaaaagggccaaatctaaaagtaggagtaagagcaaagagaaatcaaagagtaaagaaagagattcaaaacataatagaaatgaagaaaagaggatgaggtcaaggagtaaaggaagggatcatgaaaatgttaaagaaaaagaaaagcagtctgattctaaaggaaaagatcaggaaaggagtagaagtaaagagaagtctaaacagttagaatcaaagagtaatgagcatgatcacagtaaaagtaaggaaaaggatagacgcgcacaatccaggagtagagaatgtgatataactaaaggtaaacacagttataatagcagaacaagagaacgaagcagaagtagggacagaagcagaagagtgcgatcaagaacccatgacagagatcgcagcagaagcaaggagtaccatagatacagagaacaggaatacaggagaagaggacggtcacgaagccgagagagaagaacaccaccaggaagatcaagaagtaaagataggaggagaaggaggagagactcacggagctcagagagagaagaaagtcaaagcagaaacaaagacaaatacagaaaccaagagagtaagagctcacacagaaaagaaaattctgagagtgagaaaagaatgtactctaaaagtcgtgatcataatagctcaaataacagcagggaaaaaaaggctgatagagatcaaagtcccttctcaaaaataaaacaaagcagtcaggacaatgaattaaagtcctccatgttgaaaaataaggaggatgagaagatcagatcctcagtggaaaaagaaaaccaaaaatcaaaaggtcaagaaaatgaccatgtacatgaaaaaaataaaaaatttgatcatgaatcaagccctggaacagatgaagacaaaagcggatgagtgagttatataaacttacttccattctgtttcggattttaagtttgagagacttgctaatgaatctcctttatgttgttttccttttcattgtttttggattgttttatgtttgtccttttttttcttaatgtggatttcattgagttgattttttgataatctgcaatctggataatttgtactgctaaagttttaataaactcgacatgagaaaaaca

SEQ ID NO: 452542 - DNA, 1757 bp, Homo sapiens
  misc_feature (26)..(26): n is a, c, g, or t
  misc_feature (62)..(62): n is a, c, g, or t
  misc_feature (72)..(72): n is a, c, g, or t
  misc_feature (78)..(78): n is a, c, g, or t
  misc_feature (257)..(257): n is a, c, g, or t
taagagtaattttttccagttaaggncctgattgagcttaagttgctgtatacagcatttgncaggactatnccttgnaaaatcagattgtgattctcagttctgtgttgcttttggtttgaagagttttgggaacgttttaattattaattacccttctctaaactttaaaaaaaaaaaaaagcttttctcattaaaacataccatttgtgcaggtccttaagctatacagattctaaaaattgttagtattgagncattaacttctaagatttctcttttttggcctccaacctatatagaattgagtgttaactctgcatggattttgtttgttttaattgaactgacttctctaactctcatagctgtgagttccaaatggcaagaaaatgcatcttttctatatatgtatcacgataggcgagtgagttgaatgaaataaaagaaaatcagagaagtccagttagagtaaaagagagaaaaataacagatcacaggaatgtatctgagagtccaaacagaaaaaatgaaaaggagaagaaagttaaagaccataaatctaacagcaaagagagagacatcagaagaaattcagaaaaagatgacaagtataaaaacaaagtgaagaaaagggccaaatctaaaagtaggagtaagagcaaagagaaatcaaagagtaaagaaagagattcaaaacataatagaaatgaagaaaagaggatgaggtcaaggagtaaaggaagggatcatgaaaatgttaaagaaaaagaaaagcagtctgattctaaaggaaaagatcaggaaaggagtagaagtaaagagaagtctaaacagttagaatcaaagagtaatgagcatgatcacagtaaaagtaaggaaaaggatagacgcgcacaatccaggagtagagaatgtgatataactaaaggtaaacacagttataatagcagaacaagagaacgaagcagaagtagggacagaagcagaagagtgcgatcaagaacccatgacagagatcgcagcagaagcaaggagtaccatagatacagagaacaggaatacaggagaagaggacggtcacgaagccgagagagaagaacaccaccaggaagatcaagaagtaaagataggaggagaaggaggagagactcacggagctcagagagagaagaaagtcaaagcagaaacaaagacaaatacagaaaccaagagagtaagagctcacacagaaaagaaaattctgagagtgagaaaagaatgtactctaaaagtcgtgatcataatagctcaaataacagcagggaaaaaaaggctgatagagatcaaagtcccttctcaaaaataaaacaaagcagtcaggacaatgaattaaagtcctccatgttgaaaaataaggaggatgagaagatcagatcctcagtggaaaaagaaaaccaaaaatcaaaaggtcaagaaaatgaccatgtacatgaaaaaaataaaaaatttgatcatgaatcaagccctggaacagatgaagacaaaagcggatgagtgagttatataaacttacttccattctgtttcggattttaagtttgagagacttgctaatgaatctcctttatgttgttttccttttcattgtttttggattgttttatgtttgtccttttttttcttaatgtggatttcattgagttgattttttgataatctgcaatctggataatttgtactgctaaagttttaataaactcgacatgagaaaaaca

SEQ ID NO: 452543 - DNA, 707 bp, Homo sapiens
gctacaaagcccacaggcagagaaagaactcctcaagtgcttgtggtcagagactaggttccatatgaggcacacctatgatgaaggtcttcacctccagaaggtgacactgttcagagatcctcatttcctggagagtgggagaaaatccctcctttgggaaatcccttttcccagcagcagagcccacctcattgcttagtgatcatttggaaggcactgagagccttcaggggctgacagcagagaaatgaaaatgagtacagttcagatggtggaagaagcatggcagtgacatcttccatgctctttttctcagtgtctgcaactccaaagatcaaggccataacccaggagaccatcaacggaagattagttctttgtcaagtgaatgaaatccaaaagcacgcatgagaccaatgaaagtttccgcctgttgtaaaatctattttcccccaaggaaagtccttgcacagacaccagtgagtgagttctaaaagatacccttggaattatcagactcagaaacttttattttttttttctgtaacagtctcaccagacttctcataatgctcttaatatattgcacttttctaatcaaagtgcgagtttatgagggtaaagctctactttcctactgcagccttcagattctcatcattttgcatctattttgtagccaataaaactccgcactagctgca

SEQ ID NO: 452544 - DNA, 1230 bp, Homo sapiens
agaatttcctcaaaaaatgacattttttttttttaccatcgtcataatcaaaaagcattgcttgagactagggttgccagatttaccaaattaaaatatagaatactcagtttagttggaatttcaaataaaaagcaattttttttgcatgtcccatgcaatactggagcaatattttggacatagttacactaaaaaattactcattactcatctgaaattcaaatttaactagatgttctctattttatctggcatccctaattgagacccttctccgaagatacaaagagatagcagtcccagttgctgtcgctctttgggagttttcaatcaggtcaaagataaaatgaaaggagttaaacaacagttcagagcaaggcaatggacttcaaaagtcctaacactgctcaactcctgactgcccaagtcccaaacctgtaagtcagcctacttctcatcttggtgtcctcagcagctaccaagacacctagccaactggtcgacatctgctaagtactcaacaatcacctgttattgactcaatcaagccatcagttaattaacagaagatcatttcctctttcagaaatctgctttggaaaacatgttatccgagacccagtctcggtactcctgcaagctccaggacatgcaagagatcatctcccactatgaggaggaactgacgcagctacgccacgaactggagcggcagaacaatgaataccaagtgctgctgggcatcaaaacccacctggagaaggaaatcaccacgtaccgacggctcctggagggagagagtgaagggacacgggaagaatcaaagtcgagcatgaaagtgtctgcaactccaaagatcaaggccataacccaggagaccatcaacggaagattagttctttgtcaagtgaatgaaatccaaaagcacgcatgagaccaatgaaagtttccgcctgttgtaaaatctattttcccccaaggaaagtccttgcacagacaccagtgagtgagttctaaaagatacccttggaattatcagactcagaaacttttattttttttttctgtaacagtctcaccagacttctcataatgctcttaatatattgcacttttctaatcaaagtgcgagtttatgagggtaaagctctactttcctactgcagccttcagattctcatcattttgcatctattttgtagccaataaaactccgcactagctgca

SEQ ID NO: 452545 - DNA, 1006 bp, Homo sapiens
ggcagatgaaatataagattcatcaaccacatttgacagcccatggcaggtttcctgttttccatcgtccctctgcaggtcacagacacacagagcccagccgtggcaggctcagccggggtccggggctgctaacaacggctacattcctcccccagggccaagggaaatcctgagcgcaggccagggttgtttggttttgaggtgtgctgggatgaaaggcaccctggaagtggaaggtaaatgaacaatggaaaaacttcacggcaagattagaaagatacctgagcccaatacccgcctgatgtcgtgggccacacctccgggttaccaggggaagggaggaagcaaactgtcatattgatgtggctctaaacaacaacagtgtgcgaaggcccaggggcactttgggattgaccaagaggaaacacaagttgcacaatgatacaatcttgttggtacaattgtcagagaagggaactcccacagcaaaggccataaaaccatccagggcagtctggggcggctcagttctgcggtgccagggagtggagcagagctcagccccgtcccaaacacagatgggaccatgaactccggacacagcttcagccagaccccctcggcctccttccatggcgccggaggtggctggggccggcccaggagcttccccagggctcccaccgtccatggcggtgcggggggagcccgcatctccctgtccttcaccacgcggagctgcccaccccctggagggtcttggggttctggaagaagcagccccctactaggcggaaatgggaaggccaccatgcagaatctcaacgaccgcctggcctcctacctggagaaggttcgcgccctggaggaggccaacatgaagctggaaagccgcatcctgaaatggcaccagagtctgcagaagacatttcccattaggaactccacttgagacaatggtgacaacccgcgctatttcctacagggaggtgtccccatcctt

SEQ ID NO: 452546 - DNA, 2150 bp, Homo sapiens
ggcagatgaaatataagattcatcaaccacatttgacagcccatggcaggtttcctgttttccatcgtccctctgcaggtcacagacacacagagcccagccgtggcaggctcagccggggtccggggctgctaacaacggctacattcctcccccagggccaagggaaatcctgagcgcaggccagggttgtttggttttgaggtgtgctgggatgaaaggcaccctggaagtggaaggtaaatgaacaatggaaaaacttcacggcaagattagaaagatacctgagcccaatacccgcctgatgtcgtgggccacacctccgggttaccaggggaagggaggaagcaaactgtcatattgatgtggctctaaacaacaacagtgtgcgaaggcccaggggcactttgggattgaccaagaggaaacacaagttgcacaatgatacaatcttgttggtacaattgtcagagaagggaactcccacagcaaaggccataaaaccatccagggcagtctggggcggctcagttctgcggtgccagggagtggagcagagctcagccccgtcccaaacacagatgggaccatgaactccggacacagcttcagccagaccccctcggcctccttccatggcgccggaggtggctggggccggcccaggagcttccccagggctcccaccgtccatggcggtgcggggggagcccgcatctccctgtccttcaccacgcggagctgcccaccccctggagggtcttggggttctggaagaagcagccccctactaggcggaaatgggaaggccaccatgcagaatctcaacgaccgcctggcctcctacctggagaaggttcgcgccctggaggaggccaacatgaagctggaaagccgcatcctgaaatggcaccagcagagagatcctggcagtaagaaagattattcccagtatgaggaaaacatcacacacctgcaggagcagatagtggatggtaagatgaccaatgctcagattattcttctcattgacaatgccaggatggcagtggatgacttcaacctcaagtatgaaaatgaacactcctttaagaaagacttggaaattgaagtcgagggcctccgaagaccttagacaacctgaccattgtcacaacagacctagaacaggaggtggaaggaatgaggaaagagctcattctcatgaagaagcaccatgagcaggaaatggagaagcatcatgtgccaagtgacttcaatgtcaatgtgaaggtggatacaggtcccagggaagatctgattaaggtcctggaggatatgagacaagaatatgagcttataataaagaagaagcatcgagacttggacacttggtataaagaacagtctgcagccatgtcccaggaggcagccagtccagccactgtgcagagcagacaaggtgacatccacgaactgaagcgcacattccaggccctggagattgacctgcaggcacagtacagcacgaaatctgctttggaaaacatgttatccgagacccagtctcggtactcctgcaagctccaggacatgcaagagatcatctcccactatgaggaggaactgacgcagctacgccacgaactggagcggcagaacaatgaataccaagtgctgctgggcatcaaaacccacctggagaaggaaatcaccacgtaccgacggctcctggagggagagagtgaagggacacgggaagaatcaaagtcgagcatgaaagtgtctgcaactccaaagatcaaggccataacccaggagaccatcaacggaagattagttctttgtcaagtgaatgaaatccaaaagcacgcatgagaccaatgaaagtttccgcctgttgtaaaatctattttcccccaaggaaagtccttgcacagacaccagtgagtgagttctaaaagatacccttggaattatcagactcagaaacttttattttttttttctgtaacagtctcaccagacttctcataatgctcttaatatattgcacttttctaatcaaagtgcgagtttatgagggtaaagctctactttcctactgcagccttcagattctcatcattttgcatctattttgtagccaataaaactccgcactagctgca

SEQ ID NO: 452547 - DNA, 491 bp, Homo sapiens
tggctcgtagaggatcctacctaaatggctgtcaccacgtaccgacggctcctggagggagagagtgaagggacacgggaagaatcaaagtcgagcatgaaagtgtctgcaactccaaagatcaaggccataacccaggagaccatcaacggaagattagttctttgtcaagtgaatgaaatccaaaagcacgcatgagaccaatgaaagtttccgcctgttgtaaaatctattttcccccaaggaaagtccttgcacagacaccagtgagtgagttctaaaagatacccttggaattatcagactcagaaacttttattttttttttctgtaacagtctcaccagacttctcataatgctcttaatatattgcacttttctaatcaaagtgcgagtttatgagggtaaagctctactttcctactgcagccttcagattctcatcattttgcatctattttgtagccaataaaactccgcactagctgca

SEQ ID NO: 452548 - DNA, 1466 bp, Homo sapiens
ggcagatgaaatataagattcatcaaccacatttgacagcccatggcaggtttcctgttttccatcgtccctctgcaggtcacagacacacagagcccagccgtggcaggctcagccggggtccggggctgctaacaacggctacattcctcccccagggccaagggaaatcctgagcgcaggccagggttgtttggttttgaggtgtgctgggatgaaaggcaccctggaagtggaaggttcggtcattcattaattaattacatctataattgagggtttgttcttaagagcgagtcctttgaaagtactttccttcaaacagtgactgccacaaaggcatcagatattcaccaccttctcggctgcctcagcacagcaagctttattctgggacctgagatcctgttctgagctggctttcccttctccaggctcgctcaccctccctttagagatagtggatggtaagatgaccaatgctcagattattcttctcattgacaatgccaggatggcagtggatgacttcaacctcaagaaatggagaagcatcatgtgccaagtgacttcaatgtcaatgtgaaggtggatacaggtcccagggaagatctgattaaggtcctggaggatatgagacaagaatatgagcttataataaagaagaagcatcgagacttggacacttggtataaagaacagtctgcagccatgtcccaggaggcagccagtccagccactgtgcagagcagacaaggtgacatccacgaactgaagcgcacattccaggccctggagattgacctgcaggcacagtacagcacgaaatctgctttggaaaacatgttatccgagacccagtctcggtactcctgcaagctccaggacatgcaagagatcatctcccactatgaggaggaactgacgcagctacgccacgaactggagcggcagaacaatgaataccaagtgctgctgggcatcaaaacccacctggagaaggaaatcaccacgtaccgacggctcctggagggagagagtgaagggacacgggaagaatcaaagtcgagcatgaaagtgtctgcaactccaaagatcaaggccataacccaggagaccatcaacggaagattagttctttgtcaagtgaatgaaatccaaaagcacgcatgagaccaatgaaagtttccgcctgttgtaaaatctattttcccccaaggaaagtccttgcacagacaccagtgagtgagttctaaaagatacccttggaattatcagactcagaaacttttattttttttttctgtaacagtctcaccagacttctcataatgctcttaatatattgcacttttctaatcaaagtgcgagtttatgagggtaaagctctactttcctactgcagccttcagattctcatcattttgcatctattttgtagccaataaaactccgcactagctgca

SEQ ID NO: 452549 - DNA, 2368 bp, Homo sapiens
ggcagatgaaatataagattcatcaaccacatttgacagcccatggcaggtttcctgttttccatcgtccctctgcaggtcacagacacacagagcccagccgtggcaggctcagccggggtccggggctgctaacaacggctacattcctcccccagggccaagggaaatcctgagcgcaggccagggttgtttggttttgaggtgtgctgggatgaaaggcaccctggaagtggaaggttcggtcattcattaattaattacatctataattgagggtttgttcttaagagcgagtcctttgaaagtactttccttcaaacagtgactgccacaaaggcatcagatattcaccaccttctcggctgcctcagcacagcaagctttattctgggacctgagatcctgttctgagctggctttcccttctccaggctcgctcaccctccctttagaggtaaatgaacaatggaaaaacttcacggcaagattagaaagatacctgagcccaatacccgcctgatgtcgtgggccacacctccgggttaccaggggaagggaggaagcaaactgtcatattgatgtggctctaaacaacaacagtgtgcgaaggcccaggggcactttgggattgaccaagaggaaacacaagttgcacaatgatacaatcttgttggtacaattgtcagagaagggaactcccacagcaaaggccataaaaccatccagggcagtctggggcggctcagttctgcggtgccagggagtggagcagagctcagccccgtcccaaacacagatgggaccatgaactccggacacagcttcagccagaccccctcggcctccttccatggcgccggaggtggctggggccggcccaggagcttccccagggctcccaccgtccatggcggtgcggggggagcccgcatctccctgtccttcaccacgcggagctgcccaccccctggagggtcttggggttctggaagaagcagccccctactaggcggaaatgggaaggccaccatgcagaatctcaacgaccgcctggcctcctacctggagaaggttcgcgccctggaggaggccaacatgaagctggaaagccgcatcctgaaatggcaccagcagagagatcctggcagtaagaaagattattcccagtatgaggaaaacatcacacacctgcaggagcagatagtggatggtaagatgaccaatgctcagattattcttctcattgacaatgccaggatggcagtggatgacttcaacctcaagtatgaaaatgaacactcctttaagaaagacttggaaattgaagtcgagggcctccgaagaccttagacaacctgaccattgtcacaacagacctagaacaggaggtggaaggaatgaggaaagagctcattctcatgaagaagcaccatgagcaggaaatggagaagcatcatgtgccaagtgacttcaatgtcaatgtgaaggtggatacaggtcccagggaagatctgattaaggtcctggaggatatgagacaagaatatgagcttataataaagaagaagcatcgagacttggacacttggtataaagaacagtctgcagccatgtcccaggaggcagccagtccagccactgtgcagagcagacaaggtgacatccacgaactgaagcgcacattccaggccctggagattgacctgcaggcacagtacagcacgaaatctgctttggaaaacatgttatccgagacccagtctcggtactcctgcaagctccaggacatgcaagagatcatctcccactatgaggaggaactgacgcagctacgccacgaactggagcggcagaacaatgaataccaagtgctgctgggcatcaaaacccacctggagaaggaaatcaccacgtaccgacggctcctggagggagagagtgaagggacacgggaagaatcaaagtcgagcatgaaagtgtctgcaactccaaagatcaaggccataacccaggagaccatcaacggaagattagttctttgtcaagtgaatgaaatccaaaagcacgcatgagaccaatgaaagtttccgcctgttgtaaaatctattttcccccaaggaaagtccttgcacagacaccagtgagtgagttctaaaagatacccttggaattatcagactcagaaacttttattttttttttctgtaacagtctcaccagacttctcataatgctcttaatatattgcacttttctaatcaaagtgcgagtttatgagggtaaagctctactttcctactgcagccttcagattctcatcattttgcatctattttgtagccaataaaactccgcactagctgca

SEQ ID NO: 452550 - DNA, 1536 bp, Homo sapiens
ggcagatgaaatataagattcatcaaccacatttgacagcccatggcaggtttcctgttttccatcgtccctctgcaggtcacagacacacagagcccagccgtggcaggctcagccggggtccggggctgctaacaacggctacattcctcccccagggccaagggaaatcctgagcgcaggccagggttgtttggttttgaggtgtgctgggatgaaaggcaccctggaagtggaagtgactgccacaaaggcatcagatattcaccaccttctcggctgcctcagcacagcaagctttattctgggacctgagatcctgttctgagctggctttcccttctccaggctcgctcaccctccctttagagatagtggatggtaagatgaccaatgctcagattattcttctcattgacaatgccaggatggcagtggatgacttcaacctcaagtatgaaaatgaacactcctttaagaaagacttggaaattgaagtcgagggcctccgaagaccttagacaacctgaccattgtcacaacagacctagaacaggaggtggaaggaatgaggaaagagctcattctcatgaagaagcaccatgagcaggaaatggagaagcatcatgtgccaagtgacttcaatgtcaatgtgaaggtggatacaggtcccagggaagatctgattaaggtcctggaggatatgagacaagaatatgagcttataataaagaagaagcatcgagacttggacacttggtataaagaacagtctgcagccatgtcccaggaggcagccagtccagccactgtgcagagcagacaaggtgacatccacgaactgaagcgcacattccaggccctggagattgacctgcaggcacagtacagcacgaaatctgctttggaaaacatgttatccgagacccagtctcggtactcctgcaagctccaggacatgcaagagatcatctcccactatgaggaggaactgacgcagctacgccacgaactggagcggcagaacaatgaataccaagtgctgctgggcatcaaaacccacctggagaaggaaatcaccacgtaccgacggctcctggagggagagagtgaagggacacgggaagaatcaaagtcgagcatgaaagtgtctgcaactccaaagatcaaggccataacccaggagaccatcaacggaagattagttctttgtcaagtgaatgaaatccaaaagcacgcatgagaccaatgaaagtttccgcctgttgtaaaatctattttcccccaaggaaagtccttgcacagacaccagtgagtgagttctaaaagatacccttggaattatcagactcagaaacttttattttttttttctgtaacagtctcaccagacttctcataatgctcttaatatattgcacttttctaatcaaagtgcgagtttatgagggtaaagctctactttcctactgcagccttcagattctcatcattttgcatctattttgtagccaataaaactccgcactagctgca

SEQ ID NO: 452551 - DNA, 893 bp, Homo sapiens
ggctccgggctgggtggggatcggctggctgccccggcccctcacctccatctttctacccccagggtcgcggcgagcgcgcctatgacatctactcgcggctgctgcgggagcgcatcgtgtgcgtcatgggcccgatcgatgacagcgttgccagccttgttatcgcacagctcctcttcctgcaatccgagagcaacaagaagcccatccacatgtacatcaacagccctggtggtgtggtgaccgcgggcctggccatctacgacacgatgcagtacatcctcaacccgatctgcacctggtgcgtgggccaggccgccagcatgggctccctgcttctcgccgccggcaccccaggcatgcgccactcgctccccaactcccgtatcatgatccaccagccctcaggaggcgcccggggccaagccacagacattgccatccaggcagaggagatcatgaagctcaagaagcagctctataacatctacgccaagcacaccaaacagagcctgcaggtgatcgagtccgccatggagagggaccgctacatgagccccatggaggcccaggagtttggcatcttagacaaggttctggtccaccctccccaggacggtgaggatgagcccacgctggtgcagaaggagcctgtagaagcagcgccggcagcagaacctgtcccagctagcacctgagagctgggcctcctctccagaatcatgtggaggggccagaggcctgccagacccccagctgggccctgctcaccccttgttgctgggcttggaggggcctcttgaggaacttttaatttgcaggggtgcccgctatggacggggcattccagctgagacactgtgattttaaattaaatctttgtggtcttt

SEQ ID NO: 452552 - DNA, 234 bp, Homo sapiens
gcggccgcctactactactactgctcgaattcaagcttctaacgatgtacgggcctctccagaatcatgtggaggggccagaggcctgccagacccccagctgggccctgctcaccccttgttgctgggcttggaggggcctcttgaggaacttttaatttgcaggggtgcccgctatggacggggcattccagctgagacactgtgattttaaattaaatctttgtggtcttt

SEQ ID NO: 452553 - DNA, 1177 bp, Homo sapiens
ccttaatggcgcccgcccagactcctggaagtgagcggcctagcgagcgagctcccaggcgcaaagcacgccggaagctgtagttccgccatcggacggaagccgaccggggcgtgcggagggatgtggcccggaatattggtagggggggcccgggtggcgtcatgcaggtaccccgcgctggggcctcgcctcgccgctcactttccagcgcagcggccgccgcagcggacactccagaacggcctggccctgcagcggtgcctgcacgcgacggcgacccgggctctcccgctcattcccatcgtggtggagcagacgggtcgcggcgagcgcgcctatgacatctactcgcggctgctgcgggagcgcatcgtgtgcgtcatgggcccgatcgatgacagcgttgccagccttgttatcgcacagctcctcttcctgcaatccgagagcaacaagaagcccatccacatgtacatcaacagccctggtggtgtggtgaccgcgggcctggccatctacgacacgatgcagtacatcctcaacccgatctgcacctggtgcgtgggccaggccgccagcatgggctccctgcttctcgccgccggcaccccaggcatgcgccactcgctccccaactcccgtatcatgatccaccagccctcaggaggcgcccggggccaagccacagacattgccatccaggcagaggagatcatgaagctcaagaagcagctctataacatctacgccaagcacaccaaacagagcctgcaggtgatcgagtccgccatggagagggaccgctacatgagccccatggaggcccaggagtttggcatcttagacaaggttctggtccaccctccccaggacggtgaggatgagcccacgctggtgcagaaggagcctgtagaagcagcgccggcagcagaacctgtcccagctagcacctgagagctgggcctcctctccagaatcatgtggaggggccagaggcctgccagacccccagctgggccctgctcaccccttgttgctgggcttggaggggcctcttgaggaacttttaatttgcaggggtgcccgctatggacggggcattccagctgagacactgtgattttaaattaaatctttgtggtctttaaaaaaaaaaacatttcccaaaaaaaaa

SEQ ID NO: 452554 - DNA, 940 bp, Homo sapiens
aaataggctaggtacgaggctgcgtgttgaatcggccgaggcggacggaagccgacggggcgtgcggagggatgtggctctcccgctcattcccatcgtggtggagcagacgggtcgcggcgagcgcgcctatgacatctactcgcggctgctgcgggagcgcatcgtgtgcgtcatgggcccgatcgatgacagcgttgccagccttgttatcgcacagctcctcttcctgcaatccgagagcaacaagaagcccatccacatgtacatcaacagccctggtggtgtggtgaccgcgggcctggccatctacgacacgatgcagtacatcctcaacccgatctgcacctggtgcgtgggccaggccgccagcatgggctccctgcttctcgccgccggcaccccaggcatgcgccactcgctccccaactcccgtatcatgatccaccagccctcaggaggcgcccggggccaagccacagacattgccatccaggcagaggagatcatgaagctcaagaagcagctctataacatctacgccaagcacaccaaacagagcctgcaggtgatcgagtccgccatggagagggaccgctacatgagccccatggaggcccaggagtttggcatcttagacaaggttctggtccaccctccccaggacggtgaggatgagcccacgctggtgcagaaggagcctgtagaagcagcgccggcagcagaacctgtcccagctagcacctgagagctgggcctcctctccagaatcatgtggaggggccagaggcctgccagacccccagctgggccctgctcaccccttgttgctgggcttggaggggcctcttgaggaacttttaatttgcaggggtgcccgctatggacggggcattccagctgagacactgtgattttaaattaaatctttgtggtcttt

SEQ ID NO: 452555 - DNA, 1000 bp, Homo sapiens
ccttaatggcgcccgcccagactcctggaagtgagcggcctagcgagcgagctcccaggcgcaaagcacgccggaagctgtagttccgccatcggacggaagccgaccggggcgtgcggagggatgtggcccggaatattggtagggggggcccgggtggcgtcatgcaggtaccccgcgctggggcctcgcctcgccgctcactttccagcgcagcggccgccgcagcggacactccagaacggcctggccctgcagcggtgcctgcacgcgacggcgacccgggctctcccgctcattcccatcgtggtggagcagacgggtcgcggcgagcgcgcctatgacatctactcgcggctgctgcgggagcgcatcgtgtgcgtcatgggcccgatcgatgacagcgttgccagccttgttatcgcacagctcctcttcctgcaatccgagagcaacaagaagcccatccacatgtacatcaacagccctgtcccgtatcatgatccaccagccctcaggaggcgcccggggccaagccacagacattgccatccaggcagaggagatcatgaagctcaagaagcagctctataacatctacgccaagcacaccaaacagagcctgcaggtgatcgagtccgccatggagagggaccgctacatgagccccatggaggcccaggagtttggcatcttagacaaggttctggtccaccctccccaggacggtgaggatgagcccacgctggtgcagaaggagcctgtagaagcagcgccggcagcagaacctgtcccagctagcacctgagagctgggcctcctctccagaatcatgtggaggggccagaggcctgccagacccccagctgggccctgctcaccccttgttgctgggcttggaggggcctcttgaggaacttttaatttgcaggggtgcccgctatggacggggcattccagctgagacactgtgattttaaattaaatctttgtggtcttt

SEQ ID NO: 452556 - DNA, 1126 bp, Homo sapiens
ccttaatggcgcccgcccagactcctggaagtgagcggcctagcgagcgagctcccaggcgcaaagcacgccggaagctgtagttccgccatcggacggaagccgaccggggcgtgcggagggatgtggcccggaatattggtagggggggcccgggtggcgtcatgcaggtaccccgcgctggggcctcgcctcgccgctcactttccagcgcagcggccgccgcagcggacactccagaacggcctggccctgcagcggtgcctgcacgcgacggcgacccgggctctcccgctcattcccatcgtggtggagcagacgggtcgcggcgagcgcgcctatgacatctactcgcggctgctgcgggagcgcatcgtgtgcgtcatgggcccgatcgatgacagcgttgccagccttgttatcgcacagctcctcttcctgcaatccgagagcaacaagaagcccatccacatgtacatcaacagccctggtggtgtggtgaccgcgggcctggccatctacgacacgatgcagtacatcctcaacccgatctgcacctggtgcgtgggccaggccgccagcatgggctccctgcttctcgccgccggcaccccaggcatgcgccactcgctccccaactcccgtatcatgatccaccagccctcaggaggcgcccggggccaagccacagacattgccatccaggcagaggagatcatgaagctcaagaagcagctctataacatctacgccaagcacaccaaacagagcctgcaggtgatcgagtccgccatggagaggtgccgtatgaccagagccgatggctctaacagtcgtcacctccagacgtgagatgaccacctgtgcaaagactgtaaacagcgcggcgcagaactgtccatagcactgaactggctctctcagatctgtgaggggcaagctgcagacccagctggcctgtcaccctgttgctggctgaagggctctgaggactttattgcagggtgcccgtatggacgggctcaactgaacactgtgaattattaatcttgtgtctttggcaaaaaaaaaggggccgttaagttctgaggccagtatacgttctgtcagtgcctagggtttatat

SEQ ID NO: 452557 - DNA, 1028 bp, Homo sapiens
ccttaatggcgcccgcccagactcctggaagtgagcggcctagcgagcgagctcccaggcgcaaagcacgccggaagctgtagttccgccatcggacggaagccgaccggggcgtgcggagggatgtggcccggaatattggtagggggggcccgggtggcgtcatgcaggtaccccgcgctggggcctcgcctcgccgctcactttccagcgcagcggccgccgcagcggacactccagaacggcctggccctgcagcggtgcctgcacgcgacggcgacccgggctctcccgctcattcccatcgtggtggagcagacgggtcgcggcgagcgcgcctatgacatctactcgcggctgctgcgggagcgcatcgtgtgcgtcatgggcccgatcgatgacagcgttgccagccttgttatcgcacagctcctcttcctgcaatccgagagcaacaagaagcccatccacatgtacatcaacagccctgtcccgtatcatgatccaccagccctcaggaggcgcccggggccaagccacagacattgccatccaggcagaggagatcatgaagctcaagaagcagctctataacatctacgccaagcacaccaaacagagcctgcaggtgatcgagtccgccatggagagggaccgctacatgagccccatggaggcccaggagtttggcatcttagacaaggttctggtccaccctccccaggacggtgaggatgagcccacgctggtgcagaaggagcctgtagaagcagcgccggcagcagaacctgtcccagctagcacctgagagctgggcctcctctccagaatcatgtggaggggccagaggcctgccagacccccagctgggccctgctcaccccttgttgctgggcttggaggggcctcttgaggaacttttaatttgcaggggtgcccgctatggacggggcattccagctgagacactgtgattttaaattaaatctttgtggtctttaaaaaaaaaaacatttcccaaaaaaaaa

SEQ ID NO: 452558 - DNA, 693 bp, Homo sapiens
  misc_feature (557)..(557): n is a, c, g, or t
  misc_feature (559)..(559): n is a, c, g, or t
  misc_feature (574)..(575): n is a, c, g, or t
  misc_feature (579)..(579): n is a, c, g, or t
  misc_feature (583)..(583): n is a, c, g, or t
  misc_feature (590)..(590): n is a, c, g, or t
  misc_feature (594)..(594): n is a, c, g, or t
  misc_feature (598)..(598): n is a, c, g, or t
  misc_feature (613)..(613): n is a, c, g, or t
  misc_feature (622)..(622): n is a, c, g, or t
  misc_feature (642)..(642): n is a, c, g, or t
  misc_feature (660)..(661): n is a, c, g, or t
ccttaatggcgcccgcccagactcctggaagtgagcggcctagcgagcgagctcccaggcgcaaagcacgccggaagctgtagttccgccatcggacggaagccgaccggggcgtgcggagggatgtggcccggaatattggtagggggggcccgggtggcgtcatgcaggtaccccgcgctggggcctcgcctcgccgctcactttccagcgcagcggccgccgcagcggacactccagaacggcctggccctgcagcggtgcctgcacgcgacggcgacccgggctctcccgctcattcccatcgtggtggagcagacgggtcgcggcgagcgcgcctatgacatctactcgcggctgctgcgggagcgcatcgtgtgcgtcatgggcccgatcgatgacagcgttgccagccttgttatcgcacagctcctcttcctgcaatccgagagcaacaagaagcccatccacatgtacatcaacagccctggtggtgtggtgaccgcgggcctggccatctacgacacgatgcagtacatcctcaacccagggtttcnanatgcacaagatccannaagnatgnccagaanaagngganacgcttgctgttgcntctcatgantcgatcgatcgtggagctgngcgatcacaatgagagcnncgctgaatcttaatgtggggccagctctgtct

SEQ ID NO: 452559 - DNA, 1149 bp, Homo sapiens
ccttaatggcgcccgcccagactcctggaagtgagcggcctagcgagcgagctcccaggcgcaaagcacgccggaagctgtagttccgccatcggacggaagccgaccggggcgtgcggagggatgtggcccggaatattggtagggggggcccgggtggcgtcatgcaggtaccccgcgctggggcctcgcctcgccgctcactttccagcgcagcggccgccgcagcggacactccagaacggcctggccctgcagcggtgcctgcacgcgacggcgacccgggctctcccgctcattcccatcgtggtggagcagacgggtcgcggcgagcgcgcctatgacatctactcgcggctgctgcgggagcgcatcgtgtgcgtcatgggcccgatcgatgacagcgttgccagccttgttatcgcacagctcctcttcctgcaatccgagagcaacaagaagcccatccacatgtacatcaacagccctggtggtgtggtgaccgcgggcctggccatctacgacacgatgcagtacatcctcaacccgatctgcacctggtgcgtgggccaggccgccagcatgggctccctgcttctcgccgccggcaccccaggcatgcgccactcgctccccaactcccgtatcatgatccaccagccctcaggaggcgcccggggccaagccacagacattgccatccaggcagaggagatcatgaagctcaagaagcagctctataacatctacgccaagcacaccaaacagagcctgcaggtgatcgagtccgccatggagagggaccgctacatgagccccatggaggcccaggagtttggcatcttagacaaggttctggtccaccctccccaggacggtgaggatgagcccacgctggtgcagaaggagcctgtagaagcagcgccggcagcagaacctgtcccagctagcacctgagagctgggcctcctctccagaatcatgtggaggggccagaggcctgccagacccccagctgggccctgctcaccccttgttgctgggcttggaggggcctcttgaggaacttttaatttgcaggggtgcccgctatggacggggcattccagctgagacactgtgattttaaattaaatctttgtggtcttt

SEQ ID NO: 452560 - DNA, 1579 bp, Homo sapiens
ccttaatggcgcccgcccagactcctggaagtgagcggcctagcgagcgagctcccaggcgcaaagcacgccggaagctgtagttccgccatcggacggaagccgaccggggcgtgcggagggatgtggcccggaatattggtagggggggcccgggtggcgtcatgcaggtaccccgcgctggggcctcgcctcgccgctcactttccagcgcagcggccgccgcagcggacactccagaacggcctggccctgcagcggtgcctgcacgcgacggcgacccgggctctcccgctcattcccatcgtggtggagcagacgggtcgcggcgagcgcgcctatgacatctactcgcggctgctgcgggagcgcatcgtgtgcgtcatgggcccgatcgatgacagcgttgccagccttgttatcgcacagctcctcttcctgcaatccgagagcaacaagaagcccatccacatgtacatcaacagccctggtggtgtggtgaccgcgggcctggccatctacgacacgatgcagtacatcctcaacccgatctgcacctggtgcgtgggccaggccgccagcatgggctccctgcttctcgccgccggcaccccaggcatgcgccactcgctccccaactcccgtatcatgatccaccagccctcaggaggcgcccggggccaagccacagacattgccatccaggcagaggagatcatgaagctcaagaagcagctctataacatctacgccaagcacaccaaacagagcctgcaggtgatcgagtccgccatggagagggaccgctacatgagccccatggaggcccaggagtttggcatcttagacaaggttctggtccaccctccccaggacggtgaggatgagcccacgctggtgcagaaggagcctgtagaagcagcgccggcagcagaacctgtcccagctagcacctgagagctgggcctcctctccagaatcatgtggaggggccagaggcctgccagacccccagctgggccctgctcaccccttgttgctgggcttggaggggcctcttgaggaacttttaatttgcaggggtgcccgctatggacggggcattccagctgagacactgtgattttaaattaaatctttgtggtctttaaaaaaaaaaaaaaaaaaaaaaaaaaaaaaaaaaaaagggggggcccccaaaaaattcccccggggggggccacaagtttagggccgtgacccacaattttggtggacaaaggggggggccccaaagagaaggacagcagaatataagcgccgaaggccagggggacggcggctttaaacacaacggctgggcagcggggaacaaggtgcttcaaagcggggaaaatcttgtgggggagagaaaccctacaatgcgggggggggtgcaacatatgttggaaaaattcctccaaggaagaattagaaagcctcgaagggaaatattaatagtttcagcgggttatataggtgttaaaccgacgcgcaataagctgtgacggagtgaaaaaatggccagggaattgatgatttgggaatatttttttcagga

SEQ ID NO: 452561 - DNA, 1083 bp, Homo sapiens
tctctgctcctcggctcttaatctccgacttccttcctgacacctggcaccgctcccctcattcctacgctcaagactctccccagccattctcaccccttcctttcctgtgtccctagccccctgactccccccttcctgtgctccaaaccccctgggtcctctccactactctctccccatccccttctggggcctaaattcttccccatcccttttactttgggctctggtcccccttcctggttccctgacccatccccagcctcccttaaaactctctccccaccccgaatctggggacacccctgccctctccacctgcagatcgatgacagcgttgccagccttgttatcgcacagctcctcttcctgcaatccgagagcaacaagaagcccatccacatgtacatcaacagccctggtggtgtggtgaccgcgggcctggccatctacgacacgatgcagtacatcctcaacccgatctgcacctggtgcgtgggccaggccgccagcatgggctccctgcttctcgccgccggcaccccaggcatgcgccactcgctccccaactcccgtatcatgatccaccagccctcaggaggcgcccggggccaagccacagacattgccatccaggcagaggagatcatgaagctcaagaagcagctctataacatctacgccaagcacaccaaacagagcctgcaggtgatcgagtccgccatggagagggaccgctacatgagccccatggaggcccaggagtttggcatcttagacaaggttctggtccaccctccccaggacggtgaggatgagcccacgctggtgcagaaggagcctgtagaagcagcgccggcagcagaacctgtcccagctagcacctgagagctgggcctcctctccagaatcatgtggaggggccagaggcctgccagacccccagctgggccctgctcaccccttgttgctgggcttggaggggcctcttgaggaacttttaatttgcaggggtgcccgctatggacggggcattccagctgagacactgtgattttaaattaaatctttgtggtcttt

SEQ ID NO: 452562 - DNA, 961 bp, Homo sapiens
ccttaatggcgcccgcccagactcctggaagtgagcggcctagcgagcgagctcccaggcgcaaagcacgccggaagctgtagttccgccatcggacggaagccgaccggggcgtgcggagggatgtggcccggaatattggtagggggggcccgggtggcgtcatgcaggtaccccgcgctggggcctcgcctcgccgctcactttccagcgcagcggccgccgcagcggacactccagaacggcctggccctgcagcggtgcctgcacgcgacggcgacccgggctctcccgctcattcccatcgtggtggagcagacgggtcgcggcgagcgcgcctatgacatctactcgcggctgctgcgggagcgcatcgtgtgcgtcatgggcccgatcgatgacagcgttgccagccttgttatcgcacagctcctcttcctgcaatccgagagcaacaagaagcccatccacatgtacatcaacagccctgggccaagccacagacattgccatccaggcagaggagatcatgaagctcaagaagcagctctataacatctacgccaagcacaccaaacagagcctgcaggtgatcgagtccgccatggagagggaccgctacatgagccccatggaggcccaggagtttggcatcttagacaaggttctggtccaccctccccaggacggtgaggatgagcccacgctggtgcagaaggagcctgtagaagcagcgccggcagcagaacctgtcccagctagcacctgagagctgggcctcctctccagaatcatgtggaggggccagaggcctgccagacccccagctgggccctgctcaccccttgttgctgggcttggaggggcctcttgaggaacttttaatttgcaggggtgcccgctatggacggggcattccagctgagacactgtgattttaaattaaatctttgtggtcttt

SEQ ID NO: 452563 - DNA, 831 bp, Homo sapiens
ccttaatggcgcccgcccagactcctggaagtgagcggcctagcgagcgagctcccaggcgcaaagcacgccggaagctgtagttccgccatcggacggaagccgaccggggcgtgcggagggatgtggcccggaatattggtagggggggcccgggtggcgtcatgcaggtaccccgcgctggggcctcgcctcgccgctcactttccagcgcagcggccgccgcagcggacactccagaacggcctggccctgcagcggtgcctgcacgcgacggcgacccgggctctcccgctcattcccatcgtggtggagcagacgggtcgcggcgagcgcgcctatgacatctactcgcggctgctgcgggagcgcatcgtgtgcgtcatgggcccgatcgatgacagcgttgccagccttgttatcgcacagctcctcttcctgcaatccgagagcaacaagaagcccatccacatgtacatcaacagccctggtggtgtggtgaccgcgggcctggccatctacgacacgatgcagtacatcctcaaccctccccaggacggtgaggatgagcccacgctggtgcagaaggagcctgtagaagcagcgccggcagcagaacctgtcccagctagcacctgagagctgggcctcctctccagaatcatgtggaggggccagaggcctgccagacccccagctgggccctgctcaccccttgttgctgggcttggaggggcctcttgaggaacttttaatttgcaggggtgcccgctatggacggggcattccagctgagacactgtgattttaaattaaatctttgtggtcttt

SEQ ID NO: 452564 - DNA, 512 bp, Homo sapiens
ccttaatggcgcccgcccagactcctggaagtgagcggcctagcgagcgagctcccaggcgcaaagcacgccggaagctgtagttccgccatcggacggaagccgaccggggcgtgcggagggatgtggcccggaatattggtagggggggcccgggtggcgtcatgcaggtaccccgcgctggggcctcgcctcgccgctcactttccagcgcagcggccgccgcagcggacactccagaacggcctggccctgcagcggtgcctgcacgcgacggcgacccgggctctcccgctcattcccatcgtggtggagcagacgggtcgcggcgagcgcgcctatgacatctactcgcggctgctgcgggagcgcatcgtgtgcgtcatgggcccggtgagcgccccgcgccgggaccctccccaggactctcccaagcgcctgccgacactccctgcgcccctccttccctggccccagactttccctcaggctccgctccccttctaaccccc

SEQ ID NO: 452565 - DNA, 1976 bp, Homo sapiens
ggtttccgcttccgctcttccctggtccagtccaccctggcggggtcgcagggttgggatggcggctggaggcgatcatggttcgcccgacagctaccgctcacctcttgcctcccgctatgccagcccggagatgtgcttcgtgtttagcgacaggtataaattccggacatggcggcagctgtggctgtggctggcggaggccgagcagacattgggtttgcctatcacagatgaacaaatccaggagatgaaatcaaacctggagaacatcgacttcaagatggcagctgaggaagagaaacgtttacgacatgatgtgatggctcacgtgcacacatttggccactgctgtccaaaagctgcaggcattattcaccttggtgctacttcttgctatgttggagacaatactgacttgattattcttagaaatgcacttgacctgcttttgccaaagcttgccagagtgatctctcggcttgccgactttgctaaggaacgagccagtctacccacattaggtttcacacatttccagcctgcacagctgaccacagttgggaaacgttgctgtctttggattcaggatctttgcatggatctccagaacttgaagcgtgtccgagatgacctgcgcttccggggagtaaagggtaccactggcactcaggccagtttcctgcagctctttgagggagatgaccataaggtagagcagcttgacaagatggtgacagaaaaggcaggatttaagagagctttcatcatcacagggcagacatatacacgaaaagtggatattgaagtactgtctgtgctggctagcttgggggcatcagtgcacaagatttgcaccgacatacgcctcctggcaaacctcaaggagatggaggaaccctttgaaaaacagcagattggctcaagtgcgatgccatataagcggaatcccatgcgttcagaacgttgctgcagtcttgcccgccacctgatgacccttgtcatggacccgctacagacagcatctgtccagtggtttgaacgcacactggatgatagtgccaaccgacggatctgtttggccgaggcatttcttaccgcagatactatattgaatacgctgcagaacatttctgaaggattggtcgtgtaccccaaagtaattgaacggcgcattcggcaagagctgcctttcatggccacagagaacatcatcatggccatggtcaaagctggaggtagccgccaggattgccatgagaaaatcagagtgctttctcagcaggcagcttctgtggttaagcaggaagggggtgacaatgacctcatagagcgtatccaggttgatgcctacttcagtcccattcactcccagttggatcatttactggatccttcttctttcactggtcgtgcctcccagcaggtgcagagattcttagaagaggaggtgtatcccctgttaaaaccatatgaaagcgtgatgaaggtgaaagcagaattatgtctgtagagttggaagagaattaaacgaaaatcattgttaattgctgaggcatgaaaattgtgttactataatgccttattttacctcgagaattgttaccttaaattagtacagcactttcttcttcccatggtgctttcctgtttctcagtctcacatttctcaacaaggcaaaaacaaagagcgttgaagttgactctgctcttgcatagtaaatgtagttcatacttgatctctgttctttcaaggcatattttccagctgcctcaagtttagtccttttcacgtgttcatttgcttgtaaagtagcaagaaatttctggtcctgtcttctaaaagtgaatttgatctaggtctagcaaaataacctggactcagtgattgagtcaatggtcagataccttttatttcggttatttttggctagtataagtgatgaagtttggaactacagtaaatacttaaaaaa

SEQ ID NO: 452566 - DNA, 1546 bp, Homo sapiens
ggtttccgcttccgctcttccctggtccagtccaccctggcggggtcgcagggttgggatggcggctggaggcgatcatggttcgcccgacagctaccgctcacctcttgcctcccgctatgccagcccggagatgtgcttcgtgtttagcgacaggtataaattccggacatggcggcagctgtggctgtggctggcggaggccgagcagacattgggtttgcctatcacagatgaacaaatccaggagatgaaatcaaacctggagaacatcgacttcaagatggcagctgaggaagagaaacgtttacgacatgatgtgatggctcacgtgcacacatttggccactgctgtccaaaagctgcaggcattattcaccttggtgctacttcttgctatgttggagacaatactgacttgattattcttagaaatgcacttgacctgcttttgccaaagcttgccagagtgatctctcggcttgccgactttgctaaggaacgagccagtctacccacattaggtttcacacatttccagcctgcacagctgaccacagttgggaaacgttgctgtctttggattcaggatctttgcatggatctccagaacttgaagcgtgtccgagatgacctgcgcttccggggagtaaagggtaccactggcactcaggccagtttcctgcagctctttgagggagatgaccataaggtagagcagcttgacaagatggtgacagaaaaggcaggatttaagagagctttcatcatcacagggcagacatatacacgaaaagtggatattgaagtactgtctgtgctggctagcttgggggcatcagtgcacaagatttgcaccgacatacgcctcctggcaaacctcaaggagatggaggaaccctttgaaaaacagcagattggctcaagtgcgatgccatataagcggaatcccatgcgttcagaacgttgctgcagtcttgcccgccacctgatgacccttgtcatggacccgctacagacagcatctgtccagtggtttgaacgcacactggatgatagtgccaaccgacggatctgtttggccgaggcatttcttaccgcagatactatattgaatacgctgcagaacatttctgaaggattggtcgtgtaccccaaagtaattgaacggcgcattcggcaagagctgcctttcatggccacagagaacatcatcatggccatggtcaaagctggaggtagccgccaggattgccatgagaaaatcagagtgctttctcagcaggcagcttctgtggttaagcaggaagggggtgacaatgacctcatagagcgtatccaggttgatgcctacttcagtcccattcactcccagttggatcatttactggatccttcttctttcactggtcgtgcctcccagcaggtgcagagattcttagaagaggaggtgtatcccctgttaaaaccatatgaaagcgtgatgaaggtgaaagcagaattatgtctgtagagttggaagagaattaaacgaaaatcattgtta

SEQ ID NO: 452567 - DNA, 471 bp, Homo sapiens
cagaccggggagggagaggaggttaagctcttggtggctacttgaagagggctgggaagcaggaggaaagaagctgtggtgatttttaggttggatggaaatggtgaaaccacctgagagaacacaggctgggccagtttgcgggaaaggttggtgagcatgtgggcatggtggttgaatcatctgtgtctaggcagaaattcctgataggcagttgaggaaaacaagctcagtgttggagtaaaagcttcatcaaattaggtttcagtggtatcccctgacattggaaaaggtattatctgctaatatcttaacattttcttttgtcttgtatttgctttcctctggcaggtgcagagattcttagaagaggaggtgtatcccctgttaaaaccatatgaaagcgtgatgaaggtgaaagcagaattatgtctgtagagttggaagagaattaaacgaaaatcattgtta

SEQ ID NO: 452568 - DNA, 1491 bp, Homo sapiens
ggtttccgcttccgctcttccctggtccagtccaccctggcggggtcgcagggttgggatggcggctggaggcgatcatggttcgcccgacagctaccgctcacctcttgcctcccgctatgccagcccggagatgtgcttcgtgtttagcgacaggtataaattccggacatggcggcagctgtggctgtggctggcggaggccgagcagacattgggtttgcctatcacagatgaacaaatccaggagatgaaatcaaacctggagaacatcgacttcaagatggcagctgaggaagagaaacgtttacgacatgatgtgatggctcacgtgcacacatttggccactgctgtccaaaagctgcaggcattattcaccttggtgctacttcttgctatgttggagacaatactgacttgattattcttagaaatgcacttgacctgcttttgccaaagcttgccagagtgatctctcggcttgccgactttgctaaggaacgagccagtctacccacattaggtttcacacatttccagcctgcacagctgaccacagttgggaaacgttgctgtctttggattcaggatctttgcatggatctccagaacttgaagcgtgtccgagatgacctgcgcttccggggagtaaagggtaccactggcactcaggccagtttcctgcagctctttgagggagatgaccataaggtagagcagcttgacaagatggtgacagaaaaggcaggatttaagagagctttcatcatcacagggcagacatatacacgaaaagtggatattgaagtactgtctgtgctggctagcttgggggcatcagtgcacaagatttgcaccgacatacgcctcctggcaaacctcaaggagatggaggaaccctttgaaaaacagcagattggctcaagtgcgatgccatataagcggaatcccatgcgttcagaacgttgctgcagtcttgcccgccacctgatgacccttgtcatggacccgctacagacagcatctgtccagtggtttgaacgcacactggatgatagtgccaaccgacggatctgtttggccgaggcatttcttaccgcagatactatattgaatacgctgcagaacatttctgaaggattggtcgtgtaccccaaagtaattgaacggcgcattcggcaagagctgcctttcatggccacagagaacatcatcatggccatggtcaaagctggaggtagccgccaggattgccatgagaaaatcagagtgctttctcagcaggcagcttctgtggttaagcaggaagggggtgacaatgacctcatagagcgtatccaggttgatgcctacttcagtcccattcactcccagttggatcatttactggatccttcttctttcactggtcgtgcctcccagcagctgcagagattcttagaagaggtgctgtggtcccctccgactcccagttgtaagcgtgtctccca

SEQ ID NO: 452569 - DNA, 1369 bp, Homo sapiens
ggtttccgcttccgctcttccctggtccagtccaccctggcggggtcgcagggttgggatggcggctggaggcgatcatggttcgcccgacagctaccgctcacctcttgcctcccgctatgccagcccggagatgtgcttcgtgtttagcgacaggtataaattccggacatggcggcagctgtggctgtggctggcggaggccgagcagacattgggtttgcctatcacagatgaacaaatccaggagatgaaatcaaacctggagaacatcgacttcaagatggcagctgaggaagagaaacgtttacgacatgatgtgatggctcacgtgcacacatttggccactgctgtccaaaagctgcaggcattattcaccttggtgctacttcttgctatgttggagacaatactgacttgattattcttagaaatgcacttgacctgcttttgccaaagcttgccagagtgatctctcggcttgccgactttgctaaggaacgagccagtctacccacattaggtttcacacatttccagcctgcacagctgaccacagttgggaaacgttgctgtctttggattcaggatctttgcatggatctccagaacttgaagcgtgtccgagatgacctgcgcttccggggagtaaagggtaccactggcactcaggccagtttcctgcagctctttgagggagatgaccataaggtagagcagcttgacaagatggtgacagaaaaggcaggatttaagagagctttcatcatcacagggcagacatatacacgaaaagtggatattgaagtactgtctgtgctggctagcttgggggcatcagtgcacaagatttgcaccgacatacgcctcctggcaaacctcaaggagatggaggaaccctttgaaaaacagcagattggctcaagtgcgatgccatataagcggaatcccatgcgttcagaacgttgctgcagtcttgcccgccacctgatgacccttgtcatggacccgctacagacagcatctgtccagtggtttgaacgcacactggatgatagtgccaaccgacggatctgtttggccgaggcatttcttaccgcagatactatattgaatacgctgcagaacatttctgaaggattggtcgtgtaccccaaagtaattgaacggcgcattcggcaagagctgcctttcatggccacagagaacatcatcatggccatggtcaaagctggaggtagccgccaggtgcagagattcttagaagaggaggtgtatcccctgttaaaaccatatgaaagcgtgatgaaggtgaaagcagaattatgtctgtagagttggaagagaattaaacgaaaatcattgtta

SEQ ID NO: 452570 - DNA, 1931 bp, Homo sapiens
ggtttccgcttccgctcttccctggtccagtccaccctggcggggtcgcagggttgggatggcggctggaggcgatcatggttcgcccgacagctaccgctcacctcttgcctcccgctatgccagcccggagatgtgcttcgtgtttagcgacaggtataaattccggacatggcggcagctgtggctgtggctggcggaggccgagcagacattgggtttgcctatcacagatgaacaaatccaggagatgaaatcaaacctggagaacatcgacttcaagatggcagctgaggaagagaaacgtttacgacatgatgtgatggctcacgtgcacacatttggccactgctgtccaaaagctgcaggcattattcaccttggtgctacttcttgctatgttggagacaatactcttgccagagtgatctctcggcttgccgactttgctaaggaacgagccagtctacccacattaggtttcacacatttccagcctgcacagctgaccacagttgggaaacgttgctgtctttggattcaggatctttgcatggatctccagaacttgaagcgtgtccgagatgacctgcgcttccggggagtaaagggtaccactggcactcaggccagtttcctgcagctctttgagggagatgaccataaggtagagcagcttgacaagatggtgacagaaaaggcaggatttaagagagctttcatcatcacagggcagacatatacacgaaaagtggatattgaagtactgtctgtgctggctagcttgggggcatcagtgcacaagatttgcaccgacatacgcctcctggcaaacctcaaggagatggaggaaccctttgaaaaacagcagattggctcaagtgcgatgccatataagcggaatcccatgcgttcagaacgttgctgcagtcttgcccgccacctgatgacccttgtcatggacccgctacagacagcatctgtccagtggtttgaacgcacactggatgatagtgccaaccgacggatctgtttggccgaggcatttcttaccgcagatactatattgaatacgctgcagaacatttctgaaggattggtcgtgtaccccaaagtaattgaacggcgcattcggcaagagctgcctttcatggccacagagaacatcatcatggccatggtcaaagctggaggtagccgccaggattgccatgagaaaatcagagtgctttctcagcaggcagcttctgtggttaagcaggaagggggtgacaatgacctcatagagcgtatccaggttgatgcctacttcagtcccattcactcccagttggatcatttactggatccttcttctttcactggtcgtgcctcccagcaggtgcagagattcttagaagaggaggtgtatcccctgttaaaaccatatgaaagcgtgatgaaggtgaaagcagaattatgtctgtagagttggaagagaattaaacgaaaatcattgttaattgctgaggcatgaaaattgtgttactataatgccttattttacctcgagaattgttaccttaaattagtacagcactttcttcttcccatggtgctttcctgtttctcagtctcacatttctcaacaaggcaaaaacaaagagcgttgaagttgactctgctcttgcatagtaaatgtagttcatacttgatctctgttctttcaaggcatattttccagctgcctcaagtttagtccttttcacgtgttcatttgcttgtaaagtagcaagaaatttctggtcctgtcttctaaaagtgaatttgatctaggtctagcaaaataacctggactcagtgattgagtcaatggtcagataccttttatttcggttatttttggctagtataagtgatgaagtttggaactacagtaaatacttaaaaaa

SEQ ID NO: 452571 - DNA, 1717 bp, Homo sapiens
ggtttccgcttccgctcttccctggtccagtccaccctggcggggtcgcagggttgggatggcggctggaggcgatcatggttcgcccgacagctaccgctcacctcttgcctcccgctatgccagcccggagatgtgcttcgtgtttagcgacaggacttgattattcttagaaatgcacttgacctgcttttgccaaagcttgccagagtgatctctcggcttgccgactttgctaaggaacgagccagtctacccacattaggtttcacacatttccagcctgcacagctgaccacagttgggaaacgttgctgtctttggattcaggatctttgcatggatctccagaacttgaagcgtgtccgagatgacctgcgcttccggggagtaaagggtaccactggcactcaggccagtttcctgcagctctttgagggagatgaccataaggtagagcagcttgacaagatggtgacagaaaaggcaggatttaagagagctttcatcatcacagggcagacatatacacgaaaagtggatattgaagtactgtctgtgctggctagcttgggggcatcagtgcacaagatttgcaccgacatacgcctcctggcaaacctcaaggagatggaggaaccctttgaaaaacagcagattggctcaagtgcgatgccatataagcggaatcccatgcgttcagaacgttgctgcagtcttgcccgccacctgatgacccttgtcatggacccgctacagacagcatctgtccagtggtttgaacgcacactggatgatagtgccaaccgacggatctgtttggccgaggcatttcttaccgcagatactatattgaatacgctgcagaacatttctgaaggattggtcgtgtaccccaaagtaattgaacggcgcattcggcaagagctgcctttcatggccacagagaacatcatcatggccatggtcaaagctggaggtagccgccaggattgccatgagaaaatcagagtgctttctcagcaggcagcttctgtggttaagcaggaagggggtgacaatgacctcatagagcgtatccaggttgatgcctacttcagtcccattcactcccagttggatcatttactggatccttcttctttcactggtcgtgcctcccagcaggtgcagagattcttagaagaggaggtgtatcccctgttaaaaccatatgaaagcgtgatgaaggtgaaagcagaattatgtctgtagagttggaagagaattaaacgaaaatcattgttaattgctgaggcatgaaaattgtgttactataatgccttattttacctcgagaattgttaccttaaattagtacagcactttcttcttcccatggtgctttcctgtttctcagtctcacatttctcaacaaggcaaaaacaaagagcgttgaagttgactctgctcttgcatagtaaatgtagttcatacttgatctctgttctttcaaggcatattttccagctgcctcaagtttagtccttttcacgtgttcatttgcttgtaaagtagcaagaaatttctggtcctgtcttctaaaagtgaatttgatctaggtctagcaaaataacctggactcagtgattgagtcaatggtcagataccttttatttcggttatttttggctagtataagtgatgaagtttggaactacagtaaatacttaaaaaa

SEQ ID NO: 452572 - DNA, 1851 bp, Homo sapiens
ggtttccgcttccgctcttccctggtccagtccaccctggcggggtcgcagggttgggatggcggctggaggcgatcatggttcgcccgacagctaccgctcacctcttgcctcccgctatgccagcccggagatgtgcttcgtgtttagcgacaggtataaattccggacatggcggcagctgtggctgtggctggcggaggccgagcagacattgggtttgcctatcacagatgaacaaatccaggagatgaaatcaaacctggagaacatcgacttcaagatggcagctgaggaagagaaacgtttacgacatgatgtgatggctcacgtgcacacatttggccactgctgtccaaaagctgcaggcattattcaccttggtgctacttcttgctatgttggagacaatactgcctgcacagctgaccacagttgggaaacgttgctgtctttggattcaggatctttgcatggatctccagaacttgaagcgtgtccgagatgacctgcgcttccggggagtaaagggtaccactggcactcaggccagtttcctgcagctctttgagggagatgaccataaggtagagcagcttgacaagatggtgacagaaaaggcaggatttaagagagctttcatcatcacagggcagacatatacacgaaaagtggatattgaagtactgtctgtgctggctagcttgggggcatcagtgcacaagatttgcaccgacatacgcctcctggcaaacctcaaggagatggaggaaccctttgaaaaacagcagattggctcaagtgcgatgccatataagcggaatcccatgcgttcagaacgttgctgcagtcttgcccgccacctgatgacccttgtcatggacccgctacagacagcatctgtccagtggtttgaacgcacactggatgatagtgccaaccgacggatctgtttggccgaggcatttcttaccgcagatactatattgaatacgctgcagaacatttctgaaggattggtcgtgtaccccaaagtaattgaacggcgcattcggcaagagctgcctttcatggccacagagaacatcatcatggccatggtcaaagctggaggtagccgccaggattgccatgagaaaatcagagtgctttctcagcaggcagcttctgtggttaagcaggaagggggtgacaatgacctcatagagcgtatccaggttgatgcctacttcagtcccattcactcccagttggatcatttactggatccttcttctttcactggtcgtgcctcccagcaggtgcagagattcttagaagaggaggtgtatcccctgttaaaaccatatgaaagcgtgatgaaggtgaaagcagaattatgtctgtagagttggaagagaattaaacgaaaatcattgttaattgctgaggcatgaaaattgtgttactataatgccttattttacctcgagaattgttaccttaaattagtacagcactttcttcttcccatggtgctttcctgtttctcagtctcacatttctcaacaaggcaaaaacaaagagcgttgaagttgactctgctcttgcatagtaaatgtagttcatacttgatctctgttctttcaaggcatattttccagctgcctcaagtttagtccttttcacgtgttcatttgcttgtaaagtagcaagaaatttctggtcctgtcttctaaaagtgaatttgatctaggtctagcaaaataacctggactcagtgattgagtcaatggtcagataccttttatttcggttatttttggctagtataagtgatgaagtttggaactacagtaaatacttaaaaaa

SEQ ID NO: 452573 - DNA, 930 bp, Homo sapiens
  misc_feature (930)..(930): n is a, c, g, or t
ggtttccgcttccgctcttccctggtccagtccaccctggcggggtcgcagggttgggatggcggctggaggcgatcatggttcgcccgacagctaccgctcacctcttgcctcccgctatgccagcccggagatgtgcttcgtgtttagcgacaggtataaattccggacatggcggcagctgtggctgtggctggcggaggccgagcagacattgggtttgcctatcacagatgaacaaatccaggagatgaaatcaaacctggagaacatcgacttcaagatggcagctgaggaagagaaacgtttacgacatgatgtgatggctcacgtgcacacatttggccactgctgtccaaaagctgcaggcattattcaccttggtgctacttcttgctatgttggagacaatactgacttgattattcttagaaatgcacttgacctgcttttgccaaagcttgccagagtgatctctcggcttgccgactttgctaaggaacgagccagtctacccacattaggtttcacacatttccagcctgcacagctgaccacagttgggaaacgttgctgtctttggattcaggatctttgcatggatctccagaacttgaagcgtgtccgagatgacctgcgcttccggggagtaaagggtaccactggcactcaggccagtttcctgcagctctttgagggagatgaccataaggtagagcagcttgacaagatggtgacagaaaaggcaggatttaagagagctttcatcatcacagggcagacatatacacgaaaagtggatattgaagtactgtctgtgctggctagcttgggggcatcagtgcacaagaattgcacggctacgctccttgcaacttaagaaatgaagaactttggaaaaacaaatggtctaggcgatgcattaaacgn

SEQ ID NO: 452574 - DNA, 2480 bp, Homo sapiens
ctcattcagcatgcttgcctactcactatcctctgaagtctctctgcctttgcatcttgtcctttttttacatgggcaggctcaagtgcgatgccatataagcggaatcccatgcgttcagaacgttgctgcagtcttgcccgccacctgatgacccttgtcatggacccgctacagacagcatctgtccagtggtttgaacgcacactggatgatagtgccaaccggtcagtggcacagggacatcacatacaccaagttgagtggaggtctgaaggagggacctagaagtaaaaggacatatttgagcatctctacagtctccttatccccaaggatcccagagtctagcagggaggcaaaaacataaaaaggacagtgtgataagtgttacaattggagtgtgtactgggtactgtggagcaaagaggaaggaatagtgtttgaggagtcagaaagcttcacagtagaggtgatgccttaagacttaagaaatacatgcatcttttaaagacaagatcgggagcattataaaggcacaaagcaggagaaaacacacttgagggagttactactacttgagtagccctggggaatgaagtcaacatgtgccaggaggtggggcaggacatggtcacagatagccagtttatgaaaggtcttctgggtcttttctgaaggcagatagatgtcagttgtggtgtctaggcacaatgacatcttgattagttatgagatgagtcagaaataatttgtaactactgttgaggtgccaacatgcgcatcattttctgttttatgtatatactcacttaaagcagattggcattactctcgcctgctcgcattttgctggaatttcttgagtggatacggatgtatagttaaacctagctttctgggatctgtgcataatccacgatttatctctggaaataagtcatgtgaactcattcagaagtcagccattgaatactttttagcaaggtgtgaccctgtaggtctgctgatttgcctgctaaaagaccctagcaacagtttggagagttggctgtaaggagacagggatcatgtcagaacaagttaggggctactttaaaagtctgaggccacattggtgcagtggccatgtaaatggagaggaaggatatagatccagagtcgaaggcagactggccagcccagccctggtggttgaccggagtgagtataaagagcttggtgagtggggcgctactgccatttactgaggcaggagctacaagggaggaatggcaggtatgtaatggtgagtaggaggaatgagaaagtggctgagttcagtttggggattgaggtacccatagatcaaccaggtggacgtctcactcagtaggtatgaggtctggcacttgagcaagtggtctggcctagaggtgacagatttgagggtcgtgaggttattggggtaatcataagattgaaggagattatccagagagtacagtcagtagggcaacttgttgggacacacactgcatttcactgaaattatttgtttaaagacatactgaatggctatttgttttctagacggatctgtttggccgaggcatttcttaccgcagatactatattgaatacgctgcagaacatttctgaaggattggtcgtgtaccccaaagtaattgaacggcgcattcggcaagagctgcctttcatggccacagagaacatcatcatggccatggtcaaagctggaggtagccgccaggattgccatgagaaaatcagagtgctttctcagcaggcagcttctgtggttaagcaggaagggggtgacaatgacctcatagagcgtatccaggttgatgcctacttcagtcccattcactcccagttggatcatttactggatccttcttctttcactggtcgtgcctcccagcaggtgcagagattcttagaagaggaggtgtatcccctgttaaaaccatatgaaagcgtgatgaaggtgaaagcagaattatgtctgtagagttggaagagaattaaacgaaaatcattgttaattgctgaggcatgaaaattgtgttactataatgccttattttacctcgagaattgttaccttaaattagtacagcactttcttcttcccatggtgctttcctgtttctcagtctcacatttctcaacaaggcaaaaacaaagagcgttgaagttgactctgctcttgcatagtaaatgtagttcatacttgatctctgttctttcaaggcatattttccagctgcctcaagtttagtccttttcacgtgttcatttgcttgtaaagtagcaagaaatttctggtcctgtcttctaaaagtgaatttgatctaggtctagcaaaataacctggactcagtgattgagtcaatggtcagataccttttatttcggttatttttggctagtataagtgatgaagtttggaactacagtaaatacttaaaaaa

SEQ ID NO: 452575 - DNA, 939 bp, Homo sapiens
  misc_feature (197)..(197): n is a, c, g, or t
tccctacatggctgttggtcatggagatcctcaatgtcacgctggtgccctacggaaacgcacaggaacaaaatgtcagtggtaggtgggagttcaagtgccagcatggagaagaggagtgcaaattcaacaaggtagatatagaagagtcaaaagtgcactcttctatatctaccatcatggccatggtcaaagcnggaggtagccgccaggattgccatgagaaaatcagagtgctttctcagcaggcagcttctgtggttaagcaggaagggggtgacaatgacctcatagagcgtatccaggttgatgcctacttcagtcccattcactcccagttggatcatttactggatccttcttctttcactggtcgtgcctcccagcaggtgcagagattcttagaagaggaggtgtatcccctgttaaaaccatatgaaagcgtgatgaaggtgaaagcagaattatgtctgtagagttggaagagaattaaacgaaaatcattgttaattgctgaggcatgaaaattgtgttactataatgccttattttacctcgagaattgttaccttaaattagtacagcactttcttcttcccatggtgctttcctgtttctcagtctcacatttctcaacaaggcaaaaacaaagagcgttgaagttgactctgctcttgcatagtaaatgtagttcatacttgatctctgttctttcaaggcatattttccagctgcctcaagtttagtccttttcacgtgttcatttgcttgtaaagtagcaagaaatttctggtcctgtcttctaaaagtgaatttgatctaggtctagcaaaataacctggactcagtgattgagtcaatggtcagataccttttatttcggttatttttggctagtataagtgatgaagtttggaactacagtaaatacttaaaaaa

SEQ ID NO: 452576 - DNA, 264 bp, Homo sapiens
cttattcccctacctcccccagatttgcaccgacatacgcctcctggcaaacctcaaggagatggaggaaccctttgaaaaacagcagattggtgagtgctgtgtagagacctgtgagcacacattgctgctggaaggctgtggatgggggctgagagctcattcagcatgcttgcctactcactatcctctgaagtctctctgcctttgcatcttgtcctttttttacatgggcaggctcaagtgcgatgccatataagcgga

SEQ ID NO: 452577 - DNA, 1799 bp, Homo sapiens
ggtttccgcttccgctcttccctggtccagtccaccctggcggggtcgcagggttgggatggcggctggaggcgatcatggttcgcccgacagctaccgctcacctcttgcctcccgctatgccagcccggagatgtgcttcgtgtttagcgacaggtataaattccggacatggcggcagctgtggctgtggctggcggaggccgagcagacattgggtttgcctatcacagatgaacaaatccaggagatgaaatcaaacctggagaacatcgacttcaagatggcagctgaggaagagaaacgtttacgacatgatgtgatggctcacgtgcacacatttggccactgctgtccaaaagctgcaggcattattcaccttggtgctacttcttgctatgttggagacaatactgacttgattattcttagaaatgcacttgacctgcttttgccaaagcttgccagagtgatctctcggcttgccgactttgctaaggaacgagccagtctacccacattaggtttcacacatttccagcctgcacagctgaccacagttgggaaacgttgctgtctttggattcaggatctttgcatggatctccagaacttgaagcgtgtccgagatgacctgcgcttccggggagtaaagggtaccactggcactcaggccagtttcctgcagctctttgagggagatgaccataaggtagagcagcttgacaagatggtgacagaaaaggcaggatttaagagagctttcatcatcacagggcagacatatacacgaaaagtggatattgaagtactgtctgtgctggctagcttgggggcatcagtgcacaagatttgcaccgacatacgcctcctggcaaacctcaaggagatggaggaaccctttgaaaaacagcagattggctcaagtgcgatgccatataagcggaatcccatgcgttcagaacgttgctgcagtcttgcccgccacctgatgacccttgtcatggacccgctacagacagcatctgtccagtggtttgaacgcacactggatgatagtgccaaccgacggatctgtttggccgaggcatttcttaccgcagatactatattgaatacgctgcagaacatttctgaaggattggtcgtgtaccccaaagtaattgaacggcgcattcggcaagagctgcctttcatggccacagagaacatcatcatggccatggtcaaagctggaggtagccgccaggtgcagagattcttagaagaggaggtgtatcccctgttaaaaccatatgaaagcgtgatgaaggtgaaagcagaattatgtctgtagagttggaagagaattaaacgaaaatcattgttaattgctgaggcatgaaaattgtgttactataatgccttattttacctcgagaattgttaccttaaattagtacagcactttcttcttcccatggtgctttcctgtttctcagtctcacatttctcaacaaggcaaaaacaaagagcgttgaagttgactctgctcttgcatagtaaatgtagttcatacttgatctctgttctttcaaggcatattttccagctgcctcaagtttagtccttttcacgtgttcatttgcttgtaaagtagcaagaaatttctggtcctgtcttctaaaagtgaatttgatctaggtctagcaaaataacctggactcagtgattgagtcaatggtcagataccttttatttcggttatttttggctagtataagtgatgaagtttggaactacagtaaatacttaaaaaa

SEQ ID NO: 452578 - DNA, 3321 bp, Homo sapiens
ggtttccgcttccgctcttccctggtccagtccaccctggcggggtcgcagggttgggatggcggctggaggcgatcatggttcgcccgacagctaccgctcacctcttgcctcccgctatgccagcccggagatgtgcttcgtgtttagcgacaggtataaattccggacatggcggcagctgtggctgtggctggcggaggccgagcagacattgggtttgcctatcacagatgaacaaatccaggagatgaaatcaaacctggagaacatcgacttcaagatggcagctgaggaagagaaacgtttacgacatgatgtgatggctcacgtgcacacatttggccactgctgtccaaaagctgcaggcattattcaccttggtgctacttcttgctatgttggagacaatactgacttgattattcttagaaatgcacttgacctgcttttgccaaagcttgccagagtgatctctcggcttgccgactttgctaaggaacgagccagtctacccacattaggtttcacacatttccagcctgcacagctgaccacagttgggaaacgttgctgtctttggattcaggatctttgcatggatctccagaacttgaagcgtgtccgagatgacctgcgcttccggggagtaaagggtaccactggcactcaggccagtttcctgcagctctttgagggagatgaccataaggtagagcagcttgacaagatggtgacagaaaaggcaggatttaagagagctttcatcatcacagggcagacatatacacgaaaagtggatattgaagtactgtctgtgctggctagcttgggggcatcagtgcacaagatttgcaccgacatacgcctcctggcaaacctcaaggagatggaggaaccctttgaaaaacagcagattggctcaagtgcgatgccatataagcggaatcccatgcgttcagaacgttgctgcagtcttgcccgccacctgatgacccttgtcatggacccgctacagacagcatctgtccagtggtttgaacgcacactggatgatagtgccaaccggtcagtggcacagggacatcacatacaccaagttgagtggaggtctgaaggagggacctagaagtaaaaggacatatttgagcatctctacagtctccttatccccaaggatcccagagtctagcagggaggcaaaaacataaaaaggacagtgtgataagtgttacaattggagtgtgtactgggtactgtggagcaaagaggaaggaatagtgtttgaggagtcagaaagcttcacagtagaggtgatgccttaagacttaagaaatacatgcatcttttaaagacaagatcgggagcattataaaggcacaaagcaggagaaaacacacttgagggagttactactacttgagtagccctggggaatgaagtcaacatgtgccaggaggtggggcaggacatggtcacagatagccagtttatgaaaggtcttctgggtcttttctgaaggcagatagatgtcagttgtggtgtctaggcacaatgacatcttgattagttatgagatgagtcagaaataatttgtaactactgttgaggtgccaacatgcgcatcattttctgttttatgtatatactcacttaaagcagattggcattactctcgcctgctcgcattttgctggaatttcttgagtggatacggatgtatagttaaacctagctttctgggatctgtgcataatccacgatttatctctggaaataagtcatgtgaactcattcagaagtcagccattgaatactttttagcaaggtgtgaccctgtaggtctgctgatttgcctgctaaaagaccctagcaacagtttggagagttggctgtaaggagacagggatcatgtcagaacaagttaggggctactttaaaagtctgaggccacattggtgcagtggccatgtaaatggagaggaaggatatagatccagagtcgaaggcagactggccagcccagccctggtggttgaccggagtgagtataaagagcttggtgagtggggcgctactgccatttactgaggcaggagctacaagggaggaatggcaggtatgtaatggtgagtaggaggaatgagaaagtggctgagttcagtttggggattgaggtacccatagatcaaccaggtggacgtctcactcagtaggtatgaggtctggcacttgagcaagtggtctggcctagaggtgacagatttgagggtcgtgaggttattggggtaatcataagattgaaggagattatccagagagtacagtcagtagggcaacttgttgggacacacactgcatttcactgaaattatttgtttaaagacatactgaatggctatttgttttctagacggatctgtttggccgaggcatttcttaccgcagatactatattgaatacgctgcagaacatttctgaaggattggtcgtgtaccccaaagtaattgaacggcgcattcggcaagagctgcctttcatggccacagagaacatcatcatggccatggtcaaagctggaggtagccgccaggattgccatgagaaaatcagagtgctttctcagcaggcagcttctgtggttaagcaggaagggggtgacaatgacctcatagagcgtatccaggttgatgcctacttcagtcccattcactcccagttggatcatttactggatccttcttctttcactggtcgtgcctcccagcaggtgcagagattcttagaagaggaggtgtatcccctgttaaaaccatatgaaagcgtgatgaaggtgaaagcagaattatgtctgtagagttggaagagaattaaacgaaaatcattgttaattgctgaggcatgaaaattgtgttactataatgccttattttacctcgagaattgttaccttaaattagtacagcactttcttcttcccatggtgctttcctgtttctcagtctcacatttctcaacaaggcaaaaacaaagagcgttgaagttgactctgctcttgcatagtaaatgtagttcatacttgatctctgttctttcaaggcatattttccagctgcctcaagtttagtccttttcacgtgttcatttgcttgtaaagtagcaagaaatttctggtcctgtcttctaaaagtgaatttgatctaggtctagcaaaataacctggactcagtgattgagtcaatggtcagataccttttatttcggttatttttggctagtataagtgatgaagtttggaactacagtaaatacttaaaaaa

SEQ ID NO: 452579 - DNA, 1958 bp, Homo sapiens
  misc_feature (860)..(860): n is a, c, g, or t
ggtttccgcttccgctcttccctggtccagtccaccctggcggggtcgcagggttgggatggcggctggaggcgatcatggttcgcccgacagctaccgctcacctcttgcctcccgctatgccagcccggagatgtgcttcgtgtttagcgacaggtataaattccggacatggcggcagctgtggctgtggctggcggaggccgagcagacattgggtttgcctatcacagatgaacaaatccaggagatgaaatcaaacctggagaacatcgacttcaagatggcagctgaggaagagaaacgtttacgacatgatgtgatggctcacgtgcacacatttggccactgctgtccaaaagctgcaggcattattcaccttggtgctacttcttgctatgttggagacaatactgacttgattattcttagaaatgcacttgacctgcttttgccaaagcttgccagagtgatctctcggcttgccgactttgctaaggaacgagccagtctacccacattaggtttcacacatttccagcctgcacagctgaccacagttgggaaacgttgctgtctttggattcaggatctttgcatggatctccagaacttgaagcgtgtccgagatgacctgcgcttccggggagtaaagggtaccactggcactcaggccagtttcctgcagctctttgagggagatgaccataaggtagagcagcttgacaagatggtgacagaaaaggcaggatttaagagagctttcatcatcacagggcagacatatacacgaaaagtggatattgaagtactgtctgtgctggctagcttgggggcatcagtgcacaagatttgccgantagcctctggaaactcagggatggggaccttgaaaacagaatgctcaagtgcgatgccatataagcggaatcccatgcgttcagaacgttgctgcagtcttgcccgccacctgatgacccttgtcatggacccgctacagacagcatctgtccagtggtttgaacgcacactggatgatagtgccaaccgacggatctgtttggccgaggcatttcttaccgcagatactatattgaatacgctgcagaacatttctgaaggattggtcgtgtaccccaaagtaattgaacggcgcattcggcaagagctgcctttcatggccacagagaacatcatcatggccatggtcaaagctggaggtagccgccaggattgccatgagaaaatcagagtgctttctcagcaggcagcttctgtggttaagcaggaagggggtgacaatgacctcatagagcgtatccaggttgatgcctacttcagtcccattcactcccagttggatcatttactggatccttcttctttcactggtcgtgcctcccagcaggtgcagagattcttagaagaggaggtgtatcccctgttaaaaccatatgaaagcgtgatgaaggtgaaagcagaattatgtctgtagagttggaagagaattaaacgaaaatcattgttaattgctgaggcatgaaaattgtgttactataatgccttattttacctcgagaattgttaccttaaattagtacagcactttcttcttcccatggtgctttcctgtttctcagtctcacatttctcaacaaggcaaaaacaaagagcgttgaagttgactctgctcttgcatagtaaatgtagttcatacttgatctctgttctttcaaggcatattttccagctgcctcaagtttagtccttttcacgtgttcatttgcttgtaaagtagcaagaaatttctggtcctgtcttctaaaagtgaatttgatctaggtctagcaaaataacctggactcagtgattgagtcaatggtcagataccttttatttcggttatttttggctagtataagtgatgaagtttggaactacagtaaatacttaaaaaa

SEQ ID NO: 452580 - DNA, 1896 bp, Homo sapiens
ggtttccgcttccgctcttccctggtccagtccaccctggcggggtcgcagggttgggatggcggctggaggcgatcatggttcgcccgacagctaccgctcacctcttgcctcccgctatgccagcccggagatgtgcttcgtgtttagcgacaggtataaattccggacatggcggcagctgtggctgtggctggcggaggccgagcagacattgggtttgcctatcacagatgaacaaatccaggagatgaaatcaaacctggagaacatcgacttcaagatggcagctgaggaagagaaacgtttacgacatgatgtgatggctcacgtgcacacatttggccactgctgtccaaaagctgcaggcattattcaccttggtgctacttcttgctatgttggagacaatactgacttgattattcttagaaatgcacttgacctgcttttgccaaaggcctgcacagctgaccacagttgggaaacgttgctgtctttggattcaggatctttgcatggatctccagaacttgaagcgtgtccgagatgacctgcgcttccggggagtaaagggtaccactggcactcaggccagtttcctgcagctctttgagggagatgaccataaggtagagcagcttgacaagatggtgacagaaaaggcaggatttaagagagctttcatcatcacagggcagacatatacacgaaaagtggatattgaagtactgtctgtgctggctagcttgggggcatcagtgcacaagatttgcaccgacatacgcctcctggcaaacctcaaggagatggaggaaccctttgaaaaacagcagattggctcaagtgcgatgccatataagcggaatcccatgcgttcagaacgttgctgcagtcttgcccgccacctgatgacccttgtcatggacccgctacagacagcatctgtccagtggtttgaacgcacactggatgatagtgccaaccgacggatctgtttggccgaggcatttcttaccgcagatactatattgaatacgctgcagaacatttctgaaggattggtcgtgtaccccaaagtaattgaacggcgcattcggcaagagctgcctttcatggccacagagaacatcatcatggccatggtcaaagctggaggtagccgccaggattgccatgagaaaatcagagtgctttctcagcaggcagcttctgtggttaagcaggaagggggtgacaatgacctcatagagcgtatccaggttgatgcctacttcagtcccattcactcccagttggatcatttactggatccttcttctttcactggtcgtgcctcccagcaggtgcagagattcttagaagaggaggtgtatcccctgttaaaaccatatgaaagcgtgatgaaggtgaaagcagaattatgtctgtagagttggaagagaattaaacgaaaatcattgttaattgctgaggcatgaaaattgtgttactataatgccttattttacctcgagaattgttaccttaaattagtacagcactttcttcttcccatggtgctttcctgtttctcagtctcacatttctcaacaaggcaaaaacaaagagcgttgaagttgactctgctcttgcatagtaaatgtagttcatacttgatctctgttctttcaaggcatattttccagctgcctcaagtttagtccttttcacgtgttcatttgcttgtaaagtagcaagaaatttctggtcctgtcttctaaaagtgaatttgatctaggtctagcaaaataacctggactcagtgattgagtcaatggtcagataccttttatttcggttatttttggctagtataagtgatgaagtttggaactacagtaaatacttaaaaaa

SEQ ID NO: 452581 - DNA, 1017 bp, Homo sapiens
  misc_feature (860)..(860): n is a, c, g, or t
  misc_feature (912)..(912): n is a, c, g, or t
  misc_feature (915)..(917): n is a, c, g, or t
  misc_feature (920)..(920): n is a, c, g, or t
  misc_feature (924)..(924): n is a, c, g, or t
  misc_feature (929)..(929): n is a, c, g, or t
  misc_feature (934)..(934): n is a, c, g, or t
ggtttccgcttccgctcttccctggtccagtccaccctggcggggtcgcagggttgggatggcggctggaggcgatcatggttcgcccgacagctaccgctcacctcttgcctcccgctatgccagcccggagatgtgcttcgtgtttagcgacaggtataaattccggacatggcggcagctgtggctgtggctggcggaggccgagcagacattgggtttgcctatcacagatgaacaaatccaggagatgaaatcaaacctggagaacatcgacttcaagatggcagctgaggaagagaaacgtttacgacatgatgtgatggctcacgtgcacacatttggccactgctgtccaaaagctgcaggcattattcaccttggtgctacttcttgctatgttggagacaatactgacttgattattcttagaaatgcacttgacctgcttttgccaaagcttgccagagtgatctctcggcttgccgactttgctaaggaacgagccagtctacccacattaggtttcacacatttccagcctgcacagctgaccacagttgggaaacgttgctgtctttggattcaggatctttgcatggatctccagaacttgaagcgtgtccgagatgacctgcgcttccggggagtaaagggtaccactggcactcaggccagtttcctgcagctctttgagggagatgaccataaggtagagcagcttgacaagatggtgacagaaaaggcaggatttaagagagctttcatcatcacagggcagacatatacacgaaaagtggatattgaagtactgtctgtgctggctagcttgggggcatcagtgcacaagatttgccgantagcctctggaaactcagggatggggaccttgaaaacagaatggtccggggngcnnnaangganccggntcaantgtggttgccccggtactttggcgcaaaatttctcggttggccgcgtttgcccggctggggaaccacattaacggacgtgtcc

SEQ ID NO: 452582 - DNA, 886 bp, Homo sapiens
ggtttccgcttccgctcttccctggtccagtccaccctggcggggtcgcagggttgggatggcggctggaggcgatcatggttcgcccgacagctaccgctcacctcttgcctcccgctatgccagcccggagatgtgcttcgtgtttagcgacaggtataaattccggacatggcggcagctgtggctgtggctggcggaggccgagcagacattgggtttgcctatcacagatgaacaaatccaggagatgaaatcaaacctggagaacatcgacttcaagatggcagctgaggaagagaaacgtttacgacatgatgtgatggctcacgtgcacacatttggccactgctgtccaaaagctgcaggcattattcaccttggtgctacttcttgctatgttggagacaatactgacttgattattcttagaaatgcacttgacctgcttttgccaaagcttgccagagtgatctctcggcttgccgactttgctaaggaacgagccagtctacccacattaggtttcacacatttccagcctgcacagctgaccacagttgggaaacgttgctgtctttggattcaggattgccatgagaaaatcagagtgctttctcagcaggcagcttctgtggttaagcaggaagggggtgacaatgacctcatagagcgtatccaggttgatgcctacttcagtcccattcactcccagttggatcatttactggatccttcttctttcactggtcgtgcctcccagcaggtgcagagattcttagaagaggaggtgtatcccctgttaaaaccatatgaaagcgtgatgaaggtgaaagcagaattatgtctgtagagttggaagagaattaaacgaaaatcattgtta

SEQ ID NO: 452583 - DNA, 531 bp, Homo sapiens
atgaggtgccagccttgctttatatgttgcccacttataacttatgttggaaaaaatagccctcttaggaaaagacataaaaagtgaacttacgttgctagagagaagcttgcacaccatcataagataaaaaacaggcctctggctccaccgtctcattgaagtgatgctgtttatcctccccactaatctgcactcctcacatggatcacagcccagacaacatgcagacagagaggcagatgcagagctcactgactcagtgagcacagctgggggagatcattaaacagaccactcctgccaaacagcctgcggtggtggaacacgaagacttccttgcctcgccacatggagaaagaatttttttttcccggagacatgtatagtagaataattatacactatctgagtgccagttattaaaaaacagctaacggtattaaaaattaaaaaaatgagagagtgagtaagctaggacactttgaatacttcataagttatacctatgctacttcaatttaaatcctt

SEQ ID NO: 452584 - DNA, 1051 bp, Homo sapiens
  misc_feature (25)..(25): n is a, c, g, or t
  misc_feature (794)..(794): n is a, c, g, or t
cggacgcgtgggtcgaccacgcgtncggtaggacacagtgagaaggcaccatctaccaaccagagagtgggtcctcagcagacactgaatctaccagtgccttgatcttggacttcctagcctccagaaccgtgagaagtaaatttctgtttatttaaacagtcaagtaaaatcaagctgggtaatcatggcagaaggtggatttgatccctgtgaatgtgtttgctctcatgaacatgcaatgagaagactgatcaatctgttacggcagtcccagtcctactgcacagacacagagtgtcttcaggaattaccgggaccctctggtgataatggcatcagtgttacaatgatcttggtagcctggatggttattgcattgatcttgttcttactgagacctcctaatctaagaggatccagcctacctggaaagccaaccagtcctcataatggacaagatccaccagctcctcctgtggactaactttgtgatatgggaagtgaaaatagttaacaccttgcacgaccaaacgaacgaagatgaccagagtactcttaaccccattagaactgtttttccttttgtatctgcaatatgggatggtattgttttcatgagcttctagaaatttcacttgcaagtttatttttgcttcctgtgttactgccattcctatttacagtatatttgagtgaatgattatatttttaaaaagttacatggggcttttttggttgtcctaaacttacaaacattccactcattctgtgtggactgggatataatgggnaaaatcgggccgaatgaggaaatgggagagcgcgataaaaattttaccaaattggaaaggggttaaaaggcgtgtcaacaacgggataataggaattgggcggcggagggggtggagaaattacaccgggtgttcattacgggggatagggggaagacagatatagagagaggagtcagctggaaaacaacatgtggtgttatagttttataaagaaaacgtgttttcgcctgctctcttccttacaaataaaaagt

SEQ ID NO: 452585 - DNA, 808 bp, Homo sapiens
  misc_feature (25)..(25): n is a, c, g, or t
cggacgcgtgggtcgaccacgcgtncggtaggacacagtgagaaggcaccatctaccaaccagagagtgggtcctcagcagacactgaatctaccagtgccttgatcttggacttcctagcctccagaaccgtgagaagtaaatttctgtttatttaaacagtcaagtaaaatcaagctgggtaatcatggcagaaggtggatttgatccctgtgaatgtgtttgctctcatgaacatgcaatgagaagactgatcaatctgtaccgggaccctctggtgataatggcatcagtgttacaatgatcttggtagcctggatggttattgcattgatcttgttcttactgagacctcctaatctaagaggatccagcctacctggaaagccaaccagtcctcataatggacaagatccaccagctcctcctgtggactaactttgtgatatgggaagtgaaaatagttaacaccttgcacgaccaaacgaacgaagatgaccagagtactcttaaccccattagaactgtttttccttttgtatctgcaatatgggatggtattgttttcatgagcttctagaaatttcacttgcaagtttatttttgcttcctgtgttactgccattcctatttacagtatatttgagtgaatgattatatttttaaaaagttacatggggcttttttggttgtcctaaacttacaaacattccactcattctgtttgtaactgtgattataatttttgtgataatttctggcctgattgaaggaaatttgagagtatcttctgccgatggaccactca

SEQ ID NO: 452586 - DNA, 3746 bp, Homo sapiens
ggcggggcagctggagtctccaggcgctgcaatctgttgcgccgccgcccgcgggagccggcagatccgggtcttgtggctaagagtgacgtggtcactcgaatcaaaacagaggagggggaggaagccggcggccagaaacggcagtggcagcagcgtccggagcagccgcagccttctggaagctccaggcggtctttctgccgagcctcggtcccggcccccatcctccccgccccatcggttgttgtctgggcggatttaaacagtcaagtaaaatcaagctgggtaatcatggcagaaggtggatttgatccctgtgaatgtgtttgctctcatgaacatgcaatgagaagactgatcaatctgttacggcagtcccagtcctactgcacagacacagagtgtcttcaggaattaccgggaccctctggtgataatggcatcagtgttacaatgatcttggtagcctggatggttattgcattgatcttgttcttactgagacctcctaatctaagaggatccagcctacctggaaagccaaccagtcctcataatggacaagatccaccagctcctcctgtggactaactttgtgatatgggaagtgaaaatagttaacaccttgcacgaccaaacgaacgaagatgaccagagtactcttaaccccattagaactgtttttccttttgtatctgcaatatgggatggtattgttttcatgagcttctagaaatttcacttgcaagtttatttttgcttcctgtgttactgccattcctatttacagtatatttgagtgaatgattatatttttaaaaagttacatggggcttttttggttgtcctaaacttacaaacattccactcattctgtttgtaactgtgattataatttttgtgataatttctggcctgattgaaggaaatttgagaggtctgcatttatatattttaaatagatttgataggtttttaaattgctttttttcataaggtatttataaagttatttggggttgtctgggattgtgtgaaagaaaattagaaccacgctgtatttacatttaccttggtagtttatttgtggatggcagttttctgtagttttggggactgtggtagctcttggattgttttgcaaattacagctgaaatctgtgtcatggattaaactggcttatgtggctagaataggaagagagaaaaaatgaaatggttgtttactaattttatactcccattaaaaatctctaatgttaagaaaaccttaaataaacatgattgatcaatatggcagatgatttacagtccattatatgacatttgtaagccactcaacactagccttacaaggttcatgaaaggaggaaaacattaattctttctgcctttgctgatataatccacatagtaataatttaagctataatttatttttaaaatgagtgcctcttgggaagcttcttttctgttctaacagttccctgttaaaatgaaaatcttaggccagtgcagtggctcacacctgtaatcccagcactttgggaggctgaggtgggtggatcacttgaggtcaggagttcgagaccagcctggccaacatggtgaaaccctgtctctactaaaaatacagaaaaattagccagggttggtgcatgtgcctgtaatcccagctactcaggaggccaaagcaggagaattgcttgaacccgggaggtggaggttgcagtgaaccaagatcgcaccactgcattccagcctaagcaatagagcgagactccctctcaaaaaaaaaaaaagaagaaaatcttaaagctgtattagggcctgttaggttactgatatttgaatgcctatttacttatttactacattgagtcttttgttatcctctgacctataaaatattttaataaattactggtttacttcaagggaaaagaaggaaaatgagaaacatacatctttttttcactccttatctcattcctgtttggtgatgggatggattggggtaggaaggaatgttaatatgagagaaattttaaaatgtataaaaaagtaaaaggttgtattgttttgctcagtttgaaataaagtgaataccaatagcagtgcctggccagaaaatctggattcttattcctagttcttcatttctgtcacatgcacttagttgacattacatctacatatattagctttttcctacatgagccatctatttacttagtaaccagtgttcttaatgaagtatttagtcttgggtttcttgtaaaatttctctgcattccttagacagtgtactatacatgaaatattcttgttgacctagtaatttatattattccatttaattcttaaacctatggcctttttattgagcacactcttaaatcattatttggcttgtaaacattcatctgaattgtggctacaatcctctttaaataatctaggaaaaaagaaagataaagcttacattttcacagttttggctcttaaacacattccacaaatgccattaagaatttattttgttttaggccagtcatggtggctcatgcctgtaatcccagcaatttgggaggctgaggcaagaactgcttgagcccaggagtttgagactagcctgggcaacatagcaagaccctgtctctaccaaaaaaaaaaaagtttattttgttttagagtcatttaatgtgtttttatgcacaataatagtgggaggttgttttgttgcatttgtttgtttgttttgttttgttttgttttgctttccatgtgggaaaagttaacattggaactgtttctagtaaaagatttttttcaggctgggcacggtggctcatgcctgtaatcccaacactttgggagaccgagggagctggatcacctgaggtcaggagttcgagaccagcctggccaacatggaaaaactccatctccactaaaaatacaaaagtagcctggtgtggtggcacatgcctgtaatcccagctacttgggaagctgaggcaggagaatcacttgaacctgggaggtggaggttgcagtgagccaagatcacgccattgcactccagcctgggcaacaagagtgaaactccgtctcaaaaaaaaaaaaaaaaagatgtttttcatttttttcatgttatctatccaagcactgttccatggtcagcaagtcatatttcataatgtggattttccaaaataattattgaatacagctattctatggctacttttagtgtttttgtggtatgtggtgtgggagtgtttatggaattaccagtatcttaaattttcaaaggaaccttggaagtctatcactctaaatgaaagtctgtcactctacatgaattatgtgctcaaatttgaccaactcagtttaagacacaaaacagtaatttgaagaaggaaaaatgaagagagtttctagtttaatgggttaaatttttgttgttgcaatagtaagtttagtcttcttataatatttctaaatgaaaaatcataggtatttgttaccatgtgtgaagattactttgttaaaagcaaaagtggtcgtgtgatatgctaaatgttaattactgattttatatgtttaaatcacgccaaacaaattatgtctgtgccatccagggtctgttgttaatctttttctgagtacttggattgggataaagggcttgtactatgcactttttattaatgaataaatagaaaacgttagtaaca

SEQ ID NO: 452587 - DNA, 4054 bp, Homo sapiens
ggcggggcagctggagtctccaggcgctgcaatctgttgcgccgccgcccgcgggagccggcagatccgggtcttgtggctaagagtgacgtggtcactcgaatcaaaacagaggagggggaggaagccggcggccagaaacggcagtggcagcagcgtccggagcagccgcagccttctggaagctccaggcggtctttctgccgagcctcggtcccggcccccatcctccccgccccatcggttgttgtctgggcggatttaaacagtcaagtaaaatcaagctgggtaatcatggcagaaggtggatttgatccctgtgaatgtgtttgctctcatgaacatgcaatgagaagactgatcaatctgttacggcagtcccagtcctactgcacagacacagagtgtcttcaggaattaccgggaccctctggtgataatggcatcagtgttacaatgatcttggtagcctggatggttattgcattgatcttgttcttactgagacctcctaatctaagaggatccagcctacctggaaagccaaccagtcctcataatggacaagatccaccagctcctcctgtggactaactttgtgatatgggaagtgaaaatagttaacaccttgcacgaccaaacgaacgaagatgaccagagtactcttaaccccattagaactgtttttccttttgtatctgcaatatgggatggtattgttttcatgagcttctagaaatttcacttgcaagtttatttttgcttcctgtgttactgccattcctatttacagtatatttgagtgaatgattatatttttaaaaagttacatggggcttttttggttgtcctaaacttacaaacattccactcattctgtttgtaactgtgattataatttttgtgataatttctggcctgattgaaggaaatttgagaggtctgcatttatatattttaaatagatttgataggtttttaaattgctttttttcataaggtatttataaagttatttggggttgtctgggattgtgtgaaagaaaattagaaccacgctgtatttacatttaccttggtagtttatttgtggatggcagttttctgtagttttggggactgtggtagctcttggattgttttgcaaattacagctgaaatctgtgtcatggattaaactggcttatgtggctagaataggaagagagaaaaaatgaaatggttgtttactaattttatactcccattaaaaatctctaatgttaagaaaaccttaaataaacatgattgatcaatatggcagatgatttacagtccattatatgacatttgtaagccactcaacactagccttacaaggttcatgaaaggaggaaaacattaattctttctgcctttgctgatataatccacatagtaataatttaagctataatttatttttaaaatgagtgcctcttgggaagcttcttttctgttctaacagttccctgttaaaatgaaaatcttaggccagtgcagtggctcacacctgtaatcccagcactttgggaggctgaggtgggtggatcacttgaggtcaggagttcgagaccagcctggccaacatggtgaaaccctgtctctactaaaaatacagaaaaattagccagggttggtgcatgtgcctgtaatcccagctactcaggaggccaaagcaggagaattgcttgaacccgggaggtggaggttgcagtgaaccaagatcgcaccactgcattccagcctaagcaatagagcgagactccctctcaaaaaaaaaaaaagaagaaaatcttaaagctgtattagggcctgttaggttactgatatttgaatgcctatttacttatttactacattgagtcttttgttatcctctgacctataaaatattttaataaattactggtttacttcaagggaaaagaaggaaaatgagaaacatacatctttttttcactccttatctcattcctgtttggtgatgggatggattggggtaggaaggaatgttaatatgagagaaattttaaaatgtataaaaaagtaaaaggttgtattgttttgctcagtttgaaataaagtgaataccaatagcacttaaaaatgtctgcatgggctgggcacggtggctcacgcctgtaatcccagcactttgggaggccgaggcaggcgaatcacctgaggtcaggagttcgagaccagcctgaccaacatggtgaaaccttatctctactaaaaatgcaaaaattagccaggcatggtggtgtgtgcctataatcccagctactggggaagctgaggcaggaaattgcttgaacctgggagacggaggttgcagtaagctgagatcgtgccactgcactccaatcagggcgacagagcgagactctgtctcaaaataaataaataaataaaaatgtctgcatgacccatatggttatgaagtttttttcctagcaaatgattgcagattatttatgggggctagaagatattttgctatcaatgtaaggatttttttccccttaggtcagtctattcactgtttagatctggtaaattacttgtatgaattgaataaattctctgtatcattgtactgtttaatagtctctgatacaattgtgatactcataaggtattttcccccctttattatgattacattctagatcataaacattgtaagggcatcttttcattatataatccaatattgattgtttgaattcctccttgtacatcctggctttgtgctcaatttcttgaaataatataaccaactctaaattacttgtgttaatagatcggtaacatgacacaggtaagttaaatcctggataaatgagccccacagaataaaggtttttcctcttgctgtggcctactggaagccttcctaactctatagctggtaaagtagagcagaaagggccagaatggcttaagatggagctaaatccctatagcattccattttctgctcttgcctcttgaacttagaaggcttgcccatatatcctaacaatctgttctctgagctgttaggccaatccctggcaagagatattgatgtagtcactgaatctatggctcacaaataattgaaaattggctttgggagctgggcgcagtgactcatgcctgtaatcccagcactttgggaggctggggcaggtggatcacttgaggtcaggaggttgagaccagcctggccaacatggaaaaactccatctccactaaaaatacaaaagtagcctggtgtggtggcacatgcctgtaatcccagctacttgggaagctgaggcaggagaatcacttgaacctgggaggtggaggttgcagtgagccaagatcacgccattgcactccagcctgggcaacaagagtgaaactccgtctcaaaaaaaaaaaaaaaaagatgtttttcatttttttcatgttatctatccaagcactgttccatggtcagcaagtcatatttcataatgtggattttccaaaataattattgaatacagctattctatggctacttttagtgtttttgtggtatgtggtgtgggagtgtttatggaattaccagtatcttaaattttcaaaggaaccttggaagtctatcactctaaatgaaagtctgtcactctacatgaattatgtgctcaaatttgaccaactcagtttaagacacaaaacagtaatttgaagaaggaaaaatgaagagagtttctagtttaatgggttaaatttttgttgttgcaatagtaagtttagtcttcttataatatttctaaatgaaaaatcataggtatttgttaccatgtgtgaagattactttgttaaaagcaaaagtggtcgtgtgatatgctaaatgttaattactgattttatatgtttaaatcacgccaaacaaattatgtctgtgccatccagggtctgttgttaatctttttctgagtacttggattgggataaagggcttgtactatgcactttttattaatgaataaatagaaaacgttagtaaca

SEQ ID NO: 452588 - DNA, 3433 bp, Homo sapiens
ggcggggcagctggagtctccaggcgctgcaatctgttgcgccgccgcccgcgggagccggcagatccgggtcttgtggctaagagtgacgtggtcactcgaatcaaaacagaggagggggaggaagccggcggccagaaacggcagtggcagcagcgtccggagcagccgcagccttctggaagctccaggcggtctttctgccgagcctcggtcccggcccccatcctccccgccccatcggttgttgtctgggcggatttaaacagtcaagtaaaatcaagctgggtaatcatggcagaaggtggatttgatccctgtgaatgtgtttgctctcatgaacatgcaatgagaagactgatcaatctgttacggcagtcccagtcctactgcacagacacagagtgtcttcaggaattaccgggaccctctggtgataatggcatcagtgttacaatgatcttggtagcctggatggttattgcattgatcttgttcttactgagacctcctaatctaagaggatccagcctacctggaaagccaaccagtcctcataatggacaagatccaccagctcctcctgtggactaactttgtgatatgggaagtgaaaatagttaacaccttgcacgaccaaacgaacgaagatgaccagagtactcttaaccccattagaactgtttttccttttgtatctgcaatatgggatggtattgttttcatgagcttctagaaatttcacttgcaagtttatttttgcttcctgtgttactgccattcctatttacagtatatttgagtgaatgattatatttttaaaaagttacatggggcttttttggttgtcctaaacttacaaacattccactcattctgtttgtaactgtgattataatttttgtgataatttctggcctgattgaaggaaatttgagaggtctgcatttatatattttaaatagatttgataggtttttaaattgctttttttcataaggtatttataaagttatttggggttgtctgggattgtgtgaaagaaaattagaaccacgctgtatttacatttaccttggtagtttatttgtggatggcagttttctgtagttttggggactgtggtagctcttggattgttttgcaaattacagctgaaatctgtgtcatggattaaactggcttatgtggctagaataggaagagagaaaaaatgaaatggttgtttactaattttatactcccattaaaaatctctaatgttaagaaaaccttaaataaacatgattgatcaatatggcagatgatttacagtccattatatgacatttgtaagccactcaacactagccttacaaggttcatgaaaggaggaaaacattaattctttctgcctttgctgatataatccacatagtaataatttaagctataatttatttttaaaatgagtgcctcttgggaagcttcttttctgttctaacagttccctgttaaaatgaaaatcttaggccagtgcagtggctcacacctgtaatcccagcactttgggaggctgaggtgggtggatcacttgaggtcaggagttcgagaccagcctggccaacatggtgaaaccctgtctctactaaaaatacagaaaaattagccagggttggtgcatgtgcctgtaatcccagctactcaggaggccaaagcaggagaattgcttgaacccgggaggtggaggttgcagtgaaccaagatcgcaccactgcattccagcctaagcaatagagcgagactccctctcaaaaaaaaaaaaagaagaaaatcttaaagctgtattagggcctgttaggttactgatatttgaatgcctatttacttatttactacattgagtcttttgttatcctctgacctataaaatattttaataaattactggtttacttcaagggaaaagaaggaaaatgagaaacatacatctttttttcactccttatctcattcctgtttggtgatgggatggattggggtaggaaggaatgttaatatgagagaaattttaaaatgtataaaaaagtaaaaggttgtattgttttgctcagtttgaaataaagtgaataccaatagcagtgcctggccagaaaatctggattcttattcctagttcttcatttctgtcacatgcacttagttgacattacatctacatatattagctttttcctacatgagccatctatttacttagtaaccagtgttcttaatgaagtatttagtcttgggtttcttgtaaaatttctctgcattccttagacagtgtactatacatgaaatattcttgttgacctagtaatttatattattccatttaattcttaaacctatggcctttttattgagcacactcttaaatcattatttggcttgtaaacattcatctgaattgtggctacaatcctctttaaataatctaggaaaaaagaaagataaagcttacattttcacagttttggctcttaaacacattccacaaatgccattaagaatttattttgttttaggccagtcatggtggctcatgcctgtaatcccagcaatttgggaggctgaggcaagaactgcttgagcccaggagtttgagactagcctgggcaacatagcaagaccctgtctctaccaaaaaaaaaaaagtttattttgttttagagtcatttaatgtgtttttatgcacaataatagtgggaggtggaggttgcagtgagccaagatcacgccattgcactccagcctgggcaacaagagtgaaactccgtctcaaaaaaaaaaaaaaaaagatgtttttcatttttttcatgttatctatccaagcactgttccatggtcagcaagtcatatttcataatgtggattttccaaaataattattgaatacagctattctatggctacttttagtgtttttgtggtatgtggtgtgggagtgtttatggaattaccagtatcttaaattttcaaaggaaccttggaagtctatcactctaaatgaaagtctgtcactctacatgaattatgtgctcaaatttgaccaactcagtttaagacacaaaacagtaatttgaagaaggaaaaatgaagagagtttctagtttaatgggttaaatttttgttgttgcaatagtaagtttagtcttcttataatatttctaaatgaaaaatcataggtatttgttaccatgtgtgaagattactttgttaaaagcaaaagtggtcgtgtgatatgctaaatgttaattactgattttatatgtttaaatcacgccaaacaaattatgtctgtgccatccagggtctgttgttaatctttttctgagtacttggattgggataaagggcttgtactatgcactttttattaatgaataaatagaaaacgttagtaaca

SEQ ID NO: 452589 - DNA, 3299 bp, Homo sapiens
ggcggggcagctggagtctccaggcgctgcaatctgttgcgccgccgcccgcgggagccggcagatccgggtcttgtggctaagagtgacgtggtcactcgaatcaaaacagaggagggggaggaagccggcggccagaaacggcagtggcagcagcgtccggagcagccgcagccttctggaagctccaggcggtctttctgccgagcctcggtcccggcccccatcctccccgccccatcggttgttgtctgggcggatttaaacagtcaagtaaaatcaagctgggtaatcatggcagaaggtggatttgatccctgtgaatgtgtttgctctcatgaacatgcaatgagaagactgatcaatctgttacggcagtcccagtcctactgcacagacacagagtgtcttcaggaattaccgggaccctctggtgataatggcatcagtgttacaatgatcttggtagcctggatggttattgcattgatcttgttcttactgagacctcctaatctaagaggatccagcctacctggaaagccaaccagtcctcataatggacaagatccaccagctcctcctgtggactaactttgtgatatgggaagtgaaaatagttaacaccttgcacgaccaaacgaacgaagatgaccagagtactcttaaccccattagaactgtttttccttttgtatctgcaatatgggatggtattgttttcatgagcttctagaaatttcacttgcaagtttatttttgcttcctgtgttactgccattcctatttacagtatatttgagtgaatgattatatttttaaaaagttacatggggcttttttggttgtcctaaacttacaaacattccactcattctgtttgtaactgtgattataatttttgtgataatttctggcctgattgaaggaaatttgagaggtctgcatttatatattttaaatagatttgataggtttttaaattgctttttttcataaggtatttataaagttatttggggttgtctgggattgtgtgaaagaaaattagaaccacgctgtatttacatttaccttggtagtttatttgtggatggcagttttctgtagttttggggactgtggtagctcttggattgttttgcaaattacagctgaaatctgtgtcatggattaaactggcttatgtggctagaataggaagagagaaaaaatgaaatggttgtttactaattttatactcccattaaaaatctctaatgttaagaaaaccttaaataaacatgattgatcaatatggcagatgatttacagtccattatatgacatttgtaagccactcaacactagccttacaaggttcatgaaaggaggaaaacattaattctttctgcctttgctgatataatccacatagtaataatttaagctataatttatttttaaaatgagtgcctcttgggaagcttcttttctgttctaacagttccctgttaaaatgaaaatcttaggccagtgcagtggctcacacctgtaatcccagcactttgggaggctgaggtgggtggatcacttgaggtcaggagttcgagaccagcctggccaacatggtgaaaccctgtctctactaaaaatacagaaaaattagccagggttggtgcatgtgcctgtaatcccagctactcaggaggccaaagcaggagaattgcttgaacccgggaggtggaggttgcagtgaaccaagatcgcaccactgcattccagcctaagcaatagagcgagactccctctcaaaaaaaaaaaaagaagaaaatcttaaagctgtattagggcctgttaggttactgatatttgaatgcctatttacttatttactacattgagtcttttgttatcctctgacctataaaatattttaataaattactggtttacttcaagggaaaagaaggaaaatgagaaacatacatctttttttcactccttatctcattcctgtttggtgatgggatggattggggtaggaaggaatgttaatatgagagaaattttaaaatgtataaaaaagtaaaaggttgtattgttttgctcagtttgaaataaagtgaataccaatagcagtgcctggccagaaaatctggattcttattcctagttcttcatttctgtcacatgcacttagttgacattacatctacatatattagctttttcctacatgagccatctatttacttagtaaccagtgttcttaatgaagtatttagtcttgggtttcttgtaaaatttctctgcattccttagacagtgtactatacatgaaatattcttgttgacctagtaatttatattattccatttaattcttaaacctatggcctttttattgagcacactcttaaatcattatttggcttgtaaacattcatctgaattgtggctacaatcctctttaaataatctaggaaaaaagaaagataaagcttacattttcacagttttggctcttaaacacattccacaaatgccattaagaatttattttgttttaggccagtcatggtggctcatgcctgtaatcccagcaatttgggaggctgaggcaagaactgcttgagcccaggagtttgagactagcctgggcaacatagcaagaccctgtctctaccaaaaaaaaaaaaaaaaaaaaagatgtttttcatttttttcatgttatctatccaagcactgttccatggtcagcaagtcatatttcataatgtggattttccaaaataattattgaatacagctattctatggctacttttagtgtttttgtggtatgtggtgtgggagtgtttatggaattaccagtatcttaaattttcaaaggaaccttggaagtctatcactctaaatgaaagtctgtcactctacatgaattatgtgctcaaatttgaccaactcagtttaagacacaaaacagtaatttgaagaaggaaaaatgaagagagtttctagtttaatgggttaaatttttgttgttgcaatagtaagtttagtcttcttataatatttctaaatgaaaaatcataggtatttgttaccatgtgtgaagattactttgttaaaagcaaaagtggtcgtgtgatatgctaaatgttaattactgattttatatgtttaaatcacgccaaacaaattatgtctgtgccatccagggtctgttgttaatctttttctgagtacttggattgggataaagggcttgtactatgcactttttattaatgaataaatagaaaacgttagtaaca

SEQ ID NO: 452590 - DNA, 4299 bp, Homo sapiens
ggcggggcagctggagtctccaggcgctgcaatctgttgcgccgccgcccgcgggagccggcagatccgggtcttgtggctaagagtgacgtggtcactcgaatcaaaacagaggagggggaggaagccggcggccagaaacggcagtggcagcagcgtccggagcagccgcagccttctggaagctccaggcggtctttctgccgagcctcggtcccggcccccatcctccccgccccatcggttgttgtctgggcggatttaaacagtcaagtaaaatcaagctgggtaatcatggcagaaggtggatttgatccctgtgaatgtgtttgctctcatgaacatgcaatgagaagactgatcaatctgttacggcagtcccagtcctactgcacagacacagagtgtcttcaggaattaccgggaccctctggtgataatggcatcagtgttacaatgatcttggtagcctggatggttattgcattgatcttgttcttactgagacctcctaatctaagaggatccagcctacctggaaagccaaccagtcctcataatggacaagatccaccagctcctcctgtggactaactttgtgatatgggaagtgaaaatagttaacaccttgcacgaccaaacgaacgaagatgaccagagtactcttaaccccattagaactgtttttccttttgtatctgcaatatgggatggtattgttttcatgagcttctagaaatttcacttgcaagtttatttttgcttcctgtgttactgccattcctatttacagtatatttgagtgaatgattatatttttaaaaagttacatggggcttttttggttgtcctaaacttacaaacattccactcattctgtttgtaactgtgattataatttttgtgataatttctggcctgattgaaggaaatttgagaggtctgcatttatatattttaaatagatttgataggtttttaaattgctttttttcataaggtatttataaagttatttggggttgtctgggattgtgtgaaagaaaattagaaccacgctgtatttacatttaccttggtagtttatttgtggatggcagttttctgtagttttggggactgtggtagctcttggattgttttgcaaattacagctgaaatctgtgtcatggattaaactggcttatgtggctagaataggaagagagaaaaaatgaaatggttgtttactaattttatactcccattaaaaatctctaatgttaagaaaaccttaaataaacatgattgatcaatatggcagatgatttacagtccattatatgacatttgtaagccactcaacactagccttacaaggttcatgaaaggaggaaaacattaattctttctgcctttgctgatataatccacatagtaataatttaagctataatttatttttaaaatgagtgcctcttgggaagcttcttttctgttctaacagttccctgttaaaatgaaaatcttaggccagtgcagtggctcacacctgtaatcccagcactttgggaggctgaggtgggtggatcacttgaggtcaggagttcgagaccagcctggccaacatggtgaaaccctgtctctactaaaaatacagaaaaattagccagggttggtgcatgtgcctgtaatcccagctactcaggaggccaaagcaggagaattgcttgaacccgggaggtggaggttgcagtgaaccaagatcgcaccactgcattccagcctaagcaatagagcgagactccctctcaaaaaaaaaaaaagaagaaaatcttaaagctgtattagggcctgttaggttactgatatttgaatgcctatttacttatttactacattgagtcttttgttatcctctgacctataaaatattttaataaattactggtttacttcaagggaaaagaaggaaaatgagaaacatacatctttttttcactccttatctcattcctgtttggtgatgggatggattggggtaggaaggaatgttaatatgagagaaattttaaaatgtataaaaaagtaaaaggttgtattgttttgctcagtttgaaataaagtgaataccaatagcagtgcctggccagaaaatctggattcttattcctagttcttcatttctgtcacatgcacttagttgacattacatctacatatattagctttttcctacatgagccatctatttacttagtaaccagtgttcttaatgaagtatttagtcttgggtttcttgtaaaatttctctgcattccttagacagtgtactatacatgaaatattcttgttgacctagtaatttatattattccatttaattcttaaacctatggcctttttattgagcacactcttaaatcattatttggcttgtaaacattcatctgaattgtggctacaatcctctttaaataatctaggaaaaaagaaagataaagcttacattttcacagttttggctcttaaacacattccacaaatgccattaagaatttattttgttttaggccagtcatggtggctcatgcctgtaatcccagcaatttgggaggctgaggcaagaactgcttgagcccaggagtttgagactagcctgggcaacatagcaagaccctgtctctaccaaaaaaaaaaaagtttattttgttttagagtcatttaatgtgtttttatgcacaataatagtgggaggttgttttgttgcatttgtttgtttgttttgttttgttttgttttgctttccatgtgggaaaagttaacattggaactgtttctagtaaaagatttttttcaggctgggcacggtggctcatgcctgtaatcccaacactttgggagaccgagggagctggatcacctgaggtcaggagttcgagaccagcctggccaacatggaaaaactccatctccactaaaaatacaaaagtagcctggtgtggtggcacatgcctgtaatcccagctacttgggaagctgaggcaggagaatcacttgaacctgggaggtggaggttgcagtgagccaagatcacgccattgcactccagcctgggcaacaagagtgaaactccgtctcaaaaaaaaaaaaaaaaagatgtttttcatttttttcatgttatctatccaagcactgttccatggtcagcaagtcatatttcataatgtggattttccaaaataattattgaatacagctattctatggctacttttagtgtttttgtggtatgtggtgtgggagtgtttatggaattaccagtatcttaaattttcaaaggaaccttggaagtctatcactctaaatgaaagtctgtcactctacatgaattatgtgctcaaatttgaccaactcagtttaagacacaaaacagtaatttgaagaaggaaaaatgaagagagtttctagtttaatgggttaaatttttgttgttgcaatagtaagtttagtcttcttataatatttctaaatgaaaaatcataggtatttgttaccatgtgtgaagattactttgttaaaagcaaaagtggtcgtgtgatatgctaaatgttaattactgattttatatgtttaaatcacgccaaacaaattatgtctgtgccatccagggtctgttgttaatctttttctgagtacttggattgggataaagggcttgtactatgcactttttattaatgaataaatagaaaacgttagtaacaaaaaaaaaaaaactaataaaacaaccctgtgctcgggccgcgccttggcgcccgctgaagaaacgctttttaaacaccatttgttttgggccgccggggcccgcaaatgtgggtaagcgagaccggtggccaaatagctgtgtcccatagagaccactcggggacagacacaacggcggcctcggggactcctccgcgccaagataaaaaaaagcggccccgagctggaaaaccacacagcgcgcttgctagtgaaccaaaatccccagcaataggagactcccgagagagccccacaccacgggggcctctactcaacagggggagcccccagaggagaaactcgtagaatatcaagaattttagcccccgcgcgtgccggtgttacatcaagtatctcagtgaacctgaccacagacgactatactaaacacgaccgcagcgacaacacacacaaacaacaacactagcgacgacgcgaaaacgacacacacgactaacagatacacagctcaacacacaaccaaccaacgccacacaacacagccacgcc

SEQ ID NO: 452591 - DNA, 2915 bp, Homo sapiens
ggcggggcagctggagtctccaggcgctgcaatctgttgcgccgccgcccgcgggagccggcagatccgggtcttgtggctaagagtgacgtggtcactcgaatcaaaacagaggagggggaggaagccggcggccagaaacggcagtggcagcagcgtccggagcagccgcagccttctggaagctccaggcggtctttctgccgagcctcggtcccggcccccatcctccccgccccatcggttgttgtctgggcggatttaaacagtcaagtaaaatcaagctgggtaatcatggcagaaggtggatttgatccctgtgaatgtgtttgctctcatgaacatgcaatgagaagactgatcaatctgttacggcagtcccagtcctactgcacagacacagagtgtcttcaggaattaccgggaccctctggtgataatggcatcagtgttacaatgatcttggtagcctggatggttattgcattgatcttgttcttactgagacctcctaatctaagaggatccagcctacctggaaagccaaccagtcctcataatggacaagatccaccagctcctcctgtggactaactttgtgatatgggaagtgaaaatagttaacaccttgcacgaccaaacgaacgaagatgaccagagtactcttaaccccattagaactgtttttccttttgtatctgcaatatgggatggtattgttttcatgagcttctagaaatttcacttgcaagtttatttttgcttcctgtgttactgccattcctatttacagtatatttgagtgaatgattatatttttaaaaagttacatggggcttttttggttgtcctaaacttacaaacattccactcattctgtttgtaactgtgattataatttttgtgataatttctggcctgattgaaggaaatttgagaggtctgcatttatatattttaaatagatttgataggtttttaaattgctttttttcataaggtatttataaagttatttggggttgtctgggattgtgtgaaagaaaattagaaccacgctgtatttacatttaccttggtagtttatttgtggatggcagttttctgtagttttggggactgtggtagctcttggattgttttgcaaattacagctgaaatctgtgtcatggattaaactggcttatgtggctagaataggaagagagaaaaaatgaaatggttgtttactaattttatactcccattaaaaatctctaatgttaagaaaaccttaaataaacatgattgatcaatatggcagatgatttacagtccattatatgacatttgtaagccactcaacactagccttacaaggttcatgaaaggaggaaaacattaattctttctgcctttgctgatataatccacatagtaataatttaagctataatttatttttaaaatgagtgcctcttgggaagcttcttttctgttctaacagttccctgttaaaatgaaaatcttaggccagtgcagtggctcacacctgtaatcccagcactttgggaggctgaggtgggtggatcacttgaggtcaggagttcgagaccagcctggccaacatggtgaaaccctgtctctactaaaaatacagaaaaattagccagggttggtgcatgtgcctgtaatcccagctactcaggaggccaaagcaggagaattgcttgaacccgggaggtggaggttgcagtgaaccaagatcgcaccactgcattccagcctaagcaatagagcgagactccctctcaaaaaaaaaaaaagaagaaaatcttaaagctgtattagggcctgttaggttactgatatttgaatgcctatttacttatttactacattgagtcttttgttatcctctgacctataaaatattttaataaattactggtttacttcaagggaaaagaaggaaaatgagaaacatacatctttttttcactccttatctcattcctgtttggtgatgggatggattggggtaggaaggaatgttaatatgagagaaattttaaaatgtataaaaaagtaaaaggttgtattgttttgctcagtttgaaataaagtgaataccaatagcagtgcctggccagaaaatctggattcttattcctagttcttcatttctgtcacatgcacttagttgacattacatctacatatattagctttttcctacatgagccatctatttacttagtaaccagtgttcttaatgaagtatttagtcttgggtttcttgtaaaatttctctgcattccttagacagtgtactatacatgaaatattcttgttgacctagtaatttatattattccatttaattcttaaacctatggcctttttattgagcacactcttaaatcattatttggcttgtaaacattcatctgaattgtggctacaatcctctttaaataatctaggaaaaaagaaagataaagcttacattttcacagttttggctcttaaacacattccacaaatgccattaagaatttattttgttttaggccagtcatggtggctcatgcctgtaatcccagcaatttgggaggctgaggcaagaactgcttgagcccaggagtttgagactagcctgggcaacatagcaagaccctgtctctaccaaaaaaaaaaaaaaaaaaaaaaaaaaaaaaaaaatttggcggcggcttgggcctcaagaaaaagttttaagcccctcctgtgtggggcgggggcccagagggttatcgcacacctggccaacccgtggccagggagaaccccggccgagaaatgggtgggtttccccaaaaaaacgccggggaaccgcgtgttggacaaccaagggggctcggggccaccgccctcacagaggccaggggcctaag

SEQ ID NO: 452592 - DNA, 1302 bp, Homo sapiens
ggcggggcagctggagtctccaggcgctgcaatctgttgcgccgccgcccgcgggagccggcagatccgggtcttgtggctaagagtgacgtggtcactcgaatcaaaacagaggagggggaggaagccggcggccagaaacggcagtggcagcagcgtccggagcagccgcagccttctggaagctccaggcggtctttctgccgagcctcggtcccggcccccatcctccccgccccatcggttgttgtctgggcggatttaaacagtcaagtaaaatcaagctgggtaatcatggcagaaggtggatttgatccctgtgaatgtgtttgctctcatgaacatgcaatgagaagactgatcaatctgttacggcagtcccagtcctactgcacagacacagagtgtcttcaggaattaccgggaccctctggtgataatggcatcagtgttacaatgatcttggtagcctggatggttattgcattgatcttgttcttactgagacctcctaatctaagaggatccagcctacctggaaagccaaccagtcctcataatggacaagatccaccagctcctcctgtggactaactttgtgatatgggaagtgaaaatagttaacaccttgcacgaccaaacgaacgaagatgaccagagtactcttaaccccattagaactgtttttccttttgtatctgcaatatgggatggtattgttttcatgagcttctagaaatttcacttgcaagtttatttttgcttcctgtgttactgccattcctatttacagtatatttgagtgaatgattatatttttaaaaagttacatggggcttttttggttgtcctaaacttacaaacattccactcattctgtttgtaactgtgattataatttttgtgataatttctggcctgattgaaggaaatttgagaggtctgcatttatatattttaaatagatttgataggtttttaaattgctttttttcataaggtatttataaagttatttggggttgtctgggattgtgtgaaagaaaattagaaccacgctgtatttacatttaccttggtagtttatttgtggatggcagttttctgtagttttggggactgtggtagctcttggattgttttgcaaattacagctgaaatctgtgtcatggattaaactggcttatgtggctagaataggaagagagaaaaaatgaaatggttgtttactaattttatactcccattaaaaatctctaatgttaagaaaaccttaaataaacatgattgatcaatatggca

SEQ ID NO: 452593 - DNA, 3639 bp, Homo sapiens
  misc_feature (25)..(25): n is a, c, g, or t
cggacgcgtgggtcgaccacgcgtncggtaggacacagtgagaaggcaccatctaccaaccagagagtgggtcctcagcagacactgaatctaccagtgccttgatcttggacttcctagcctccagaaccgtgagaagtaaatttctgtttatttaaacagtcaagtaaaatcaagctgggtaatcatggcagaaggtggatttgatccctgtgaatgtgtttgctctcatgaacatgcaatgagaagactgatcaatctgttacggcagtcccagtcctactgcacagacacagagtgtcttcaggaattaccgggaccctctggtgataatggcatcagtgttacaatgatcttggtagcctggatggttattgcattgatcttgttcttactgagacctcctaatctaagaggatccagcctacctggaaagccaaccagtcctcataatggacaagatccaccagctcctcctgtggactaactttgtgatatgggaagtgaaaatagttaacaccttgcacgaccaaacgaacgaagatgaccagagtactcttaaccccattagaactgtttttccttttgtatctgcaatatgggatggtattgttttcatgagcttctagaaatttcacttgcaagtttatttttgcttcctgtgttactgccattcctatttacagtatatttgagtgaatgattatatttttaaaaagttacatggggcttttttggttgtcctaaacttacaaacattccactcattctgtttgtaactgtgattataatttttgtgataatttctggcctgattgaaggaaatttgagaggtctgcatttatatattttaaatagatttgataggtttttaaattgctttttttcataaggtatttataaagttatttggggttgtctgggattgtgtgaaagaaaattagaaccacgctgtatttacatttaccttggtagtttatttgtggatggcagttttctgtagttttggggactgtggtagctcttggattgttttgcaaattacagctgaaatctgtgtcatggattaaactggcttatgtggctagaataggaagagagaaaaaatgaaatggttgtttactaattttatactcccattaaaaatctctaatgttaagaaaaccttaaataaacatgattgatcaatatggcagatgatttacagtccattatatgacatttgtaagccactcaacactagccttacaaggttcatgaaaggaggaaaacattaattctttctgcctttgctgatataatccacatagtaataatttaagctataatttatttttaaaatgagtgcctcttgggaagcttcttttctgttctaacagttccctgttaaaatgaaaatcttaggccagtgcagtggctcacacctgtaatcccagcactttgggaggctgaggtgggtggatcacttgaggtcaggagttcgagaccagcctggccaacatggtgaaaccctgtctctactaaaaatacagaaaaattagccagggttggtgcatgtgcctgtaatcccagctactcaggaggccaaagcaggagaattgcttgaacccgggaggtggaggttgcagtgaaccaagatcgcaccactgcattccagcctaagcaatagagcgagactccctctcaaaaaaaaaaaaagaagaaaatcttaaagctgtattagggcctgttaggttactgatatttgaatgcctatttacttatttactacattgagtcttttgttatcctctgacctataaaatattttaataaattactggtttacttcaagggaaaagaaggaaaatgagaaacatacatctttttttcactccttatctcattcctgtttggtgatgggatggattggggtaggaaggaatgttaatatgagagaaattttaaaatgtataaaaaagtaaaaggttgtattgttttgctcagtttgaaataaagtgaataccaatagcagtgcctggccagaaaatctggattcttattcctagttcttcatttctgtcacatgcacttagttgacattacatctacatatattagctttttcctacatgagccatctatttacttagtaaccagtgttcttaatgaagtatttagtcttgggtttcttgtaaaatttctctgcattccttagacagtgtactatacatgaaatattcttgttgacctagtaatttatattattccatttaattcttaaacctatggcctttttattgagcacactcttaaatcattatttggcttgtaaacattcatctgaattgtggctacaatcctctttaaataatctaggaaaaaagaaagataaagcttacattttcacagttttggctcttaaacacattccacaaatgccattaagaatttattttgttttaggccagtcatggtggctcatgcctgtaatcccagcaatttgggaggctgaggcaagaactgcttgagcccaggagtttgagactagcctgggcaacatagcaagaccctgtctctaccaaaaaaaaaaaagtttattttgttttagagtcatttaatgtgtttttatgcacaataatagtgggaggttgttttgttgcatttgtttgtttgttttgttttgttttgttttgctttccatgtgggaaaagttaacattggaactgtttctagtaaaagatttttttcaggctgggcacggtggctcatgcctgtaatcccaacactttgggagaccgagggagctggatcacctgaggtcaggagttcgagaccagcctggccaacatggaaaaactccatctccactaaaaatacaaaagtagcctggtgtggtggcacatgcctgtaatcccagctacttgggaagctgaggcaggagaatcacttgaacctgggaggtggaggttgcagtgagccaagatcacgccattgcactccagcctgggcaacaagagtgaaactccgtctcaaaaaaaaaaaaaaaaagatgtttttcatttttttcatgttatctatccaagcactgttccatggtcagcaagtcatatttcataatgtggattttccaaaataattattgaatacagctattctatggctacttttagtgtttttgtggtatgtggtgtgggagtgtttatggaattaccagtatcttaaattttcaaaggaaccttggaagtctatcactctaaatgaaagtctgtcactctacatgaattatgtgctcaaatttgaccaactcagtttaagacacaaaacagtaatttgaagaaggaaaaatgaagagagtttctagtttaatgggttaaatttttgttgttgcaatagtaagtttagtcttcttataatatttctaaatgaaaaatcataggtatttgttaccatgtgtgaagattactttgttaaaagcaaaagtggtcgtgtgatatgctaaatgttaattactgattttatatgtttaaatcacgccaaacaaattatgtctgtgccatccagggtctgttgttaatctttttctgagtacttggattgggataaagggcttgtactatgcactttttattaatgaataaatagaaaacgttagtaaca

SEQ ID NO: 452594 - DNA, 3784 bp, Homo sapiens
  misc_feature (25)..(25): n is a, c, g, or t
cggacgcgtgggtcgaccacgcgtncggtaggacacagtgagaaggcaccatctaccaaccagagagtgggtcctcagcagacactgaatctaccagtgccttgatcttggacttcctagcctccagaaccgtgagaagtaaatttctgtttgtgttgacagagtggcctcagacaaaactgtgaagtagagtttgcatatggtgttgcttaccttctggaaagtgagcctctccagctcaggccgcatctccatctccctttccaattctcacctccccttctccccttagctcagatttaaacagtcaagtaaaatcaagctgggtaatcatggcagaaggtggatttgatccctgtgaatgtgtttgctctcatgaacatgcaatgagaagactgatcaatctgttacggcagtcccagtcctactgcacagacacagagtgtcttcaggaattaccgggaccctctggtgataatggcatcagtgttacaatgatcttggtagcctggatggttattgcattgatcttgttcttactgagacctcctaatctaagaggatccagcctacctggaaagccaaccagtcctcataatggacaagatccaccagctcctcctgtggactaactttgtgatatgggaagtgaaaatagttaacaccttgcacgaccaaacgaacgaagatgaccagagtactcttaaccccattagaactgtttttccttttgtatctgcaatatgggatggtattgttttcatgagcttctagaaatttcacttgcaagtttatttttgcttcctgtgttactgccattcctatttacagtatatttgagtgaatgattatatttttaaaaagttacatggggcttttttggttgtcctaaacttacaaacattccactcattctgtttgtaactgtgattataatttttgtgataatttctggcctgattgaaggaaatttgagaggtctgcatttatatattttaaatagatttgataggtttttaaattgctttttttcataaggtatttataaagttatttggggttgtctgggattgtgtgaaagaaaattagaaccacgctgtatttacatttaccttggtagtttatttgtggatggcagttttctgtagttttggggactgtggtagctcttggattgttttgcaaattacagctgaaatctgtgtcatggattaaactggcttatgtggctagaataggaagagagaaaaaatgaaatggttgtttactaattttatactcccattaaaaatctctaatgttaagaaaaccttaaataaacatgattgatcaatatggcagatgatttacagtccattatatgacatttgtaagccactcaacactagccttacaaggttcatgaaaggaggaaaacattaattctttctgcctttgctgatataatccacatagtaataatttaagctataatttatttttaaaatgagtgcctcttgggaagcttcttttctgttctaacagttccctgttaaaatgaaaatcttaggccagtgcagtggctcacacctgtaatcccagcactttgggaggctgaggtgggtggatcacttgaggtcaggagttcgagaccagcctggccaacatggtgaaaccctgtctctactaaaaatacagaaaaattagccagggttggtgcatgtgcctgtaatcccagctactcaggaggccaaagcaggagaattgcttgaacccgggaggtggaggttgcagtgaaccaagatcgcaccactgcattccagcctaagcaatagagcgagactccctctcaaaaaaaaaaaaagaagaaaatcttaaagctgtattagggcctgttaggttactgatatttgaatgcctatttacttatttactacattgagtcttttgttatcctctgacctataaaatattttaataaattactggtttacttcaagggaaaagaaggaaaatgagaaacatacatctttttttcactccttatctcattcctgtttggtgatgggatggattggggtaggaaggaatgttaatatgagagaaattttaaaatgtataaaaaagtaaaaggttgtattgttttgctcagtttgaaataaagtgaataccaatagcagtgcctggccagaaaatctggattcttattcctagttcttcatttctgtcacatgcacttagttgacattacatctacatatattagctttttcctacatgagccatctatttacttagtaaccagtgttcttaatgaagtatttagtcttgggtttcttgtaaaatttctctgcattccttagacagtgtactatacatgaaatattcttgttgacctagtaatttatattattccatttaattcttaaacctatggcctttttattgagcacactcttaaatcattatttggcttgtaaacattcatctgaattgtggctacaatcctctttaaataatctaggaaaaaagaaagataaagcttacattttcacagttttggctcttaaacacattccacaaatgccattaagaatttattttgttttaggccagtcatggtggctcatgcctgtaatcccagcaatttgggaggctgaggcaagaactgcttgagcccaggagtttgagactagcctgggcaacatagcaagaccctgtctctaccaaaaaaaaaaaagtttattttgttttagagtcatttaatgtgtttttatgcacaataatagtgggaggttgttttgttgcatttgtttgtttgttttgttttgttttgttttgctttccatgtgggaaaagttaacattggaactgtttctagtaaaagatttttttcaggctgggcacggtggctcatgcctgtaatcccaacactttgggagaccgagggagctggatcacctgaggtcaggagttcgagaccagcctggccaacatggaaaaactccatctccactaaaaatacaaaagtagcctggtgtggtggcacatgcctgtaatcccagctacttgggaagctgaggcaggagaatcacttgaacctgggaggtggaggttgcagtgagccaagatcacgccattgcactccagcctgggcaacaagagtgaaactccgtctcaaaaaaaaaaaaaaaaagatgtttttcatttttttcatgttatctatccaagcactgttccatggtcagcaagtcatatttcataatgtggattttccaaaataattattgaatacagctattctatggctacttttagtgtttttgtggtatgtggtgtgggagtgtttatggaattaccagtatcttaaattttcaaaggaaccttggaagtctatcactctaaatgaaagtctgtcactctacatgaattatgtgctcaaatttgaccaactcagtttaagacacaaaacagtaatttgaagaaggaaaaatgaagagagtttctagtttaatgggttaaatttttgttgttgcaatagtaagtttagtcttcttataatatttctaaatgaaaaatcataggtatttgttaccatgtgtgaagattactttgttaaaagcaaaagtggtcgtgtgatatgctaaatgttaattactgattttatatgtttaaatcacgccaaacaaattatgtctgtgccatccagggtctgttgttaatctttttctgagtacttggattgggataaagggcttgtactatgcactttttattaatgaataaatagaaaacgttagtaaca

SEQ ID NO: 452595 - DNA, 3697 bp, Homo sapiens
ggcggggcagctggagtctccaggcgctgcaatctgttgcgccgccgcccgcgggagccggcagatccgggtcttgtggctaagagtgacgtggtcactcgaatcaaaacagaggagggggaggaagccggcggccagaaacggcagtggcagcagcgtccggagcagccgcagccttctggaagctccaggcggtctttctgccgagcctcggtcccggcccccatcctccccgccccatcggttgttgtctgggcggatttaaacagtcaagtaaaatcaagctgggtaatcatggcagaaggtggatttgatccctgtgaatgtgtttgctctcatgaacatgcaatgagaagactgatcaatctgtaccgggaccctctggtgataatggcatcagtgttacaatgatcttggtagcctggatggttattgcattgatcttgttcttactgagacctcctaatctaagaggatccagcctacctggaaagccaaccagtcctcataatggacaagatccaccagctcctcctgtggactaactttgtgatatgggaagtgaaaatagttaacaccttgcacgaccaaacgaacgaagatgaccagagtactcttaaccccattagaactgtttttccttttgtatctgcaatatgggatggtattgttttcatgagcttctagaaatttcacttgcaagtttatttttgcttcctgtgttactgccattcctatttacagtatatttgagtgaatgattatatttttaaaaagttacatggggcttttttggttgtcctaaacttacaaacattccactcattctgtttgtaactgtgattataatttttgtgataatttctggcctgattgaaggaaatttgagaggtctgcatttatatattttaaatagatttgataggtttttaaattgctttttttcataaggtatttataaagttatttggggttgtctgggattgtgtgaaagaaaattagaaccacgctgtatttacatttaccttggtagtttatttgtggatggcagttttctgtagttttggggactgtggtagctcttggattgttttgcaaattacagctgaaatctgtgtcatggattaaactggcttatgtggctagaataggaagagagaaaaaatgaaatggttgtttactaattttatactcccattaaaaatctctaatgttaagaaaaccttaaataaacatgattgatcaatatggcagatgatttacagtccattatatgacatttgtaagccactcaacactagccttacaaggttcatgaaaggaggaaaacattaattctttctgcctttgctgatataatccacatagtaataatttaagctataatttatttttaaaatgagtgcctcttgggaagcttcttttctgttctaacagttccctgttaaaatgaaaatcttaggccagtgcagtggctcacacctgtaatcccagcactttgggaggctgaggtgggtggatcacttgaggtcaggagttcgagaccagcctggccaacatggtgaaaccctgtctctactaaaaatacagaaaaattagccagggttggtgcatgtgcctgtaatcccagctactcaggaggccaaagcaggagaattgcttgaacccgggaggtggaggttgcagtgaaccaagatcgcaccactgcattccagcctaagcaatagagcgagactccctctcaaaaaaaaaaaaagaagaaaatcttaaagctgtattagggcctgttaggttactgatatttgaatgcctatttacttatttactacattgagtcttttgttatcctctgacctataaaatattttaataaattactggtttacttcaagggaaaagaaggaaaatgagaaacatacatctttttttcactccttatctcattcctgtttggtgatgggatggattggggtaggaaggaatgttaatatgagagaaattttaaaatgtataaaaaagtaaaaggttgtattgttttgctcagtttgaaataaagtgaataccaatagcagtgcctggccagaaaatctggattcttattcctagttcttcatttctgtcacatgcacttagttgacattacatctacatatattagctttttcctacatgagccatctatttacttagtaaccagtgttcttaatgaagtatttagtcttgggtttcttgtaaaatttctctgcattccttagacagtgtactatacatgaaatattcttgttgacctagtaatttatattattccatttaattcttaaacctatggcctttttattgagcacactcttaaatcattatttggcttgtaaacattcatctgaattgtggctacaatcctctttaaataatctaggaaaaaagaaagataaagcttacattttcacagttttggctcttaaacacattccacaaatgccattaagaatttattttgttttaggccagtcatggtggctcatgcctgtaatcccagcaatttgggaggctgaggcaagaactgcttgagcccaggagtttgagactagcctgggcaacatagcaagaccctgtctctaccaaaaaaaaaaaagtttattttgttttagagtcatttaatgtgtttttatgcacaataatagtgggaggttgttttgttgcatttgtttgtttgttttgttttgttttgttttgctttccatgtgggaaaagttaacattggaactgtttctagtaaaagatttttttcaggctgggcacggtggctcatgcctgtaatcccaacactttgggagaccgagggagctggatcacctgaggtcaggagttcgagaccagcctggccaacatggaaaaactccatctccactaaaaatacaaaagtagcctggtgtggtggcacatgcctgtaatcccagctacttgggaagctgaggcaggagaatcacttgaacctgggaggtggaggttgcagtgagccaagatcacgccattgcactccagcctgggcaacaagagtgaaactccgtctcaaaaaaaaaaaaaaaaagatgtttttcatttttttcatgttatctatccaagcactgttccatggtcagcaagtcatatttcataatgtggattttccaaaataattattgaatacagctattctatggctacttttagtgtttttgtggtatgtggtgtgggagtgtttatggaattaccagtatcttaaattttcaaaggaaccttggaagtctatcactctaaatgaaagtctgtcactctacatgaattatgtgctcaaatttgaccaactcagtttaagacacaaaacagtaatttgaagaaggaaaaatgaagagagtttctagtttaatgggttaaatttttgttgttgcaatagtaagtttagtcttcttataatatttctaaatgaaaaatcataggtatttgttaccatgtgtgaagattactttgttaaaagcaaaagtggtcgtgtgatatgctaaatgttaattactgattttatatgtttaaatcacgccaaacaaattatgtctgtgccatccagggtctgttgttaatctttttctgagtacttggattgggataaagggcttgtactatgcactttttattaatgaataaatagaaaacgttagtaaca

SEQ ID NO: 452596 - DNA, 3653 bp, Homo sapiens
atcccatgaacatagaaggttaaggctgtagtgagctatggttgtgccaccgcactccagcctgtttgatagagcaagaccctgtctcaaaaaacaaaaacaacaaaaacttactaagttttggtttatgactatttaacatcatttactttttagatgttctcactgggggaaagggaaattgaagatataatatgtacttttgtaatttatcaatacaatttttatattaatacagtaattgaaactgacatttaaacattagaatttgtttttacttttaacaatattgtgagcacatgctacattttttgtttgtctttagtaccgggaccctctggtgataatggcatcagtgttacaatgatcttggtagcctggatggttattgcattgatcttgttcttactgagacctcctaatctaagaggatccagcctacctggaaagccaaccagtcctcataatggacaagatccaccagctcctcctgtggactaactttgtgatatgggaagtgaaaatagttaacaccttgcacgaccaaacgaacgaagatgaccagagtactcttaaccccattagaactgtttttccttttgtatctgcaatatgggatggtattgttttcatgagcttctagaaatttcacttgcaagtttatttttgcttcctgtgttactgccattcctatttacagtatatttgagtgaatgattatatttttaaaaagttacatggggcttttttggttgtcctaaacttacaaacattccactcattctgtttgtaactgtgattataatttttgtgataatttctggcctgattgaaggaaatttgagaggtctgcatttatatattttaaatagatttgataggtttttaaattgctttttttcataaggtatttataaagttatttggggttgtctgggattgtgtgaaagaaaattagaaccacgctgtatttacatttaccttggtagtttatttgtggatggcagttttctgtagttttggggactgtggtagctcttggattgttttgcaaattacagctgaaatctgtgtcatggattaaactggcttatgtggctagaataggaagagagaaaaaatgaaatggttgtttactaattttatactcccattaaaaatctctaatgttaagaaaaccttaaataaacatgattgatcaatatggcagatgatttacagtccattatatgacatttgtaagccactcaacactagccttacaaggttcatgaaaggaggaaaacattaattctttctgcctttgctgatataatccacatagtaataatttaagctataatttatttttaaaatgagtgcctcttgggaagcttcttttctgttctaacagttccctgttaaaatgaaaatcttaggccagtgcagtggctcacacctgtaatcccagcactttgggaggctgaggtgggtggatcacttgaggtcaggagttcgagaccagcctggccaacatggtgaaaccctgtctctactaaaaatacagaaaaattagccagggttggtgcatgtgcctgtaatcccagctactcaggaggccaaagcaggagaattgcttgaacccgggaggtggaggttgcagtgaaccaagatcgcaccactgcattccagcctaagcaatagagcgagactccctctcaaaaaaaaaaaaagaagaaaatcttaaagctgtattagggcctgttaggttactgatatttgaatgcctatttacttatttactacattgagtcttttgttatcctctgacctataaaatattttaataaattactggtttacttcaagggaaaagaaggaaaatgagaaacatacatctttttttcactccttatctcattcctgtttggtgatgggatggattggggtaggaaggaatgttaatatgagagaaattttaaaatgtataaaaaagtaaaaggttgtattgttttgctcagtttgaaataaagtgaataccaatagcagtgcctggccagaaaatctggattcttattcctagttcttcatttctgtcacatgcacttagttgacattacatctacatatattagctttttcctacatgagccatctatttacttagtaaccagtgttcttaatgaagtatttagtcttgggtttcttgtaaaatttctctgcattccttagacagtgtactatacatgaaatattcttgttgacctagtaatttatattattccatttaattcttaaacctatggcctttttattgagcacactcttaaatcattatttggcttgtaaacattcatctgaattgtggctacaatcctctttaaataatctaggaaaaaagaaagataaagcttacattttcacagttttggctcttaaacacattccacaaatgccattaagaatttattttgttttaggccagtcatggtggctcatgcctgtaatcccagcaatttgggaggctgaggcaagaactgcttgagcccaggagtttgagactagcctgggcaacatagcaagaccctgtctctaccaaaaaaaaaaaagtttattttgttttagagtcatttaatgtgtttttatgcacaataatagtgggaggttgttttgttgcatttgtttgtttgttttgttttgttttgttttgctttccatgtgggaaaagttaacattggaactgtttctagtaaaagatttttttcaggctgggcacggtggctcatgcctgtaatcccaacactttgggagaccgagggagctggatcacctgaggtcaggagttcgagaccagcctggccaacatggaaaaactccatctccactaaaaatacaaaagtagcctggtgtggtggcacatgcctgtaatcccagctacttgggaagctgaggcaggagaatcacttgaacctgggaggtggaggttgcagtgagccaagatcacgccattgcactccagcctgggcaacaagagtgaaactccgtctcaaaaaaaaaaaaaaaaagatgtttttcatttttttcatgttatctatccaagcactgttccatggtcagcaagtcatatttcataatgtggattttccaaaataattattgaatacagctattctatggctacttttagtgtttttgtggtatgtggtgtgggagtgtttatggaattaccagtatcttaaattttcaaaggaaccttggaagtctatcactctaaatgaaagtctgtcactctacatgaattatgtgctcaaatttgaccaactcagtttaagacacaaaacagtaatttgaagaaggaaaaatgaagagagtttctagtttaatgggttaaatttttgttgttgcaatagtaagtttagtcttcttataatatttctaaatgaaaaatcataggtatttgttaccatgtgtgaagattactttgttaaaagcaaaagtggtcgtgtgatatgctaaatgttaattactgattttatatgtttaaatcacgccaaacaaattatgtctgtgccatccagggtctgttgttaatctttttctgagtacttggattgggataaagggcttgtactatgcactttttattaatgaataaatagaaaacgttagtaaca

SEQ ID NO: 452597 - DNA, 3554 bp, Homo sapiens
ggcggggcagctggagtctccaggcgctgcaatctgttgcgccgccgcccgcgggagccggcagatccgggtcttgtggctaagagtgacgtggtcactcgaatcaaaacagaggagggggaggaagccggcggccagaaacggcagtggcagcagcgtccggagcagccgcagccttctggaagctccaggcggtctttctgccgagcctcggtcccggcccccatcctccccgccccatcggttgttgtctgggcggatttaaacagtcaagtaaaatcaagctgggtaatcatggcagaaggtggatttgatccctgtgaatgtgtttgctctcatgaacatgcaatgagaagactgatcaatctgggacaagatccaccagctcctcctgtggactaactttgtgatatgggaagtgaaaatagttaacaccttgcacgaccaaacgaacgaagatgaccagagtactcttaaccccattagaactgtttttccttttgtatctgcaatatgggatggtattgttttcatgagcttctagaaatttcacttgcaagtttatttttgcttcctgtgttactgccattcctatttacagtatatttgagtgaatgattatatttttaaaaagttacatggggcttttttggttgtcctaaacttacaaacattccactcattctgtttgtaactgtgattataatttttgtgataatttctggcctgattgaaggaaatttgagaggtctgcatttatatattttaaatagatttgataggtttttaaattgctttttttcataaggtatttataaagttatttggggttgtctgggattgtgtgaaagaaaattagaaccacgctgtatttacatttaccttggtagtttatttgtggatggcagttttctgtagttttggggactgtggtagctcttggattgttttgcaaattacagctgaaatctgtgtcatggattaaactggcttatgtggctagaataggaagagagaaaaaatgaaatggttgtttactaattttatactcccattaaaaatctctaatgttaagaaaaccttaaataaacatgattgatcaatatggcagatgatttacagtccattatatgacatttgtaagccactcaacactagccttacaaggttcatgaaaggaggaaaacattaattctttctgcctttgctgatataatccacatagtaataatttaagctataatttatttttaaaatgagtgcctcttgggaagcttcttttctgttctaacagttccctgttaaaatgaaaatcttaggccagtgcagtggctcacacctgtaatcccagcactttgggaggctgaggtgggtggatcacttgaggtcaggagttcgagaccagcctggccaacatggtgaaaccctgtctctactaaaaatacagaaaaattagccagggttggtgcatgtgcctgtaatcccagctactcaggaggccaaagcaggagaattgcttgaacccgggaggtggaggttgcagtgaaccaagatcgcaccactgcattccagcctaagcaatagagcgagactccctctcaaaaaaaaaaaaagaagaaaatcttaaagctgtattagggcctgttaggttactgatatttgaatgcctatttacttatttactacattgagtcttttgttatcctctgacctataaaatattttaataaattactggtttacttcaagggaaaagaaggaaaatgagaaacatacatctttttttcactccttatctcattcctgtttggtgatgggatggattggggtaggaaggaatgttaatatgagagaaattttaaaatgtataaaaaagtaaaaggttgtattgttttgctcagtttgaaataaagtgaataccaatagcagtgcctggccagaaaatctggattcttattcctagttcttcatttctgtcacatgcacttagttgacattacatctacatatattagctttttcctacatgagccatctatttacttagtaaccagtgttcttaatgaagtatttagtcttgggtttcttgtaaaatttctctgcattccttagacagtgtactatacatgaaatattcttgttgacctagtaatttatattattccatttaattcttaaacctatggcctttttattgagcacactcttaaatcattatttggcttgtaaacattcatctgaattgtggctacaatcctctttaaataatctaggaaaaaagaaagataaagcttacattttcacagttttggctcttaaacacattccacaaatgccattaagaatttattttgttttaggccagtcatggtggctcatgcctgtaatcccagcaatttgggaggctgaggcaagaactgcttgagcccaggagtttgagactagcctgggcaacatagcaagaccctgtctctaccaaaaaaaaaaaagtttattttgttttagagtcatttaatgtgtttttatgcacaataatagtgggaggttgttttgttgcatttgtttgtttgttttgttttgttttgttttgctttccatgtgggaaaagttaacattggaactgtttctagtaaaagatttttttcaggctgggcacggtggctcatgcctgtaatcccaacactttgggagaccgagggagctggatcacctgaggtcaggagttcgagaccagcctggccaacatggaaaaactccatctccactaaaaatacaaaagtagcctggtgtggtggcacatgcctgtaatcccagctacttgggaagctgaggcaggagaatcacttgaacctgggaggtggaggttgcagtgagccaagatcacgccattgcactccagcctgggcaacaagagtgaaactccgtctcaaaaaaaaaaaaaaaaagatgtttttcatttttttcatgttatctatccaagcactgttccatggtcagcaagtcatatttcataatgtggattttccaaaataattattgaatacagctattctatggctacttttagtgtttttgtggtatgtggtgtgggagtgtttatggaattaccagtatcttaaattttcaaaggaaccttggaagtctatcactctaaatgaaagtctgtcactctacatgaattatgtgctcaaatttgaccaactcagtttaagacacaaaacagtaatttgaagaaggaaaaatgaagagagtttctagtttaatgggttaaatttttgttgttgcaatagtaagtttagtcttcttataatatttctaaatgaaaaatcataggtatttgttaccatgtgtgaagattactttgttaaaagcaaaagtggtcgtgtgatatgctaaatgttaattactgattttatatgtttaaatcacgccaaacaaattatgtctgtgccatccagggtctgttgttaatctttttctgagtacttggattgggataaagggcttgtactatgcactttttattaatgaataaatagaaaacgttagtaaca

SEQ ID NO: 452598 - DNA, 964 bp, Homo sapiens
ggcggggcagctggagtctccaggcgctgcaatctgttgcgccgccgcccgcgggagccggcagatccgggtcttgtggctaagagtgacgtggtcactcgaatcaaaacagaggagggggaggaagccggcggccagaaacggcagtggcagcagcgtccggagcagccgcagccttctggaagctccaggcggtctttctgccgagcctcggtcccggcccccatcctccccgccccatcggttgttgtctgggcggatttaaacagtcaagtaaaatcaagctgggtaatcatggcagaaggtggatttgatccctgtgaatgtgtttgctctcatgaacatgcaatgagaagactgatcaatctgttacggcagtcccagtcctactgcacagacacagagtgtcttcaggaattaccgggaccctctggtgataatggcatcagtgttacaatgatcttggtagcctggatggttattgcattgatcttgttcttactgagacctcctaatctaagaggatccagcctacctggaaagccaaccagtcctcataatggacaagatccaccagctcctcctgtggactaactttgtgatatgggaagtgaaaatagttaacaccttgcacgaccaaacgaacgaagatgaccagagtactcttaaccccattagaactgtttttccttttgtatctgcaatatgggatggtattgttttcatgagcttctagaaatttcacttgcaagtttatttttgcttcctgtgttactgccattcctatttacagtatatttgagtgaatgattatatttttaaaaagttacatggggcttttttggttgtcctaaacttacaaacattccactcattctgtttgtaactgtgattataatttttgtgataatttctggcctgattgaaggaaatttgagagtatcttctgccgatggaccactca

SEQ ID NO: 452599 - DNA, 1976 bp, Homo sapiens
gatgaaatggctgaaacttggatacagaatgtctagtattagacacctaaaaatctggattctttttggttgttgttttgagatggagttttgctctttcgcccaagctggagtgaagtggcgcgaccttggctcactgcaacatccacccccaggttcgagcgattctccttcctcagcctcctgagtagctgggattataagtgcccaccaccacgcccagctaatttttgtatctttagtagagatggggtttcgccatgtaggccaggctggtctcaaactcctgacctcaggtgatccacccactatggcctcccaaagtgctaggattacagatgtgagccaccgtgcctggccagaaaatctggattcttattcctagttcttcatttctgtcacatgcacttagttgacattacatctacatatattagctttttcctacatgagccatctatttacttagtaaccagtgttcttaatgaagtatttagtcttgggtttcttgtaaaatttctctgcattccttagacagtgtactatacatgaaatattcttgttgacctagtaatttatattattccatttaattcttaaacctatggcctttttattgagcacactcttaaatcattatttggcttgtaaacattcatctgaattgtggctacaatcctctttaaataatctaggaaaaaagaaagataaagcttacattttcacagttttggctcttaaacacattccacaaatgccattaagaatttattttgttttaggccagtcatggtggctcatgcctgtaatcccagcaatttgggaggctgaggcaagaactgcttgagcccaggagtttgagactagcctgggcaacatagcaagaccctgtctctaccaaaaaaaaaaaagtttattttgttttagagtcatttaatgtgtttttatgcacaataatagtgggaggttgttttgttgcatttgtttgtttgttttgttttgttttgttttgctttccatgtgggaaaagttaacattggaactgtttctagtaaaagatttttttcaggctgggcacggtggctcatgcctgtaatcccaacactttgggagaccgagggagctggatcacctgaggtcaggagttcgagaccagcctggccaacatggaaaaactccatctccactaaaaatacaaaagtagcctggtgtggtggcacatgcctgtaatcccagctacttgggaagctgaggcaggagaatcacttgaacctgggaggtggaggttgcagtgagccaagatcacgccattgcactccagcctgggcaacaagagtgaaactccgtctcaaaaaaaaaaaaaaaaagatgtttttcatttttttcatgttatctatccaagcactgttccatggtcagcaagtcatatttcataatgtggattttccaaaataattattgaatacagctattctatggctacttttagtgtttttgtggtatgtggtgtgggagtgtttatggaattaccagtatcttaaattttcaaaggaaccttggaagtctatcactctaaatgaaagtctgtcactctacatgaattatgtgctcaaatttgaccaactcagtttaagacacaaaacagtaatttgaagaaggaaaaatgaagagagtttctagtttaatgggttaaatttttgttgttgcaatagtaagtttagtcttcttataatatttctaaatgaaaaatcataggtatttgttaccatgtgtgaagattactttgttaaaagcaaaagtggtcgtgtgatatgctaaatgttaattactgattttatatgtttaaatcacgccaaacaaattatgtctgtgccatccagggtctgttgttaatctttttctgagtacttggattgggataaagggcttgtactatgcactttttattaatgaataaatagaaaacgttagtaaca

SEQ ID NO: 452600 - DNA, 1663 bp, Homo sapiens
gatgaaatggctgaaacttggatacagaatgtctagtattagacacctaaaaatctggattctttttggttgttgttttgagatggagttttgctctttcgcccaagctggagtgaagtggcgcgaccttggctcactgcaacatccacccccaggttcgagcgattctccttcctcagcctcctgagtagctgggattataagtgcccaccaccacgcccagctaatttttgtatctttagtagagatggggtttcgccatgtaggccaggctggtctcaaactcctgacctcaggtgatccacccactatggcctcccaaagtgctaggattacagatgtgagccaccgtgcctggccagaaaatctggattcttattcctagttcttcatttctgtcacatgcacttagttgacattacatctacatatattagctttttcctacatgagccatctatttacttagtaaccagtgttcttaatgaagtatttagtcttgggtttcttgtaaaatttctctgcattccttagacagtgtactatacatgaaatattcttgttgacctagtaatttatattattccatttaattcttaaacctatggcctttttattgagcacactcttaaatcattatttggcttgtaaacattcatctgaattgtggctacaatcctctttaaataatctaggaaaaaagaaagataaagcttacattttcacagttttggctcttaaacacattccacaaatgccattaagaatttattttgttttaggccagtcatggtggctcatgcctgtaatcccagcaatttgggaggctgaggcaagaactgcttgagcccaggagtttgagactagcctgggcaacatagcaagaccctgtctctaccaaaaaaaaaaaagtttattttgttttagagtcatttaatgtgtttttatgcacaataatagtgggaggtggaggttgcagtgagccaagatcacgccattgcactccagcctgggcaacaagagtgaaactccgtctcaaaaaaaaaaaaaaaaagatgtttttcatttttttcatgttatctatccaagcactgttccatggtcagcaagtcatatttcataatgtggattttccaaaataattattgaatacagctattctatggctacttttagtgtttttgtggtatgtggtgtgggagtgtttatggaattaccagtatcttaaattttcaaaggaaccttggaagtctatcactctaaatgaaagtctgtcactctacatgaattatgtgctcaaatttgaccaactcagtttaagacacaaaacagtaatttgaagaaggaaaaatgaagagagtttctagtttaatgggttaaatttttgttgttgcaatagtaagtttagtcttcttataatatttctaaatgaaaaatcataggtatttgttaccatgtgtgaagattactttgttaaaagcaaaagtggtcgtgtgatatgctaaatgttaattactgattttatatgtttaaatcacgccaaacaaattatgtctgtgccatccagggtctgttgttaatctttttctgagtacttggattgggataaagggcttgtactatgcactttttattaatgaataaatagaaaacgttagtaaca

SEQ ID NO: 452601 - DNA, 1041 bp, Homo sapiens
ggcggggcagctggagtctccaggcgctgcaatctgttgcgccgccgcccgcgggagccggcagatccgggtcttgtggctaagagtgacgtggtcactcgaatcaaaacagaggagggggaggaagccggcggccagaaacggcagtggcagcagcgtccggagcagccgcagccttctggaagctccaggcggtctttctgccgagcctcggtcccggcccccatcctccccgccccatcggttgttgtctgggcgggtgttgacagagtggcctcagacaaaactgtgaagtagagtttgcatatggtgttgcttaccttctggaaagtgagcctctccagctcaggccgcatctccatctccctttccaattctcacctccccttctccccttagctcagtttttttttgtttttttaaaaaacaccaggttcgggtttcggcactcagggctcagagtgcagttgtgtgtgacacatagctccgtggggggctctaaaatctacctggactacaagcaggaatccccccttatttcaggctcttcccagaagtatttgggaccataaccagatttaaacactgcacagtacaaccagccggcgtactcagggccgaagggtggctttgaacccctgggcaaatggtgtgggctccatgaacttgccatgcagaaagactgtccactcgtggttacggcgagcccaaggacttactggagcaggaaccaaggtgtctccagggataaccgggagccccggggagaaatgcctccggggacactgctctggttagcctggagggatgctagaacctgtcacgagagccccaattaaggggaacagctatgggaagcccacgttccattggagagacaccgctcctgggcaactgggatcgcaggcgatgtacctcgcgcggcagagaggaggcagtatcaaccaagagggctggattcgacagagatcgaaacgcaacactcaatggcgagcacaacaatagaagtacagcgggtgacaccttcctgtttgccctgcc

SEQ ID NO: 452602 - DNA, 3685 bp, Homo sapiens
ggcggggcagctggagtctccaggcgctgcaatctgttgcgccgccgcccgcgggagccggcagatccgggtcttgtggctaagagtgacgtggtcactcgaatcaaaacagaggagggggaggaagccggcggccagaaacggcagtggcagcagcgtccggagcagccgcagccttctggaagctccaggcggtctttctgccgagcctcggtcccggcccccatcctccccgccccatcggttgttgtctgggcggatttaaacagtcaagtaaaatcaagctgggtaatcatggcagaaggtggatttgatccctgtgaatgtgtttgctctcatgaacatgcaatgagaagactgatcaatctgttacggcagtcccagtcctactgcacagacacagagtgtcttcaggaattaccgggaccctctggtgataatggcatcagtgttacaatgatcttggtagcctggatggttattgcattgatcttgttcttactgagacctcctaatctaagaggatccagcctacctggaaagccaaccagtcctcataatggacaagatccaccagctcctcctgtggactaactttgtgatatgggaagtgaaaatagttaacaccttgcacgaccaaacgaacgaagatgaccagagtactcttaaccccattagaactgtttttccttttgtatctgcaatatgggatggtattgttttcatgagcttctagaaatttcacttgcaagtttatttttgcttcctgtgttactgccattcctatttacagtatatttgagtgaatgattatatttttaaaaagttacatggggcttttttggttgtcctaaacttacaaacattccactcattctgtttgtaactgtgattataatttttgtgataatttctggcctgattgaaggaaatttgagaggtctgcatttatatattttaaatagatttgataggtttttaaattgctttttttcataaggtatttataaagttatttggggttgtctgggattgtgtgaaagaaaattagaaccacgctgtatttacatttaccttggtagtttatttgtggatggcagttttctgtagttttggggactgtggtagctcttggattgttttgcaaattacagctgaaatctgtgtcatggattaaactggcttatgtggctagaataggaagagagaaaaaatgaaatggttgtttactaattttatactcccattaaaaatctctaatgttaagaaaaccttaaataaacatgattgatcaatatggcagatgatttacagtccattatatgacatttgtaagccactcaacactagccttacaaggttcatgaaaggaggaaaacattaattctttctgcctttgctgatataatccacatagtaataatttaagctataatttatttttaaaatgagtgcctcttgggaagcttcttttctgttctaacagttccctgttaaaatgaaaatcttaggccagtgcagtggctcacacctgtaatcccagcactttgggaggctgaggtgggtggatcacttgaggtcaggagttcgagaccagcctggccaacatggtgaaaccctgtctctactaaaaatacagaaaaattagccagggttggtgcatgtgcctgtaatcccagctactcaggaggccaaagcaggagaattgcttgaacccgggaggtggaggttgcagtgaaccaagatcgcaccactgcattccagcctaagcaatagagcgagactccctctcaaaaaaaaaaaaagaagaaaatcttaaagctgtattagggcctgttaggttactgatatttgaatgcctatttacttatttactacattgagtcttttgttatcctctgacctataaaatattttaataaattactggtttacttcaagggaaaagaaggaaaatgagaaacatacatctttttttcactccttatctcattcctgtttggtgatgggatggattggggtaggaaggaatgttaatatgagagaaattttaaaatgtataaaaaagtaaaaggttgtattgttttgctcagtttgaaataaagtgaataccaatagcagtgcctggccagaaaatctggattcttattcctagttcttcatttctgtcacatgcacttagttgacattacatctacatatattagctttttcctacatgagccatctatttacttagtaaccagtgttcttaatgaagtatttagtcttgggtttcttgtaaaatttctctgcattccttagacagtgtactatacatgaaatattcttgttgacctagtaatttatattattccatttaattcttaaacctatggcctttttattgagcacactcttaaatcattatttggcttgtaaacattcatctgaattgtggctacaatcctctttaaataatctaggaaaaaagaaagataaagcttacattttcacagttttggctcttaaacacattccacaaatgccattaagaatttattttgttttaggccagtcatggtggctcatgcctgtaatcccagcaatttgggaggctgaggcaagaactgcttgagcccaggagtttgagactagcctgggcaacatagcaagaccctgtctctaccaaaaaaaaaaaagtttattttgttttagagtcatttaatgtgtttttatgcacaataatagtgggaggttgttttgttgcatttgtttgtttgttttgttttgttttgttttgctttccatgtgggaaaagttaacattggaactgtttctagtaaaagatttttttcaggctgggcacggtggctcatgcctgtaatcccaacactttgggagaccgagggagctggatcacctgaggtcaggagttcgagaccagcctggccaacatggaaaaactccatctccactaaaaatacaaaagtagcctggtgtggtggcacatgcctgtaatcccagctacttgggaagctgaggcaggagaatcacttgaacctgggaggtggaggttgcagtgagccaagatcacgccattgcactccagcctgggcaacaagagtgaaactccgtctcaaaaaaaacaagtcatatttcataatgtggattttccaaaataattattgaatacagctattctatggctacttttagtgtttttgtggtatgtggtgtgggagtgtttatggaattaccagtatcttaaattttcaaaggaaccttggaagtctatcactctaaatgaaagtctgtcactctacatgaattatgtgctcaaatttgaccaactcagtttaagacacaaaacagtaatttgaagaaggaaaaatgaagagagtttctagtttaatgggttaaatttttgttgttgcaatagtaagtttagtcttcttataatatttctaaatgaaaaatcataggtatttgttaccatgtgtgaagattactttgttaaaagcaaaagtggtcgtgtgatatgctaaatgttaattactgattttatatgtttaaatcacgccaaacaaattatgtctgtgccatccagggtctgttgttaatctttttctgagtacttggattgggataaagggcttgtactatgcactttttattaatgaataaatagaaaacgttagtaaca

SEQ ID NO: 452603 - DNA, 4953 bp, Homo sapiens
ggcggggcagctggagtctccaggcgctgcaatctgttgcgccgccgcccgcgggagccggcagatccgggtcttgtggctaagagtgacgtggtcactcgaatcaaaacagaggagggggaggaagccggcggccagaaacggcagtggcagcagcgtccggagcagccgcagccttctggaagctccaggcggtctttctgccgagcctcggtcccggcccccatcctccccgccccatcggttgttgtctgggcggatttaaacagtcaagtaaaatcaagctgggtaatcatggcagaaggtggatttgatccctgtgaatgtgtttgctctcatgaacatgcaatgagaagactgatcaatctgttacggcagtcccagtcctactgcacagacacagagtgtcttcaggaattaccgggaccctctggtgataatggcatcagtgttacaatgatcttggtagcctggatggttattgcattgatcttgttcttactgagacctcctaatctaagaggatccagcctacctggaaagccaaccagtcctcataatggacaagatccaccagctcctcctgtggactaactttgtgatatgggaagtgaaaatagttaacaccttgcacgaccaaacgaacgaagatgaccagagtactcttaaccccattagaactgtttttccttttgtatctgcaatatgggatggtattgttttcatgagcttctagaaatttcacttgcaagtttatttttgcttcctgtgttactgccattcctatttacagtatatttgagtgaatgattatatttttaaaaagttacatggggcttttttggttgtcctaaacttacaaacattccactcattctgtttgtaactgtgattataatttttgtgataatttctggcctgattgaaggaaatttgagaggtctgcatttatatattttaaatagatttgataggtttttaaattgctttttttcataaggtatttataaagttatttggggttgtctgggattgtgtgaaagaaaattagaaccacgctgtatttacatttaccttggtagtttatttgtggatggcagttttctgtagttttggggactgtggtagctcttggattgttttgcaaattacagctgaaatctgtgtcatggattaaactggcttatgtggctagaataggaagagagaaaaaatgaaatggttgtttactaattttatactcccattaaaaatctctaatgttaagaaaaccttaaataaacatgattgatcaatatggcagatgatttacagtccattatatgacatttgtaagccactcaacactagccttacaaggttcatgaaaggaggaaaacattaattctttctgcctttgctgatataatccacatagtaataatttaagctataatttatttttaaaatgagtgcctcttgggaagcttcttttctgttctaacagttccctgttaaaatgaaaatcttaggccagtgcagtggctcacacctgtaatcccagcactttgggaggctgaggtgggtggatcacttgaggtcaggagttcgagaccagcctggccaacatggtgaaaccctgtctctactaaaaatacagaaaaattagccagggttggtgcatgtgcctgtaatcccagctactcaggaggccaaagcaggagaattgcttgaacccgggaggtggaggttgcagtgaaccaagatcgcaccactgcattccagcctaagcaatagagcgagactccctctcaaaaaaaaaaaaagaagaaaatcttaaagctgtattagggcctgttaggttactgatatttgaatgcctatttacttatttactacattgagtcttttgttatcctctgacctataaaatattttaataaattactggtttacttcaagggaaaagaaggaaaatgagaaacatacatctttttttcactccttatctcattcctgtttggtgatgggatggattggggtaggaaggaatgttaatatgagagaaattttaaaatgtataaaaaagtaaaaggttgtattgttttgctcagtttgaaataaagtgaataccaatagcagtgcctggccagaaaatctggattcttattcctagttcttcatttctgtcacatgcacttagttgacattacatctacatatattagctttttcctacatgagccatctatttacttagtaaccagtgttcttaatgaagtatttagtcttgggtttcttgtaaaatttctctgcattccttagacagtgtactatacatgaaatattcttgttgacctagtaatttatattattccatttaattcttaaacctatggcctttttattgagcacactcttaaatcattatttggcttgtaaacattcatctgaattgtggctacaatcctctttaaataatctaggaaaaaagaaagataaagcttacattttcacagttttggctcttaaacacattccacaaatgccattaagaatttattttgttttaggccagtcatggtggctcatgcctgtaatcccagcaatttgggaggctgaggcaagaactgcttgagcccaggagtttgagactagcctgggcaacatagcaagaccctgtctctaccaaaaaaaaaaaagtttattttgttttagagtcatttaatgtgtttttatgcacaataatagtgggaggttgttttgttgcatttgtttgtttgttttgttttgttttgttttgctttccatgtgggaaaagttaacattggaactgtttctagtaaaagatttttttcaggctgggcacggtggctcatgcctgtaatcccaacactttgggagaccgagggagctggatcacctgaggtcaggagttcgagaccagcctggccaacatggaaaaactccatctccactaaaaatacaaaagtagcctggtgtggtggcacatgcctgtaatcccagctacttgggaagctgaggcaggagaatcacttgaacctgggaggtggaggttgcagtgagccaagatcacgccattgcactccagcctgggcaacaagagtgaaactccgtctcaaaaaaaaaaaaaaaaagatgtttttcatttttttcatgttatctatccaagcactgttccatggtcagcaagtcatatttcataatgtggattttccaaaataattattgaatacagctattctatggctacttttagtgtttttgtggtatgtggtgtgggagtgtttatggaattaccagtatcttaaattttcaaaggaaccttggaagtctatcactctaaatgaaagtctgtcactctacatgaattatgtgctcaaatttgaccaactcagtttaagacacaaaacagtaatttgaagaaggaaaaatgaagagagtttctagtttaatgggttaaatttttgttgttgcaatagtaagtttagtcttcttataatatttctaaatgaaaaatcataggtatttgttaccatgtgtgaagattactttgttaaaagcaaaagtggtcgtgtgatatgctaaatgttaattactgattttatatgtttaaatcacgccaaacaaattatgtctgtgccatccagggtctgttgttaatctttttctgagtacttggattgggataaagggcttgtactatgcactttttattaatgaataaatagaaaacgttagtaacactttgtgttttctgtttggcttttgtgggaagagaagcaagcatcttttgcctagtagatgttaacattgtgtattaaacagtttctttgtaagacctaactaaagacattcctaagagagaacttaagttttaagaaaagttgtgagaaaaatattcataaaatatgcagtatggggccagtattcagaagtagagtttctctcttggaaattagattgcagtcacatttctttggttattttctttctctctctcttcctagaataccaggtaaaatagacatttactttgagggactaatatccaatagtgttaattatttaagcagatatatctagctcaaaaggaaccagacatgtcactgtaccaaaaacacacaaaagtgaaaatttgcttctgttctgtgacctagaatgtgtccagacattaaagatcatgaatactcatatacatgtaaaaatagtaacactgctctggcatgattttgacgtcagtgtttatgtaataacttcagtgttatatttaaaatagataaatttgtgaaataacaatttcttggagacagtcaactttttatgatttaatctaaagattgtcatgtacatgtcaacggatatctgaatcctcagtgaaactgttaagttttcattaaatgactctgctgcaatactagttttcttctcagaaaatggaattcaaataaaataagttttttggtcttggcatttcacctgatgactttctctgttctggatctcaatttgtagagttgttgggggttcccccccctccaaaagatgctccataaacaccaactacaattatctttcatgatcatatttttaaaaattggagttacctgtgtgatcttttcccattagttgcttgtaggggactttagtgtgcgtatctcttctcagacaaatgtattatgttcgttcaataaacacttcaacaaatttttatacttgtttcttaactctctataggctttaaaatggattttattcaggatttgattacagaaactatttcaaaccatcagatgccaaattgtctactgacgttagtgaggagatgtctgggaggcaaggactatgtaggggtgaaaacaatatatatagttttaaagataaagcaactttctttcttttttctttttcttttttttttttttttttttttgagacatagtatcactctgt

SEQ ID NO: 452604 - DNA, 1790 bp, Homo sapiens
ggcggggcagctggagtctccaggcgctgcaatctgttgcgccgccgcccgcgggagccggcagatccgggtcttgtggctaagagtgacgtggtcactcgaatcaaaacagaggagggggaggaagccggcggccagaaacggcagtggcagcagcgtccggagcagccgcagccttctggaagctccaggcggtctttctgccgagcctcggtcccggcccccatcctccccgccccatcggttgttgtctgggcggatttaaacagtcaagtaaaatcaagctgggtaatcatggcagaaggtggatttgatccctgtgaatgtgtttgctctcatgaacatgcaatgagaagactgatcaatctgttacggcagtcccagtcctactgcacagacacagagtgtcttcaggaattaccgggaccctctggtgataatggcatcagtgttacaatgatcttggtagcctggatggttattgcattgatcttgttcttactgagacctcctaatctaagaggatccagcctacctggaaagccaaccagtcctcataatggacaagatccaccagctcctcctgtggactaactttgtgatatgggaagtgaaaatagttaacaccttgcacgaccaaacgaacgaagatgaccagagtactcttaaccccattagaactgtttttccttttgtatctgcaatatgggatggtattgttttcatgagcttctagaaatttcacttgcaagtttatttttgcttcctgtgttactgccattcctatttacagtatatttgagtgaatgattatatttttaaaaagttacatggggcttttttggttgtcctaaacttacaaacattccactcattctgtttgtaactgtgattataatttttgtgataatttctggcctgattgaaggaaatttgagaggtctgcatttatatattttaaatagatttgataggtttttaaattgctttttttcataaggtatttataaagttatttggggttgtctgggattgtgtgaaagaaaattagaaccacgctgtatttacatttaccttggtagtttatttgtggatggcagttttctgtagttttggggactgtggtagctcttggattgttttgcaaattacagctgaaatctgtgtcatggattaaactggcttatgtggctagaataggaagagagaaaaaatgaaatggttgtttactaattttatactcccattaaaaatctctaatgttaagaaaaccttaaataaacatgattgatcaatatggcagatgatttacagtccattatatgacatttgtaagccactcaacactagccttacaaggttcatgaaaggaggaaaacattaattctttctgcctttgctgatataatccacatagtaataatttaagctataatttatttttaaaatgagtgcctcttgggaagcttcttttctgttctaacagttccctgttaaaatgaaaatcttaggccagtgcagtggctcacacctgtaatcccagcactttgggaggctgaggtgggtggatcacttgaggtcaggagttcgagaccagcctggccaacatggtgaaaccctgtctctactaaaaatacagaaaaattagccagggttggtgcatgtgcctgtaatcccagctactcaggaggccaaagcaggagaattgcttgaacccgggaggtggaggttgcagtgaaccaagatcgcaccactgcattccagcctaagcaatagagcgagactccctc

SEQ ID NO: 452605 - DNA, 3599 bp, Homo sapiens
ggcggggcagctggagtctccaggcgctgcaatctgttgcgccgccgcccgcgggagccggcagatccgggtcttgtggctaagagtgacgtggtcactcgaatcaaaacagatttaaacagtcaagtaaaatcaagctgggtaatcatggcagaaggtggatttgatccctgtgaatgtgtttgctctcatgaacatgcaatgagaagactgatcaatctgttacggcagtcccagtcctactgcacagacacagagtgtcttcaggaattaccgggaccctctggtgataatggcatcagtgttacaatgatcttggtagcctggatggttattgcattgatcttgttcttactgagacctcctaatctaagaggatccagcctacctggaaagccaaccagtcctcataatggacaagatccaccagctcctcctgtggactaactttgtgatatgggaagtgaaaatagttaacaccttgcacgaccaaacgaacgaagatgaccagagtactcttaaccccattagaactgtttttccttttgtatctgcaatatgggatggtattgttttcatgagcttctagaaatttcacttgcaagtttatttttgcttcctgtgttactgccattcctatttacagtatatttgagtgaatgattatatttttaaaaagttacatggggcttttttggttgtcctaaacttacaaacattccactcattctgtttgtaactgtgattataatttttgtgataatttctggcctgattgaaggaaatttgagaggtctgcatttatatattttaaatagatttgataggtttttaaattgctttttttcataaggtatttataaagttatttggggttgtctgggattgtgtgaaagaaaattagaaccacgctgtatttacatttaccttggtagtttatttgtggatggcagttttctgtagttttggggactgtggtagctcttggattgttttgcaaattacagctgaaatctgtgtcatggattaaactggcttatgtggctagaataggaagagagaaaaaatgaaatggttgtttactaattttatactcccattaaaaatctctaatgttaagaaaaccttaaataaacatgattgatcaatatggcagatgatttacagtccattatatgacatttgtaagccactcaacactagccttacaaggttcatgaaaggaggaaaacattaattctttctgcctttgctgatataatccacatagtaataatttaagctataatttatttttaaaatgagtgcctcttgggaagcttcttttctgttctaacagttccctgttaaaatgaaaatcttaggccagtgcagtggctcacacctgtaatcccagcactttgggaggctgaggtgggtggatcacttgaggtcaggagttcgagaccagcctggccaacatggtgaaaccctgtctctactaaaaatacagaaaaattagccagggttggtgcatgtgcctgtaatcccagctactcaggaggccaaagcaggagaattgcttgaacccgggaggtggaggttgcagtgaaccaagatcgcaccactgcattccagcctaagcaatagagcgagactccctctcaaaaaaaaaaaaagaagaaaatcttaaagctgtattagggcctgttaggttactgatatttgaatgcctatttacttatttactacattgagtcttttgttatcctctgacctataaaatattttaataaattactggtttacttcaagggaaaagaaggaaaatgagaaacatacatctttttttcactccttatctcattcctgtttggtgatgggatggattggggtaggaaggaatgttaatatgagagaaattttaaaatgtataaaaaagtaaaaggttgtattgttttgctcagtttgaaataaagtgaataccaatagcagtgcctggccagaaaatctggattcttattcctagttcttcatttctgtcacatgcacttagttgacattacatctacatatattagctttttcctacatgagccatctatttacttagtaaccagtgttcttaatgaagtatttagtcttgggtttcttgtaaaatttctctgcattccttagacagtgtactatacatgaaatattcttgttgacctagtaatttatattattccatttaattcttaaacctatggcctttttattgagcacactcttaaatcattatttggcttgtaaacattcatctgaattgtggctacaatcctctttaaataatctaggaaaaaagaaagataaagcttacattttcacagttttggctcttaaacacattccacaaatgccattaagaatttattttgttttaggccagtcatggtggctcatgcctgtaatcccagcaatttgggaggctgaggcaagaactgcttgagcccaggagtttgagactagcctgggcaacatagcaagaccctgtctctaccaaaaaaaaaaaagtttattttgttttagagtcatttaatgtgtttttatgcacaataatagtgggaggttgttttgttgcatttgtttgtttgttttgttttgttttgttttgctttccatgtgggaaaagttaacattggaactgtttctagtaaaagatttttttcaggctgggcacggtggctcatgcctgtaatcccaacactttgggagaccgagggagctggatcacctgaggtcaggagttcgagaccagcctggccaacatggaaaaactccatctccactaaaaatacaaaagtagcctggtgtggtggcacatgcctgtaatcccagctacttgggaagctgaggcaggagaatcacttgaacctgggaggtggaggttgcagtgagccaagatcacgccattgcactccagcctgggcaacaagagtgaaactccgtctcaaaaaaaaaaaaaaaaagatgtttttcatttttttcatgttatctatccaagcactgttccatggtcagcaagtcatatttcataatgtggattttccaaaataattattgaatacagctattctatggctacttttagtgtttttgtggtatgtggtgtgggagtgtttatggaattaccagtatcttaaattttcaaaggaaccttggaagtctatcactctaaatgaaagtctgtcactctacatgaattatgtgctcaaatttgaccaactcagtttaagacacaaaacagtaatttgaagaaggaaaaatgaagagagtttctagtttaatgggttaaatttttgttgttgcaatagtaagtttagtcttcttataatatttctaaatgaaaaatcataggtatttgttaccatgtgtgaagattactttgttaaaagcaaaagtggtcgtgtgatatgctaaatgttaattactgattttatatgtttaaatcacgccaaacaaattatgtctgtgccatccagggtctgttgttaatctttttctgagtacttggattgggataaagggcttgtactatgcactttttattaatgaataaatagaaaacgttagtaaca

SEQ ID NO: 452606 - DNA, 3603 bp, Homo sapiens
ggcggggcagctggagtctccaggcgctgcaatctgttgcgccgccgcccgcgggagccggcagatccgggtcttgtggctaagagtgacgtggtcactcgaatcaaaacagaggagggggaggaagccggcggccagaaacggcagtggcagcagcgtccggagcagccgcagccttctggaagctccaggcggtctttctgccgagcctcggtcccggcccccatcctccccgccccatcggttgttgtctgggcggatttaaacagtcaagtaaaatcaagctgggtaatcatggcagaaggtggatttgatccctgtgaatgtgtttgctctcatgaacatgcaatgagaagactgatcaatctgttacggcagtcccagtcctactgcacagacacagagtgtcttcaggaatggacaagatccaccagctcctcctgtggactaactttgtgatatgggaagtgaaaatagttaacaccttgcacgaccaaacgaacgaagatgaccagagtactcttaaccccattagaactgtttttccttttgtatctgcaatatgggatggtattgttttcatgagcttctagaaatttcacttgcaagtttatttttgcttcctgtgttactgccattcctatttacagtatatttgagtgaatgattatatttttaaaaagttacatggggcttttttggttgtcctaaacttacaaacattccactcattctgtttgtaactgtgattataatttttgtgataatttctggcctgattgaaggaaatttgagaggtctgcatttatatattttaaatagatttgataggtttttaaattgctttttttcataaggtatttataaagttatttggggttgtctgggattgtgtgaaagaaaattagaaccacgctgtatttacatttaccttggtagtttatttgtggatggcagttttctgtagttttggggactgtggtagctcttggattgttttgcaaattacagctgaaatctgtgtcatggattaaactggcttatgtggctagaataggaagagagaaaaaatgaaatggttgtttactaattttatactcccattaaaaatctctaatgttaagaaaaccttaaataaacatgattgatcaatatggcagatgatttacagtccattatatgacatttgtaagccactcaacactagccttacaaggttcatgaaaggaggaaaacattaattctttctgcctttgctgatataatccacatagtaataatttaagctataatttatttttaaaatgagtgcctcttgggaagcttcttttctgttctaacagttccctgttaaaatgaaaatcttaggccagtgcagtggctcacacctgtaatcccagcactttgggaggctgaggtgggtggatcacttgaggtcaggagttcgagaccagcctggccaacatggtgaaaccctgtctctactaaaaatacagaaaaattagccagggttggtgcatgtgcctgtaatcccagctactcaggaggccaaagcaggagaattgcttgaacccgggaggtggaggttgcagtgaaccaagatcgcaccactgcattccagcctaagcaatagagcgagactccctctcaaaaaaaaaaaaagaagaaaatcttaaagctgtattagggcctgttaggttactgatatttgaatgcctatttacttatttactacattgagtcttttgttatcctctgacctataaaatattttaataaattactggtttacttcaagggaaaagaaggaaaatgagaaacatacatctttttttcactccttatctcattcctgtttggtgatgggatggattggggtaggaaggaatgttaatatgagagaaattttaaaatgtataaaaaagtaaaaggttgtattgttttgctcagtttgaaataaagtgaataccaatagcagtgcctggccagaaaatctggattcttattcctagttcttcatttctgtcacatgcacttagttgacattacatctacatatattagctttttcctacatgagccatctatttacttagtaaccagtgttcttaatgaagtatttagtcttgggtttcttgtaaaatttctctgcattccttagacagtgtactatacatgaaatattcttgttgacctagtaatttatattattccatttaattcttaaacctatggcctttttattgagcacactcttaaatcattatttggcttgtaaacattcatctgaattgtggctacaatcctctttaaataatctaggaaaaaagaaagataaagcttacattttcacagttttggctcttaaacacattccacaaatgccattaagaatttattttgttttaggccagtcatggtggctcatgcctgtaatcccagcaatttgggaggctgaggcaagaactgcttgagcccaggagtttgagactagcctgggcaacatagcaagaccctgtctctaccaaaaaaaaaaaagtttattttgttttagagtcatttaatgtgtttttatgcacaataatagtgggaggttgttttgttgcatttgtttgtttgttttgttttgttttgttttgctttccatgtgggaaaagttaacattggaactgtttctagtaaaagatttttttcaggctgggcacggtggctcatgcctgtaatcccaacactttgggagaccgagggagctggatcacctgaggtcaggagttcgagaccagcctggccaacatggaaaaactccatctccactaaaaatacaaaagtagcctggtgtggtggcacatgcctgtaatcccagctacttgggaagctgaggcaggagaatcacttgaacctgggaggtggaggttgcagtgagccaagatcacgccattgcactccagcctgggcaacaagagtgaaactccgtctcaaaaaaaaaaaaaaaaagatgtttttcatttttttcatgttatctatccaagcactgttccatggtcagcaagtcatatttcataatgtggattttccaaaataattattgaatacagctattctatggctacttttagtgtttttgtggtatgtggtgtgggagtgtttatggaattaccagtatcttaaattttcaaaggaaccttggaagtctatcactctaaatgaaagtctgtcactctacatgaattatgtgctcaaatttgaccaactcagtttaagacacaaaacagtaatttgaagaaggaaaaatgaagagagtttctagtttaatgggttaaatttttgttgttgcaatagtaagtttagtcttcttataatatttctaaatgaaaaatcataggtatttgttaccatgtgtgaagattactttgttaaaagcaaaagtggtcgtgtgatatgctaaatgttaattactgattttatatgtttaaatcacgccaaacaaattatgtctgtgccatccagggtctgttgttaatctttttctgagtacttggattgggataaagggcttgtactatgcactttttattaatgaataaatagaaaacgttagtaaca

SEQ ID NO: 452607 - DNA, 855 bp, Homo sapiens
ggcggggcagctggagtctccaggcgctgcaatctgttgcgccgccgcccgcgggagccggcagatccgggtcttgtggctaagagtgacgtggtcactcgaatcaaaacagaggagggggaggaagccggcggccagaaacggcagtggcagcagcgtccggagcagccgcagccttctggaagctccaggcggtctttctgccgagcctcggtcccggcccccatcctccccgccccatcggttgttgtctgggcggatttaaacagtcaagtaaaatcaagctgggtaatcatggcagaaggtggatttgatccctgtgaatgtgtttgctctcatgaacatgcaatgagaagactgatcaatctgttacggcagtcccagtcctactgcacagacacagagtgtcttcaggaattaccgggaccctctggtgataatggcatcagtgttacaatgatcttggtagcctggatggttattgcattgatcttgttcttactgagacctcctaatctaagaggatccagcctacctggaaagccaaccagtcctcataatggacaagatccaccagctcctcctgtggactaactttgtgatatgggaagtgaaaatagttaacaccttgcacgaccaaacgaacgaagatgaccagagtactcttaaccccattagaactgtttttccttttgtatctgcaatatgggatggtattgttttcatgagcttctagaaatttcacttgcaagtttatttttgcttcctgtgttactgccattcctatttacagtatatttgagtgaatgattatatttttcgaactgggatatacctttgggataattctggccg

SEQ ID NO: 452608 - DNA, 423 bp, Homo sapiens
  misc_feature (1)..(1): n is a, c, g, or t
  misc_feature (10)..(10): n is a, c, g, or t
nattcggcangagggggagcactgtgtttatgctggaatatgaagtctgagacttccggtgctgggaacacacaagagttgttgaaaacagctctcttctcctattttcatcctgcaagcaactcaaaatatttaaaataaagtttacattgtagttattttcaaatctttgcttgataagtattaagaaatattggacttgctgccgtaatttaaagctctgttgattttgtttccgtttggatttttgggggaggggagcactgtgtttatgctggaatatgaagtctgagaccttccggtgctgggaacacacaagagttgttgaaagttgacaagcagactgcgcatgtctctgatgctttgtatcattcttgagcaatcgctcggtccgtggacaataaacagtattatcaaagagaa

SEQ ID NO: 452609 - DNA, 364 bp, Homo sapiens
ataggagtggtgagagagagaacccttgtcttgtgccagttttcaaagggaatgcttctagtttttgcccattcagtatgatattggctgtgggtttgtcataaatagctcttatacatttcatcaatgcctagtttattgagagtttttagcatgaagctctgttgattttgtttccgtttggatttttgggggaggggagcactgtgtttatgctggaatatgaagtctgagaccttccggtgctgggaacacacaagagttgttgaaagttgacaagcagactgcgcatgtctctgatgctttgtatcattcttgagcaatcgctcggtccgtggacaataaacagtattatcaaagagaa

SEQ ID NO: 452610 - DNA, 3424 bp, Homo sapiens
gaactataggcaggtacgaggccgcggttaaggagacgccatgccgggggctgggatcaccatgccccttgcccgtctcgcaccttgctgctgtctgtaaccccccagcacctcccgcaggcctggacgtcttatccctctccttagccccaggagcgtgtttcaggaactctcctcacctctgtgtcttgtgttttgcagtgatcagggccaaagcggtcagtgagaaggaagtggactctggaaacgacatttatggcaaccctatcaagaggatccagtatgagatcaagcagataaagatgttcaaagggcctgagaaggatatagagtttatctacacggccccctcctcggcagtgtgtggggtctcgctggacgttggaggaaagaaggaatatctcattgcaggaaaggccgagggggacggcaagatgcacatcaccctctgtgacttcatcgtgccctgggacaccctgagcaccacccagaagaagagcctgaaccacaggtaccagatgggctgcgagtgcaagatcacgcgctgccccatgatcccgtgctacatctcctccccggacgagtgcctctggatggactgggtcacagagaagaacatcaacgggcaccaggccaagttcttcgcctgcatcaagagaagtgacggctcctgtgcgtggtaccgcggcgcggcgccccccaagcaggagtttctcgacatcgaggacccataagcaggcctccaacgcccctgtggccaactgcaaaaaaagcctccaagggtttcgactggtccagctctgacatcccttcctggaaacagcatgaataaaacactcatcccatgggtccaaattaatatgattctgctccccccttctccttttagacatggttgtgggtctggagggagacgtgggtccaaggtcctcatcccatcctccctctgccaggcactatgtgtctggggcttcgatccttgggtgcaggcagggctgggacacgcggcttccctcccagtccctgccttggcaccgtcacagatgccaagcaggcagcacttagggatctcccagctgggttagggcagggcctggaaatgtgcattttgcagaaacttttgagggtcgttgcaagactgtgtagcaggcctaccaggtccctttcatcttgagagggacatggcccttgttttctgcagcttccacgcctctgcactccctgcccctggcaagtgctcccatcgccccggtgcccaccatgagctcccagcacctgactccccccacatccaagggcagcctggaaccagtggctagttcttgaaggagccccatcaatcctattaatcctcagaattccagtgggagcctccctctgagccttgtagaaatgggagcgagaaaccccagctgagctgcgttccagcctcagctgagtctttttggtctgcaccccacccccccaccctccccccccgcccacatgctccccagcttgcaggaggaatcggtgaggtcctgtcctgaggctgctgtccggggccggtggctgccctcaaggtcccttccctagctgctgcggttgccattgcttcttgcctgttctggcatcaggcacctggattgagttgcacagctttgctttatccgggcttgtgtgcagggcccggctgggctccccatctgcacatcctgaggacagaaaaagctgggtcttgctgtgccctcccaggcttagtgttccctccctcaaagactgacagccatcgttctgcacggggctttctgcatgtgacgccagctaagcatagtaagaagtccagcctaggaagggaaggattttggaggtaggtggctttggtgacacactcacttctttctcagcctccaggacactatggcctgttttaagagacatcttatttttctaaaggtgaattctcagatgataggtgaacctgagttgcagatataccaacttctgcttgtatttcttaaatgacaaagattacctagctaagaaacttcctagggaactagggaacctatgtgttccctcagtgtggtttcctgaagccagtgatatgggggttaggataggaagaactttctcggtaatgataaggagaatctcttgtttcctcccacctgtgttgtaaagataaactgacgatatacaggcacattatgtaaacatacacacgcaatgaaaccgaagcttggcggcctgggcgtggtcttgcaaaatgcttccaaagccaccttagcctgttctattcagcggcaaccccaaagcacctgttaagactcctgacccccaagtggcatgcagcccccatgcccaccgggacctggtcagcacagatcttgatgacttccctttctagggcagactgggagggtatccaggaatcggcccctgccccacgggcgttttcatgctgtacagtgacctaaagttggtaagatgtcataatggaccagtccatgtgatttcagtatatacaactccaccagacccctccaacccatataacaccccacccctgttcgcttcctgtatggtgatatcatatgtaacatttactcctgtttctgctgattgtttttttaatgttttggtttgtttttgacatcagctgtaatcattcctgtgctgtgttttttattacccttggtaggtattagacttgcacttttttaaaaaaaggtttctgcatcgtggaagcatttgacccagagtggaacgcgtggcctatgcaggtggattccttcaggtctttcctttggttctttgagcatctttgctttcattcgtctcccgtctttggttctccagttcaaattattgcaaagtaaaggatctttgagtaggttcggtctgaaaggtgtggcctttatatttgatccacacacgttggtcttttaaccgtgctgagcagaaaacaaaacaggttaagaagagccgggtggcagctgacagaggaagccgctcaaataccttcacaataaatagtggcaatatatatatagtttaagaaggctctccatttggcatcgtttaatttatatgttatgttctaagcacagctctcttctcctattttcatcctgcaagcaactcaaaatatttaaaataaagtttacattgtagttattttcaaatctttgcttgataagtattaagaaatattggacttgctgccgtaatttaaagctctgttgattttgtttccgtttggatttttgggggaggggagcactgtgtttatgctggaatatgaagtctgagaccttccggtgctgggaacacacaagagttgttgaaagttgacaagcagactgcgcatgtctctgatgctttgtatcattcttgagcaatcgctcggtccgtggacaataaacagtattatcaaagagaa

SEQ ID NO: 452611 - DNA, 3741 bp, Homo sapiens
cccatggcaacagcctgctatgagtagccagccagggcagaggccgggctgcaggtggaggcggggaagcgattccggccacctttgtgatgggcgtctcactacctacaaagtcagcccagtgatttcaagacagccctggagacagtgcttcctgccctcctgtcagcttctgcctccctgtaatgtgttctgggtggtctagctcagtcatctggagacacacacaagcacaggcacttcgtagctgttgaccatcatttagctccacgtctgcccgtcggttcctcgtgcgtggaatccagcaccacgtgggtgtctctgccgagctctcggcatttcctgagccctcccggaagccagactctgttctcggcgcttcacacgggccgtctcgtctgatgctgtggcgtcctgcagggtgggaacgggcggtgcccgtggacgtggcgctgtgcctgccggcgtcctgggcaccacagcgttgccgcttgcccactgcctcctagcatggccagtgatcagggccaaagcggtcagtgagaaggaagtggactctggaaacgacatttatggcaaccctatcaagaggatccagtatgagatcaagcagataaagatgttcaaagggcctgagaaggatatagagtttatctacacggccccctcctcggcagtgtgtggggtctcgctggacgttggaggaaagaaggaatatctcattgcaggaaaggccgagggggacggcaagatgcacatcaccctctgtgacttcatcgtgccctgggacaccctgagcaccacccagaagaagagcctgaaccacaggtaccagatgggctgcgagtgcaagatcacgcgctgccccatgatcccgtgctacatctcctccccggacgagtgcctctggatggactgggtcacagagaagaacatcaacgggcaccaggccaagttcttcgcctgcatcaagagaagtgacggctcctgtgcgtggtaccgcggcgcggcgccccccaagcaggagtttctcgacatcgaggacccataagcaggcctccaacgcccctgtggccaactgcaaaaaaagcctccaagggtttcgactggtccagctctgacatcccttcctggaaacagcatgaataaaacactcatcccatgggtccaaattaatatgattctgctccccccttctccttttagacatggttgtgggtctggagggagacgtgggtccaaggtcctcatcccatcctccctctgccaggcactatgtgtctggggcttcgatccttgggtgcaggcagggctgggacacgcggcttccctcccagtccctgccttggcaccgtcacagatgccaagcaggcagcacttagggatctcccagctgggttagggcagggcctggaaatgtgcattttgcagaaacttttgagggtcgttgcaagactgtgtagcaggcctaccaggtccctttcatcttgagagggacatggcccttgttttctgcagcttccacgcctctgcactccctgcccctggcaagtgctcccatcgccccggtgcccaccatgagctcccagcacctgactccccccacatccaagggcagcctggaaccagtggctagttcttgaaggagccccatcaatcctattaatcctcagaattccagtgggagcctccctctgagccttgtagaaatgggagcgagaaaccccagctgagctgcgttccagcctcagctgagtctttttggtctgcaccccacccccccaccctccccccccgcccacatgctccccagcttgcaggaggaatcggtgaggtcctgtcctgaggctgctgtccggggccggtggctgccctcaaggtcccttccctagctgctgcggttgccattgcttcttgcctgttctggcatcaggcacctggattgagttgcacagctttgctttatccgggcttgtgtgcagggcccggctgggctccccatctgcacatcctgaggacagaaaaagctgggtcttgctgtgccctcccaggcttagtgttccctccctcaaagactgacagccatcgttctgcacggggctttctgcatgtgacgccagctaagcatagtaagaagtccagcctaggaagggaaggattttggaggtaggtggctttggtgacacactcacttctttctcagcctccaggacactatggcctgttttaagagacatcttatttttctaaaggtgaattctcagatgataggtgaacctgagttgcagatataccaacttctgcttgtatttcttaaatgacaaagattacctagctaagaaacttcctagggaactagggaacctatgtgttccctcagtgtggtttcctgaagccagtgatatgggggttaggataggaagaactttctcggtaatgataaggagaatctcttgtttcctcccacctgtgttgtaaagataaactgacgatatacaggcacattatgtaaacatacacacgcaatgaaaccgaagcttggcggcctgggcgtggtcttgcaaaatgcttccaaagccaccttagcctgttctattcagcggcaaccccaaagcacctgttaagactcctgacccccaagtggcatgcagcccccatgcccaccgggacctggtcagcacagatcttgatgacttccctttctagggcagactgggagggtatccaggaatcggcccctgccccacgggcgttttcatgctgtacagtgacctaaagttggtaagatgtcataatggaccagtccatgtgatttcagtatatacaactccaccagacccctccaacccatataacaccccacccctgttcgcttcctgtatggtgatatcatatgtaacatttactcctgtttctgctgattgtttttttaatgttttggtttgtttttgacatcagctgtaatcattcctgtgctgtgttttttattacccttggtaggtattagacttgcacttttttaaaaaaaggtttctgcatcgtggaagcatttgacccagagtggaacgcgtggcctatgcaggtggattccttcaggtctttcctttggttctttgagcatctttgctttcattcgtctcccgtctttggttctccagttcaaattattgcaaagtaaaggatctttgagtaggttcggtctgaaaggtgtggcctttatatttgatccacacacgttggtcttttaaccgtgctgagcagaaaacaaaacaggttaagaagagccgggtggcagctgacagaggaagccgctcaaataccttcacaataaatagtggcaatatatatatagtttaagaaggctctccatttggcatcgtttaatttatatgttatgttctaagcacagctctcttctcctattttcatcctgcaagcaactcaaaatatttaaaataaagtttacattgtagttattttcaaatctttgcttgataagtattaagaaatattggacttgctgccgtaatttaaagctctgttgattttgtttccgtttggatttttgggggaggggagcactgtgtttatgctggaatatgaagtctgagaccttccggtgctgggaacacacaagagttgttgaaagttgacaagcagactgcgcatgtctctgatgctttgtatcattcttgagcaatcgctcggtccgtggacaataaacagtattatcaaagagaa

SEQ ID NO: 452612 - DNA, 3044 bp, Homo sapiens
agctcggtgatccccgtctatctcattgcaggaaaggccgagggggacggcaagatgcacatcaccctctgtgacttcatcgtgccctgggacaccctgagcaccacccagaagaagagcctgaaccacaggtaccagatgggctgcgagtgcaagatcacgcgctgccccatgatcccgtgctacatctcctccccggacgagtgcctctggatggactgggtcacagagaagaacatcaacgggcaccaggccaagttcttcgcctgcatcaagagaagtgacggctcctgtgcgtggtaccgcggcgcggcgccccccaagcaggagtttctcgacatcgaggacccataagcaggcctccaacgcccctgtggccaactgcaaaaaaagcctccaagggtttcgactggtccagctctgacatcccttcctggaaacagcatgaataaaacactcatcccatgggtccaaattaatatgattctgctccccccttctccttttagacatggttgtgggtctggagggagacgtgggtccaaggtcctcatcccatcctccctctgccaggcactatgtgtctggggcttcgatccttgggtgcaggcagggctgggacacgcggcttccctcccagtccctgccttggcaccgtcacagatgccaagcaggcagcacttagggatctcccagctgggttagggcagggcctggaaatgtgcattttgcagaaacttttgagggtcgttgcaagactgtgtagcaggcctaccaggtccctttcatcttgagagggacatggcccttgttttctgcagcttccacgcctctgcactccctgcccctggcaagtgctcccatcgccccggtgcccaccatgagctcccagcacctgactccccccacatccaagggcagcctggaaccagtggctagttcttgaaggagccccatcaatcctattaatcctcagaattccagtgggagcctccctctgagccttgtagaaatgggagcgagaaaccccagctgagctgcgttccagcctcagctgagtctttttggtctgcaccccacccccccaccctccccccccgcccacatgctccccagcttgcaggaggaatcggtgaggtcctgtcctgaggctgctgtccggggccggtggctgccctcaaggtcccttccctagctgctgcggttgccattgcttcttgcctgttctggcatcaggcacctggattgagttgcacagctttgctttatccgggcttgtgtgcagggcccggctgggctccccatctgcacatcctgaggacagaaaaagctgggtcttgctgtgccctcccaggcttagtgttccctccctcaaagactgacagccatcgttctgcacggggctttctgcatgtgacgccagctaagcatagtaagaagtccagcctaggaagggaaggattttggaggtaggtggctttggtgacacactcacttctttctcagcctccaggacactatggcctgttttaagagacatcttatttttctaaaggtgaattctcagatgataggtgaacctgagttgcagatataccaacttctgcttgtatttcttaaatgacaaagattacctagctaagaaacttcctagggaactagggaacctatgtgttccctcagtgtggtttcctgaagccagtgatatgggggttaggataggaagaactttctcggtaatgataaggagaatctcttgtttcctcccacctgtgttgtaaagataaactgacgatatacaggcacattatgtaaacatacacacgcaatgaaaccgaagcttggcggcctgggcgtggtcttgcaaaatgcttccaaagccaccttagcctgttctattcagcggcaaccccaaagcacctgttaagactcctgacccccaagtggcatgcagcccccatgcccaccgggacctggtcagcacagatcttgatgacttccctttctagggcagactgggagggtatccaggaatcggcccctgccccacgggcgttttcatgctgtacagtgacctaaagttggtaagatgtcataatggaccagtccatgtgatttcagtatatacaactccaccagacccctccaacccatataacaccccacccctgttcgcttcctgtatggtgatatcatatgtaacatttactcctgtttctgctgattgtttttttaatgttttggtttgtttttgacatcagctgtaatcattcctgtgctgtgttttttattacccttggtaggtattagacttgcacttttttaaaaaaaggtttctgcatcgtggaagcatttgacccagagtggaacgcgtggcctatgcaggtggattccttcaggtctttcctttggttctttgagcatctttgctttcattcgtctcccgtctttggttctccagttcaaattattgcaaagtaaaggatctttgagtaggttcggtctgaaaggtgtggcctttatatttgatccacacacgttggtcttttaaccgtgctgagcagaaaacaaaacaggttaagaagagccgggtggcagctgacagaggaagccgctcaaataccttcacaataaatagtggcaatatatatatagtttaagaaggctctccatttggcatcgtttaatttatatgttatgttctaagcacagctctcttctcctattttcatcctgcaagcaactcaaaatatttaaaataaagtttacattgtagttattttcaaatctttgcttgataagtattaagaaatattggacttgctgccgtaatttaaagctctgttgattttgtttccgtttggatttttgggggaggggagcactgtgtttatgctggaatatgaagtctgagaccttccggtgctgggaacacacaagagttgttgaaagttgacaagcagactgcgcatgtctctgatgctttgtatcattcttgagcaatcgctcggtccgtggacaataaacagtattatcaaagagaa

SEQ ID NO: 452613 - DNA, 3074 bp, Homo sapiens
aagcagctcggacctcataggtcgcaggacgttggaggaaagaaggaatatctcattgcaggaaaggccgagggggacggcaagatgcacatcaccctctgtgacttcatcgtgccctgggacaccctgagcaccacccagaagaagagcctgaaccacaggtaccagatgggctgcgagtgcaagatcacgcgctgccccatgatcccgtgctacatctcctccccggacgagtgcctctggatggactgggtcacagagaagaacatcaacgggcaccaggccaagttcttcgcctgcatcaagagaagtgacggctcctgtgcgtggtaccgcggcgcggcgccccccaagcaggagtttctcgacatcgaggacccataagcaggcctccaacgcccctgtggccaactgcaaaaaaagcctccaagggtttcgactggtccagctctgacatcccttcctggaaacagcatgaataaaacactcatcccatgggtccaaattaatatgattctgctccccccttctccttttagacatggttgtgggtctggagggagacgtgggtccaaggtcctcatcccatcctccctctgccaggcactatgtgtctggggcttcgatccttgggtgcaggcagggctgggacacgcggcttccctcccagtccctgccttggcaccgtcacagatgccaagcaggcagcacttagggatctcccagctgggttagggcagggcctggaaatgtgcattttgcagaaacttttgagggtcgttgcaagactgtgtagcaggcctaccaggtccctttcatcttgagagggacatggcccttgttttctgcagcttccacgcctctgcactccctgcccctggcaagtgctcccatcgccccggtgcccaccatgagctcccagcacctgactccccccacatccaagggcagcctggaaccagtggctagttcttgaaggagccccatcaatcctattaatcctcagaattccagtgggagcctccctctgagccttgtagaaatgggagcgagaaaccccagctgagctgcgttccagcctcagctgagtctttttggtctgcaccccacccccccaccctccccccccgcccacatgctccccagcttgcaggaggaatcggtgaggtcctgtcctgaggctgctgtccggggccggtggctgccctcaaggtcccttccctagctgctgcggttgccattgcttcttgcctgttctggcatcaggcacctggattgagttgcacagctttgctttatccgggcttgtgtgcagggcccggctgggctccccatctgcacatcctgaggacagaaaaagctgggtcttgctgtgccctcccaggcttagtgttccctccctcaaagactgacagccatcgttctgcacggggctttctgcatgtgacgccagctaagcatagtaagaagtccagcctaggaagggaaggattttggaggtaggtggctttggtgacacactcacttctttctcagcctccaggacactatggcctgttttaagagacatcttatttttctaaaggtgaattctcagatgataggtgaacctgagttgcagatataccaacttctgcttgtatttcttaaatgacaaagattacctagctaagaaacttcctagggaactagggaacctatgtgttccctcagtgtggtttcctgaagccagtgatatgggggttaggataggaagaactttctcggtaatgataaggagaatctcttgtttcctcccacctgtgttgtaaagataaactgacgatatacaggcacattatgtaaacatacacacgcaatgaaaccgaagcttggcggcctgggcgtggtcttgcaaaatgcttccaaagccaccttagcctgttctattcagcggcaaccccaaagcacctgttaagactcctgacccccaagtggcatgcagcccccatgcccaccgggacctggtcagcacagatcttgatgacttccctttctagggcagactgggagggtatccaggaatcggcccctgccccacgggcgttttcatgctgtacagtgacctaaagttggtaagatgtcataatggaccagtccatgtgatttcagtatatacaactccaccagacccctccaacccatataacaccccacccctgttcgcttcctgtatggtgatatcatatgtaacatttactcctgtttctgctgattgtttttttaatgttttggtttgtttttgacatcagctgtaatcattcctgtgctgtgttttttattacccttggtaggtattagacttgcacttttttaaaaaaaggtttctgcatcgtggaagcatttgacccagagtggaacgcgtggcctatgcaggtggattccttcaggtctttcctttggttctttgagcatctttgctttcattcgtctcccgtctttggttctccagttcaaattattgcaaagtaaaggatctttgagtaggttcggtctgaaaggtgtggcctttatatttgatccacacacgttggtcttttaaccgtgctgagcagaaaacaaaacaggttaagaagagccgggtggcagctgacagaggaagccgctcaaataccttcacaataaatagtggcaatatatatatagtttaagaaggctctccatttggcatcgtttaatttatatgttatgttctaagcacagctctcttctcctattttcatcctgcaagcaactcaaaatatttaaaataaagtttacattgtagttattttcaaatctttgcttgataagtattaagaaatattggacttgctgccgtaatttaaagctctgttgattttgtttccgtttggatttttgggggaggggagcactgtgtttatgctggaatatgaagtctgagaccttccggtgctgggaacacacaagagttgttgaaagttgacaagcagactgcgcatgtctctgatgctttgtatcattcttgagcaatcgctcggtccgtggacaataaacagtattatcaaagagaa

SEQ ID NO: 452614 - DNA, 2880 bp, Homo sapiens
aacgggtgatgcggttgtccacagatagatttaggaacgggtgatgcggttggactgggtcacagagaagaacatcaacgggcaccaggccaagttcttcgcctgcatcaagagaagtgacggctcctgtgcgtggtaccgcggcgcggcgccccccaagcaggagtttctcgacatcgaggacccataagcaggcctccaacgcccctgtggccaactgcaaaaaaagcctccaagggtttcgactggtccagctctgacatcccttcctggaaacagcatgaataaaacactcatcccatgggtccaaattaatatgattctgctccccccttctccttttagacatggttgtgggtctggagggagacgtgggtccaaggtcctcatcccatcctccctctgccaggcactatgtgtctggggcttcgatccttgggtgcaggcagggctgggacacgcggcttccctcccagtccctgccttggcaccgtcacagatgccaagcaggcagcacttagggatctcccagctgggttagggcagggcctggaaatgtgcattttgcagaaacttttgagggtcgttgcaagactgtgtagcaggcctaccaggtccctttcatcttgagagggacatggcccttgttttctgcagcttccacgcctctgcactccctgcccctggcaagtgctcccatcgccccggtgcccaccatgagctcccagcacctgactccccccacatccaagggcagcctggaaccagtggctagttcttgaaggagccccatcaatcctattaatcctcagaattccagtgggagcctccctctgagccttgtagaaatgggagcgagaaaccccagctgagctgcgttccagcctcagctgagtctttttggtctgcaccccacccccccaccctccccccccgcccacatgctccccagcttgcaggaggaatcggtgaggtcctgtcctgaggctgctgtccggggccggtggctgccctcaaggtcccttccctagctgctgcggttgccattgcttcttgcctgttctggcatcaggcacctggattgagttgcacagctttgctttatccgggcttgtgtgcagggcccggctgggctccccatctgcacatcctgaggacagaaaaagctgggtcttgctgtgccctcccaggcttagtgttccctccctcaaagactgacagccatcgttctgcacggggctttctgcatgtgacgccagctaagcatagtaagaagtccagcctaggaagggaaggattttggaggtaggtggctttggtgacacactcacttctttctcagcctccaggacactatggcctgttttaagagacatcttatttttctaaaggtgaattctcagatgataggtgaacctgagttgcagatataccaacttctgcttgtatttcttaaatgacaaagattacctagctaagaaacttcctagggaactagggaacctatgtgttccctcagtgtggtttcctgaagccagtgatatgggggttaggataggaagaactttctcggtaatgataaggagaatctcttgtttcctcccacctgtgttgtaaagataaactgacgatatacaggcacattatgtaaacatacacacgcaatgaaaccgaagcttggcggcctgggcgtggtcttgcaaaatgcttccaaagccaccttagcctgttctattcagcggcaaccccaaagcacctgttaagactcctgacccccaagtggcatgcagcccccatgcccaccgggacctggtcagcacagatcttgatgacttccctttctagggcagactgggagggtatccaggaatcggcccctgccccacgggcgttttcatgctgtacagtgacctaaagttggtaagatgtcataatggaccagtccatgtgatttcagtatatacaactccaccagacccctccaacccatataacaccccacccctgttcgcttcctgtatggtgatatcatatgtaacatttactcctgtttctgctgattgtttttttaatgttttggtttgtttttgacatcagctgtaatcattcctgtgctgtgttttttattacccttggtaggtattagacttgcacttttttaaaaaaaggtttctgcatcgtggaagcatttgacccagagtggaacgcgtggcctatgcaggtggattccttcaggtctttcctttggttctttgagcatctttgctttcattcgtctcccgtctttggttctccagttcaaattattgcaaagtaaaggatctttgagtaggttcggtctgaaaggtgtggcctttatatttgatccacacacgttggtcttttaaccgtgctgagcagaaaacaaaacaggttaagaagagccgggtggcagctgacagaggaagccgctcaaataccttcacaataaatagtggcaatatatatatagtttaagaaggctctccatttggcatcgtttaatttatatgttatgttctaagcacagctctcttctcctattttcatcctgcaagcaactcaaaatatttaaaataaagtttacattgtagttattttcaaatctttgcttgataagtattaagaaatattggacttgctgccgtaatttaaagctctgttgattttgtttccgtttggatttttgggggaggggagcactgtgtttatgctggaatatgaagtctgagaccttccggtgctgggaacacacaagagttgttgaaagttgacaagcagactgcgcatgtctctgatgctttgtatcattcttgagcaatcgctcggtccgtggacaataaacagtattatcaaagagaa

SEQ ID NO: 452615 - DNA, 3903 bp, Homo sapiens
  misc_feature (3734)..(3734): n is a, c, g, or t
  misc_feature (3752)..(3752): n is a, c, g, or t
  misc_feature (3822)..(3822): n is a, c, g, or t
  misc_feature (3852)..(3852): n is a, c, g, or t
  misc_feature (3855)..(3855): n is a, c, g, or t
  misc_feature (3858)..(3858): n is a, c, g, or t
  misc_feature (3863)..(3863): n is a, c, g, or t
  misc_feature (3866)..(3866): n is a, c, g, or t
  misc_feature (3868)..(3868): n is a, c, g, or t
  misc_feature (3877)..(3877): n is a, c, g, or t
cgcagcaaacacatccgtagaaggcagcgcggccgccgagagccgcagcgccgctcgcccgccgccccccaccccgccgccccgcccggcgaattgcgccccgcgcccctcccctcgcgcccccgagacaaagaggagagaaagtttgcgcggccgagcggggcaggtgaggagggtgagccgcgcgggaggggcccgcctcggccccggctcagcccccgcccgcgcccccagcccgccgccgcgagcagcgcccggaccccccagcggcggcccccgcccgcccagccccccggcccgccatgggcgccgcggcccgcaccctgcggctggcgctcggcctcctgctgctggcgacgctgcttcgcccggccgacgcctgcagctgctccccggtgcacccgcaacaggcgttttgcaatgcagatgtagtgatcagggccaaagcggtcagtgagaaggaagtggactctggaaacgacatttatggcaaccctatcaagaggatccagtatgagatcaagcagataaagatgttcaaagggcctgagaaggatatagagtttatctacacggccccctcctcggcagtgtgtggggtctcgctggacgttggaggaaagaaggaatatctcattgcaggaaaggccgagggggacggcaagatgcacatcaccctctgtgacttcatcgtgccctgggacaccctgagcaccacccagaagaagagcctgaaccacaggtaccagatgggctgcgagtgcaagatcacgcgctgccccatgatcccgtgctacatctcctccccggacgagtgcctctggatggactgggtcacagagaagaacatcaacgggcaccaggccaagttcttcgcctgcatcaagagaagtgacggctcctgtgcgtggtaccgcggcgcggcgccccccaagcaggagtttctcgacatcgaggacccataagcaggcctccaacgcccctgtggccaactgcaaaaaaagcctccaagggtttcgactggtccagctctgacatcccttcctggaaacagcatgaataaaacactcatcccatgggtccaaattaatatgattctgctccccccttctccttttagacatggttgtgggtctggagggagacgtgggtccaaggtcctcatcccatcctccctctgccaggcactatgtgtctggggcttcgatccttgggtgcaggcagggctgggacacgcggcttccctcccagtccctgccttggcaccgtcacagatgccaagcaggcagcacttagggatctcccagctgggttagggcagggcctggaaatgtgcattttgcagaaacttttgagggtcgttgcaagactgtgtagcaggcctaccaggtccctttcatcttgagagggacatggcccttgttttctgcagcttccacgcctctgcactccctgcccctggcaagtgctcccatcgccccggtgcccaccatgagctcccagcacctgactccccccacatccaagggcagcctggaaccagtggctagttcttgaaggagccccatcaatcctattaatcctcagaattccagtgggagcctccctctgagccttgtagaaatgggagcgagaaaccccagctgagctgcgttccagcctcagctgagtctttttggtctgcaccccacccccccaccctccccccccgcccacatgctccccagcttgcaggaggaatcggtgaggtcctgtcctgaggctgctgtccggggccggtggctgccctcaaggtcccttccctagctgctgcggttgccattgcttcttgcctgttctggcatcaggcacctggattgagttgcacagctttgctttatccgggcttgtgtgcagggcccggctgggctccccatctgcacatcctgaggacagaaaaagctgggtcttgctgtgccctcccaggcttagtgttccctccctcaaagactgacagccatcgttctgcacggggctttctgcatgtgacgccagctaagcatagtaagaagtccagcctaggaagggaaggattttggaggtaggtggctttggtgacacactcacttctttctcagcctccaggacactatggcctgttttaagagacatcttatttttctaaaggtgaattctcagatgataggtgaacctgagttgcagatataccaacttctgcttgtatttcttaaatgacaaagattacctagctaagaaacttcctagggaactagggaacctatgtgttccctcagtgtggtttcctgaagccagtgatatgggggttaggataggaagaactttctcggtaatgataaggagaatctcttgtttcctcccacctgtgttgtaaagataaactgacgatatacaggcacattatgtaaacatacacacgcaatgaaaccgaagcttggcggcctgggcgtggtcttgcaaaatgcttccaaagccaccttagcctgttctattcagcggcaaccccaaagcacctgttaagactcctgacccccaagtggcatgcagcccccatgcccaccgggacctggtcagcacagatcttgatgacttccctttctagggcagactgggagggtatccaggaatcggcccctgccccacgggcgttttcatgctgtacagtgacctaaagttggtaagatgtcataatggaccagtccatgtgatttcagtatatacaactccaccagacccctccaacccatataacaccccacccctgttcgcttcctgtatggtgatatcatatgtaacatttactcctgtttctgctgattgtttttttaatgttttggtttgtttttgacatcagctgtaatcattcctgtgctgtgttttttattacccttggtaggtattagacttgcacttttttaaaaaaaggtttctgcatcgtggaagcatttgacccagagtggaacgcgtggcctatgcaggtggattccttcaggtctttcctttggttctttgagcatctttgctttcattcgtctcccgtctttggttctccagttcaaattattgcaaagtaaaggatctttgagtaggttcggtctgaaaggtgtggcctttatatttgatccacacacgttggtcttttaaccgtgctgagcagaaaacaaaacaggttaagaagagccgggtggcagctgacagaggaagccgctcaaataccttcacaataaatagtggcaatatatatatagtttaagaaggctctccatttggcatcgtttaatttatatgttatgttctaagcacagctctcttctcctattttcatcctgcaagcaactcaaaatatttaaaataaagtttacattgtagttattttcaaatctttgcttgataagtattaagaaatattggacttgctgccgtaatttaaagctctgttgattttgtttccgtttggatttttgggggaggggagcactgtgtttatgctggaatatgaagtctgagaccttccggtgctgggaacacacaagagttgttgaaagttgacaagcagactgcgcatgtctctgatgctttgtatcattcttgagcaatcgctcggtccgtggacaataaacagtattatcaaagagaaaaaaaaaaaaaaaaaaaaaaaaaaaaacaaaaaaaaaacaaacaaaaaaaaaaaaaaatgtgtgtcggcgcgcgcgccncgggcccctggaaaaagnttttaaagaacaatcgggtggggccgccgcggggccccaatagggaaagggaaacggggccaaagcgggntcccaagaggaaaaccggggcaaagaaaanggngcnggggnttncncccacattnaaaaaacggccgggggggaaacccga

SEQ ID NO: 452616 - DNA, 3941 bp, Homo sapiens
cgcagcaaacacatccgtagaaggcagcgcggccgccgagagccgcagcgccgctcgcccgccgccccccaccccgccgccccgcccggcgaattgcgccccgcgcccctcccctcgcgcccccgagacaaagaggagagaaagtttgcgcggccgagcggggcaggtgaggagggtgagccgcgcgggaggggcccgcctcggccccggctcagcccccgcccgcgcccccagcccgccgccgcgagcagcgcccggaccccccagcggcggcccccgcccgcccagccccccggcccgccatgggcgccgcggcccgcaccctgcggctggcgctcggcctcctgctgctggcgacgctgcttcgcccggccgacgcctgcagctgctccccggtgcacccgcaacaggcgttttgcaatgcagatgtagtgatcagggccaaagcggtcagtgagaaggaagtggactctggaaacgacatttatggcaaccctatcaagaggatccagtatgagatcaagcagataaagatgttcaaagggcctgagaaggatatagagtttatctacacggccccctcctcggcagtgtgtggggtctcgctggacgttggaggaaagaaggaatatctcattgcaggaaaggccgagggggacggcaagatgcacatcaccctctgtgacttcatcgtgccctgggacaccctgagcaccacccagaagaagagcctgaaccacaggtaccagatgggctgcgagtgcaagatcacgcgctgccccatgatcccgtgctacatctcctccccggacgagtgcctctggatggactgggtcacagagaagaacatcaacgggcaccaggccaagttcttcgcctgcatcaagagaagtgacggctcctgtgcgtggtaccgcggcgcggcgccccccaagcaggagtttctcgacatcgaggacccataagcaggcctccaacgcccctgtggccaactgcaaaaaaagcctccaagggtttcgactggtccagctctgacatcccttcctggaaacagcatgaataaaacactcatcccatgggtccaaattaatatgattctgctccccccttctccttttagacatggttgtgggtctggagggagacgtgggtccaaggtcctcatcccatcctccctctgccaggcactatgtgtctggggcttcgatccttgggtgcaggcagggctgggacacgcggcttccctcccagtccctgccttggcaccgtcacagatgccaagcaggcagcacttagggatctcccagctgggttagggcagggcctggaaatgtgcattttgcagaaacttttgagggtcgttgcaagactgtgtagcaggcctaccaggtccctttcatcttgagagggacatggcccttgttttctgcagcttccacgcctctgcactccctgcccctggcaagtgctcccatcgccccggtgcccaccatgagctcccagcacctgactccccccacatccaagggcagcctggaaccagtggctagttcttgaaggagccccatcaatcctattaatcctcagaattccagtgggagcctccctctgagccttgtagaaatgggagcgagaaaccccagctgagctgcgttccagcctcagctgagtctttttggtctgcaccccacccccccaccctccccccccgcccacatgctccccagcttgcaggaggaatcggtgaggtcctgtcctgaggctgctgtccggggccggtggctgccctcaaggtcccttccctagctgctgcggttgccattgcttcttgcctgttctggcatcaggcacctggattgagttgcacagctttgctttatccgggcttgtgtgcagggcccggctgggctccccatctgcacatcctgaggacagaaaaagctgggtcttgctgtgccctcccaggcttagtgttccctccctcaaagactgacagccatcgttctgcacggggctttctgcatgtgacgccagctaagcatagtaagaagtccagcctaggaagggaaggattttggaggtaggtggctttggtgacacactcacttctttctcagcctccaggacactatggcctgttttaagagacatcttatttttctaaaggtgaattctcagatgataggtgaacctgagttgcagatataccaacttctgcttgtatttcttaaatgacaaagattacctagctaagaaacttcctagggaactagggaacctatgtgttccctcagtgtggtttcctgaagccagtgatatgggggttaggataggaagaactttctcggtaatgataaggagaatctcttgtttcctcccacctgtgttgtaaagataaactgacgatatacaggcacattatgtaaacatacacacgcaatgaaaccgaagcttggcggcctgggcgtggtcttgcaaaatgcttccaaagccaccttagcctgttctattcagcggcaaccccaaagcacctgttaagactcctgacccccaagtggcatgcagcccccatgcccaccgggacctggtcagcacagatcttgatgacttccctttctagggcagactgggagggtatccaggaatcggcccctgccccacgggcgttttcatgctgtacagtgacctaaagttggtaagatgtcataatggaccagtccatgtgatttcagtatatacaactccaccagacccctccaacccatataacaccccacccctgttcgcttcctgtatggtgatatcatatgtaacatttactcctgtttctgctgattgtttttttaatgttttggtttgtttttgacatcagctgtaatcattcctgtgctgtgttttttattacccttggtaggtattagacttgcacttttttaaaaaaaggtttctgcatcgtggaagcatttgacccagagtggaacgcgtggcctatgcaggtggattccttcaggtctttcctttggttctttgagcatctttgctttcattcgtctcccgtctttggttctccagttcaaattattgcaaagtaaaggatctttgagtaggttcggtctgaaaggtgtggcctttatatttgatccacacacgttggtcttttaaccgtgctgagcagaaaacaaaacaggttaagaagagccgggtggcagctgacagaggaagccgctcaaataccttcacaataaatagtggcaatatatatatagtttaagaaggctctccatttggcatcgtttaatttatatgttatgttctaagcacagctctcttctcctattttcatcctgcaagcaactcaaaatatttaaaataaagtttacattgtagttattttcaaatctttgcttgataagtattaagaaatattggacttgctgccgtaatttaaagctctgttgattttgtttccgtttggatttttgggggaggggagcactgtgtttatgctggaatatgaagtctgagaccttccggtgctgggaacacacaagagttgttgaaagttgacaagcagactgcgcatgtctctgatgctttgtatcattcttgagcaatcgctcggtccgtggacaataaacagtattatcaaagagaaaaaaaaaaaaaaaaaaaaaaaaaatcgatgtcgactcgagtcaggctgcggatccgatgtttgggcatatggcttaggattgacttggcgatgtcgactcgagtcagtgcggatccgacgtttgggcgttcgggcggagcgaattcgatgtgtgggcgtacggcttaggattgacttggcgatgtcgactcggtcagtgcggatccgatgtctgggcatacggggcgatgtcgactcgagtcagtgcgaattcgatgtctgggcatatggggcgatgtcgactcga

SEQ ID NO: 452617 - DNA, 2217 bp, Homo sapiens
atacaggcacattatgtaacatacacacgcaatgaaaccgaagctggcggcctgggcgtggtcttgcaaaatgcttccaaagccaccttagcctgttctattcagtggctagttcttgaaggagccccatcaatcctattaatcctcagaattccagtgggagcctccctctgagccttgtagaaatgggagcgagaaaccccagctgagctgcgttccagcctcagctgagtctttttggtctgcaccccacccccccaccctccccccccgcccacatgctccccagcttgcaggaggaatcggtgaggtcctgtcctgaggctgctgtccggggccggtggctgccctcaaggtcccttccctagctgctgcggttgccattgcttcttgcctgttctggcatcaggcacctggattgagttgcacagctttgctttatccgggcttgtgtgcagggcccggctgggctccccatctgcacatcctgaggacagaaaaagctgggtcttgctgtgccctcccaggcttagtgttccctccctcaaagactgacagccatcgttctgcacggggctttctgcatgtgacgccagctaagcatagtaagaagtccagcctaggaagggaaggattttggaggtaggtggctttggtgacacactcacttctttctcagcctccaggacactatggcctgttttaagagacatcttatttttctaaaggtgaattctcagatgataggtgaacctgagttgcagatataccaacttctgcttgtatttcttaaatgacaaagattacctagctaagaaacttcctagggaactagggaacctatgtgttccctcagtgtggtttcctgaagccagtgatatgggggttaggataggaagaactttctcggtaatgataaggagaatctcttgtttcctcccacctgtgttgtaaagataaactgacgatatacaggcacattatgtaaacatacacacgcaatgaaaccgaagcttggcggcctgggcgtggtcttgcaaaatgcttccaaagccaccttagcctgttctattcagcggcaaccccaaagcacctgttaagactcctgacccccaagtggcatgcagcccccatgcccaccgggacctggtcagcacagatcttgatgacttccctttctagggcagactgggagggtatccaggaatcggcccctgccccacgggcgttttcatgctgtacagtgacctaaagttggtaagatgtcataatggaccagtccatgtgatttcagtatatacaactccaccagacccctccaacccatataacaccccacccctgttcgcttcctgtatggtgatatcatatgtaacatttactcctgtttctgctgattgtttttttaatgttttggtttgtttttgacatcagctgtaatcattcctgtgctgtgttttttattacccttggtaggtattagacttgcacttttttaaaaaaaggtttctgcatcgtggaagcatttgacccagagtggaacgcgtggcctatgcaggtggattccttcaggtctttcctttggttctttgagcatctttgctttcattcgtctcccgtctttggttctccagttcaaattattgcaaagtaaaggatctttgagtaggttcggtctgaaaggtgtggcctttatatttgatccacacacgttggtcttttaaccgtgctgagcagaaaacaaaacaggttaagaagagccgggtggcagctgacagaggaagccgctcaaataccttcacaataaatagtggcaatatatatatagtttaagaaggctctccatttggcatcgtttaatttatatgttatgttctaagcacagctctcttctcctattttcatcctgcaagcaactcaaaatatttaaaataaagtttacattgtagttattttcaaatctttgcttgataagtattaagaaatattggacttgctgccgtaatttaaagctctgttgattttgtttccgtttggatttttgggggaggggagcactgtgtttatgctggaatatgaagtctgagaccttccggtgctgggaacacacaagagttgttgaaagttgacaagcagactgcgcatgtctctgatgctttgtatcattcttgagcaatcgctcggtccgtggacaataaacagtattatcaaagagaa

SEQ ID NO: 452618 - DNA, 1816 bp, Homo sapiens
atgtcataatggaccagtccatgtgatttcagtatatacaactccaccagacccctccaacccatataactccccatctgcacatcctgaggacagaaaaagctgggtcttgctgtgccctcccaggcttagtgttccctccctcaaagactgacagccatcgttctgcacggggctttctgcatgtgacgccagctaagcatagtaagaagtccagcctaggaagggaaggattttggaggtaggtggctttggtgacacactcacttctttctcagcctccaggacactatggcctgttttaagagacatcttatttttctaaaggtgaattctcagatgataggtgaacctgagttgcagatataccaacttctgcttgtatttcttaaatgacaaagattacctagctaagaaacttcctagggaactagggaacctatgtgttccctcagtgtggtttcctgaagccagtgatatgggggttaggataggaagaactttctcggtaatgataaggagaatctcttgtttcctcccacctgtgttgtaaagataaactgacgatatacaggcacattatgtaaacatacacacgcaatgaaaccgaagcttggcggcctgggcgtggtcttgcaaaatgcttccaaagccaccttagcctgttctattcagcggcaaccccaaagcacctgttaagactcctgacccccaagtggcatgcagcccccatgcccaccgggacctggtcagcacagatcttgatgacttccctttctagggcagactgggagggtatccaggaatcggcccctgccccacgggcgttttcatgctgtacagtgacctaaagttggtaagatgtcataatggaccagtccatgtgatttcagtatatacaactccaccagacccctccaacccatataacaccccacccctgttcgcttcctgtatggtgatatcatatgtaacatttactcctgtttctgctgattgtttttttaatgttttggtttgtttttgacatcagctgtaatcattcctgtgctgtgttttttattacccttggtaggtattagacttgcacttttttaaaaaaaggtttctgcatcgtggaagcatttgacccagagtggaacgcgtggcctatgcaggtggattccttcaggtctttcctttggttctttgagcatctttgctttcattcgtctcccgtctttggttctccagttcaaattattgcaaagtaaaggatctttgagtaggttcggtctgaaaggtgtggcctttatatttgatccacacacgttggtcttttaaccgtgctgagcagaaaacaaaacaggttaagaagagccgggtggcagctgacagaggaagccgctcaaataccttcacaataaatagtggcaatatatatatagtttaagaaggctctccatttggcatcgtttaatttatatgttatgttctaagcacagctctcttctcctattttcatcctgcaagcaactcaaaatatttaaaataaagtttacattgtagttattttcaaatctttgcttgataagtattaagaaatattggacttgctgccgtaatttaaagctctgttgattttgtttccgtttggatttttgggggaggggagcactgtgtttatgctggaatatgaagtctgagaccttccggtgctgggaacacacaagagttgttgaaagttgacaagcagactgcgcatgtctctgatgctttgtatcattcttgagcaatcgctcggtccgtggacaataaacagtattatcaaagagaa

SEQ ID NO: 452619 - DNA, 1777 bp, Homo sapiens
gggtgacacactcacttctttctcagcctccaggacactatggcctgggagggacagaaaaagctgggtcttgctgtgccctcccaggcttagtgttccctccctcaaagactgacagccatcgttctgcacggggctttctgcatgtgacgccagctaagcatagtaagaagtccagcctaggaagggaaggattttggaggtaggtggctttggtgacacactcacttctttctcagcctccaggacactatggcctgttttaagagacatcttatttttctaaaggtgaattctcagatgataggtgaacctgagttgcagatataccaacttctgcttgtatttcttaaatgacaaagattacctagctaagaaacttcctagggaactagggaacctatgtgttccctcagtgtggtttcctgaagccagtgatatgggggttaggataggaagaactttctcggtaatgataaggagaatctcttgtttcctcccacctgtgttgtaaagataaactgacgatatacaggcacattatgtaaacatacacacgcaatgaaaccgaagcttggcggcctgggcgtggtcttgcaaaatgcttccaaagccaccttagcctgttctattcagcggcaaccccaaagcacctgttaagactcctgacccccaagtggcatgcagcccccatgcccaccgggacctggtcagcacagatcttgatgacttccctttctagggcagactgggagggtatccaggaatcggcccctgccccacgggcgttttcatgctgtacagtgacctaaagttggtaagatgtcataatggaccagtccatgtgatttcagtatatacaactccaccagacccctccaacccatataacaccccacccctgttcgcttcctgtatggtgatatcatatgtaacatttactcctgtttctgctgattgtttttttaatgttttggtttgtttttgacatcagctgtaatcattcctgtgctgtgttttttattacccttggtaggtattagacttgcacttttttaaaaaaaggtttctgcatcgtggaagcatttgacccagagtggaacgcgtggcctatgcaggtggattccttcaggtctttcctttggttctttgagcatctttgctttcattcgtctcccgtctttggttctccagttcaaattattgcaaagtaaaggatctttgagtaggttcggtctgaaaggtgtggcctttatatttgatccacacacgttggtcttttaaccgtgctgagcagaaaacaaaacaggttaagaagagccgggtggcagctgacagaggaagccgctcaaataccttcacaataaatagtggcaatatatatatagtttaagaaggctctccatttggcatcgtttaatttatatgttatgttctaagcacagctctcttctcctattttcatcctgcaagcaactcaaaatatttaaaataaagtttacattgtagttattttcaaatctttgcttgataagtattaagaaatattggacttgctgccgtaatttaaagctctgttgattttgtttccgtttggatttttgggggaggggagcactgtgtttatgctggaatatgaagtctgagaccttccggtgctgggaacacacaagagttgttgaaagttgacaagcagactgcgcatgtctctgatgctttgtatcattcttgagcaatcgctcggtccgtggacaataaacagtattatcaaagagaa

SEQ ID NO: 452620 - DNA, 1723 bp, Homo sapiens
agaggatccctttctgccaacgactcgctccaggcttagtgttccctccctcaaagactgacagccatcgttctgcacggggctttctgcatgtgacgccagctaagcatagtaagaagtccagcctaggaagggaaggattttggaggtaggtggctttggtgacacactcacttctttctcagcctccaggacactatggcctgttttaagagacatcttatttttctaaaggtgaattctcagatgataggtgaacctgagttgcagatataccaacttctgcttgtatttcttaaatgacaaagattacctagctaagaaacttcctagggaactagggaacctatgtgttccctcagtgtggtttcctgaagccagtgatatgggggttaggataggaagaactttctcggtaatgataaggagaatctcttgtttcctcccacctgtgttgtaaagataaactgacgatatacaggcacattatgtaaacatacacacgcaatgaaaccgaagcttggcggcctgggcgtggtcttgcaaaatgcttccaaagccaccttagcctgttctattcagcggcaaccccaaagcacctgttaagactcctgacccccaagtggcatgcagcccccatgcccaccgggacctggtcagcacagatcttgatgacttccctttctagggcagactgggagggtatccaggaatcggcccctgccccacgggcgttttcatgctgtacagtgacctaaagttggtaagatgtcataatggaccagtccatgtgatttcagtatatacaactccaccagacccctccaacccatataacaccccacccctgttcgcttcctgtatggtgatatcatatgtaacatttactcctgtttctgctgattgtttttttaatgttttggtttgtttttgacatcagctgtaatcattcctgtgctgtgttttttattacccttggtaggtattagacttgcacttttttaaaaaaaggtttctgcatcgtggaagcatttgacccagagtggaacgcgtggcctatgcaggtggattccttcaggtctttcctttggttctttgagcatctttgctttcattcgtctcccgtctttggttctccagttcaaattattgcaaagtaaaggatctttgagtaggttcggtctgaaaggtgtggcctttatatttgatccacacacgttggtcttttaaccgtgctgagcagaaaacaaaacaggttaagaagagccgggtggcagctgacagaggaagccgctcaaataccttcacaataaatagtggcaatatatatatagtttaagaaggctctccatttggcatcgtttaatttatatgttatgttctaagcacagctctcttctcctattttcatcctgcaagcaactcaaaatatttaaaataaagtttacattgtagttattttcaaatctttgcttgataagtattaagaaatattggacttgctgccgtaatttaaagctctgttgattttgtttccgtttggatttttgggggaggggagcactgtgtttatgctggaatatgaagtctgagaccttccggtgctgggaacacacaagagttgttgaaagttgacaagcagactgcgcatgtctctgatgctttgtatcattcttgagcaatcgctcggtccgtggacaataaacagtattatcaaagagaa

SEQ ID NO: 452621 - DNA, 3983 bp, Homo sapiens
cgcagcaaacacatccgtagaaggcagcgcggccgccgagagccgcagcgccgctcgcccgccgccccccaccccgccgccccgcccggcgaattgcgccccgcgcccctcccctcgcgcccccgagacaaagaggagagaaagtttgcgcggccgagcggggcaggtgaggagggtgagccgcgcgggaggggcccgcctcggccccggctcagcccccgcccgcgcccccagcccgccgccgcgagcagcgcccggaccccccagcggcggcccccgcccgcccagccccccggcccgccatgggcgccgcggcccgcaccctgcggctggcgctcggcctcctgctgctggcgacgctgcttcgcccggccgacgcctgcagctgctccccggtgcacccgcaacaggcgttttgcaatgcagatgtagtgatcagggccaaagcggtcagtgagaaggaagtggactctggaaacgacatttatggcaaccctatcaagaggatccagtatgagatcaagcagataaagatgttcaaagggcctgagaaggatatagagtttatctacacggccccctcctcggcagtgtgtggggtctcgctggacgttggaggaaagaaggaatatctcattgcaggaaaggccgagggggacggcaagatgcacatcaccctctgtgacttcatcgtgccctgggacaccctgagcaccacccagaagaagagcctgaaccacaggtaccagatgggctgcgagtgcaagatcacgcgctgccccatgatcccgtgctacatctcctccccggacgagtgcctctggatggactgggtcacagagaagaacatcaacgggcaccaggccaagttcttcgcctgcatcaagagaagtgacggctcctgtgcgtggtaccgcggcgcggcgccccccaagcaggagtttctcgacatcgaggacccataagcaggcctccaacgcccctgtggccaactgcaaaaaaagcctccaagggtttcgactggtccagctctgacatcccttcctggaaacagcatgaataaaacactcatcccatgggtccaaattaatatgattctgctccccccttctccttttagacatggttgtgggtctggagggagacgtgggtccaaggtcctcatcccatcctccctctgccaggcactatgtgtctggggcttcgatccttgggtgcaggcagggctgggacacgcggcttccctcccagtccctgccttggcaccgtcacagatgccaagcaggcagcacttagggatctcccagctgggttagggcagggcctggaaatgtgcattttgcagaaacttttgagggtcgttgcaagactgtgtagcaggcctaccaggtccctttcatcttgagagggacatggcccttgttttctgcagcttccacgcctctgcactccctgcccctggcaagtgctcccatcgccccggtgcccaccatgagctcccagcacctgactccccccacatccaagggcagcctggaaccagtggctagttcttgaaggagccccatcaatcctattaatcctcagaattccagtgggagcctccctctgagccttgtagaaatgggagcgagaaaccccagctgagctgcgttccagcctcagctgagtctttttggtctgcaccccacccccccaccctccccccccgcccacatgctccccagcttgcaggaggaatcggtgaggtcctgtcctgaggctgctgtccggggccggtggctgccctcaaggtcccttccctagctgctgcggttgccattgcttcttgcctgttctggcatcaggcacctggattgagttgcacagctttgctttatccgggcttgtgtgcagggcccggctgggctccccatctgcacatcctgaggacagaaaaagctgggtcttgctgtgccctcccaggcttagtgttccctccctcaaagactgacagccatcgttctgcacggggctttctgcatgtgacgccagctaagcatagtaagaagtccagcctaggaagggaaggattttggaggtaggtggctttggtgacacactcacttctttctcagcctccaggacactatggcctgttttaagagacatcttatttttctaaaggtgaattctcagatgataggtgaacctgagttgcagatataccaacttctgcttgtatttcttaaatgacaaagattacctagctaagaaacttcctagggaactagggaacctatgtgttccctcagtgtggtttcctgaagccagtgatatgggggttaggataggaagaactttctcggtaatgataaggagaatctcttgtttcctcccacctgtgttgtaaagataaactgacgatatacaggcacattatgtaaacatacacacgcaatgaaaccgaagcttggcggcctgggcgtggtcttgcaaaatgcttccaaagccaccttagcctgttctattcagcggcaaccccaaagcacctgttaagactcctgacccccaagtggcatgcagcccccatgcccaccgggacctggtcagcacagatcttgatgacttccctttctagggcagactgggagggtatccaggaatcggcccctgccccacgggcgttttcatgctgtacagtgacctaaagttggtaagatgtcataatggaccagtccatgtgatttcagtatatacaactccaccagacccctccaacccatataacaccccacccctgttcgcttcctgtatggtgatatcatatgtaacatttactcctgtttctgctgattgtttttttaatgttttggtttgtttttgacatcagctgtaatcattcctgtgctgtgttttttattacccttggtaggtattagacttgcacttttttaaaaaaaggtttctgcatcgtggaagcatttgacccagagtggaacgcgtggcctatgcaggtggattccttcaggtctttcctttggttctttgagcatctttgctttcattcgtctcccgtctttggttctccagttcaaattattgcaaagtaaaggatctttgagtaggttcggtctgaaaggtgtggcctttatatttgatccacacacgttggtcttttaaccgtgctgagcagaaaacaaaacaggttaagaagagccgggtggcagctgacagaggaagccgctcaaataccttcacaataaatagtggcaatatatatatagtttaagaaggctctccatttggcatcgtttaatttatatgttatgttctaagcacagctctcttctcctattttcatcctgcaagcaactcaaaatatttaaaataaagtttacattgtagttattttcaaatctttgcttgataagtattaagaaatattggacttgctgccgtaatttaaagctctgttgattttgtttccgtttggatttttgggggaggggagcactgtgtttatgctggaatatgaagtctgagaccttccggtgctgggaacacacaagagttgttgaaagttgacaagcagactgcgcatgtctctgatgctttgtatcattcttgagcaatcgctcggtccgtggacaataaacagtattatcaaagagaaaaaaaaaacacaacacaacaccacaacaaaaaattggtgtgggccggccgtggcgacacagaaagaaagggcctttataaacaccactccggtgtgtgggcgcgcgcgggcaccccagagagggtaaggctgacagtgggcaacaggggggccccaagagaacactggggccacgacacacgtgggcgttgttccccccaaaaaaaacgcgccggggggcacaccggcgcgttgggacacaacaccaagatgaggtcggaagggcgacagcgggccatacaaaggggagcaaaagggacccgaatataaattaccgagcgcgtaggac

SEQ ID NO: 452622 - DNA, 1668 bp, Homo sapiens
ataggtcactctacagcatgacaacgcccctgggcaagggaccgcttcctggaaaccctcccagtccagcctaggaagggaaggattttggaggtaggtggctttggtgacacactcacttctttctcagcctccaggacactatggcctgttttaagagacatcttatttttctaaaggtgaattctcagatgataggtgaacctgagttgcagatataccaacttctgcttgtatttcttaaatgacaaagattacctagctaagaaacttcctagggaactagggaacctatgtgttccctcagtgtggtttcctgaagccagtgatatgggggttaggataggaagaactttctcggtaatgataaggagaatctcttgtttcctcccacctgtgttgtaaagataaactgacgatatacaggcacattatgtaaacatacacacgcaatgaaaccgaagcttggcggcctgggcgtggtcttgcaaaatgcttccaaagccaccttagcctgttctattcagcggcaaccccaaagcacctgttaagactcctgacccccaagtggcatgcagcccccatgcccaccgggacctggtcagcacagatcttgatgacttccctttctagggcagactgggagggtatccaggaatcggcccctgccccacgggcgttttcatgctgtacagtgacctaaagttggtaagatgtcataatggaccagtccatgtgatttcagtatatacaactccaccagacccctccaacccatataacaccccacccctgttcgcttcctgtatggtgatatcatatgtaacatttactcctgtttctgctgattgtttttttaatgttttggtttgtttttgacatcagctgtaatcattcctgtgctgtgttttttattacccttggtaggtattagacttgcacttttttaaaaaaaggtttctgcatcgtggaagcatttgacccagagtggaacgcgtggcctatgcaggtggattccttcaggtctttcctttggttctttgagcatctttgctttcattcgtctcccgtctttggttctccagttcaaattattgcaaagtaaaggatctttgagtaggttcggtctgaaaggtgtggcctttatatttgatccacacacgttggtcttttaaccgtgctgagcagaaaacaaaacaggttaagaagagccgggtggcagctgacagaggaagccgctcaaataccttcacaataaatagtggcaatatatatatagtttaagaaggctctccatttggcatcgtttaatttatatgttatgttctaagcacagctctcttctcctattttcatcctgcaagcaactcaaaatatttaaaataaagtttacattgtagttattttcaaatctttgcttgataagtattaagaaatattggacttgctgccgtaatttaaagctctgttgattttgtttccgtttggatttttgggggaggggagcactgtgtttatgctggaatatgaagtctgagaccttccggtgctgggaacacacaagagttgttgaaagttgacaagcagactgcgcatgtctctgatgctttgtatcattcttgagcaatcgctcggtccgtggacaataaacagtattatcaaagagaa

SEQ ID NO: 452623 - DNA, 3396 bp, Homo sapiens
cgcagcaaacacatccgtagaaggcagcgcggccgccgagagccgcagcgccgctcgcccgccgccccccaccccgccgccccgcccggcgaattgcgccccgcgcccctcccctcgcgcccccgagacaaagaggagagaaagtttgcgcggccgagcggggcaggtgaggagggtgagccgcgcgggaggggcccgcctcggccccggctcagcccccgcccgcgcccccagcccgccgccgcgagcagcgcccggaccccccagcggcggcccccgcccgcccagccccccggcccgccatgggcgccgcggcccgcaccctgcggctggcgctcggcctcctgctgctggcgacgctgcttcgcccggccgacgcctgcagctgctccccggtgcacccgcaacaggcgttttgcaatgcagatgtagtgatcagggccaaagcggtcagtgagaaggaagtggactctggaaacgacatttatggcaaccctatcaagaggatccagtatgagatcaagcagataaagatgttcaaagggcctgagaaggatatagagtttatctacacggccccctcctcggcagtgtgtggggtctcgctggacgttggaggaaagaaggaatatctcattgcaggaaaggccgagggggacggcaagatgcacatcaccctctgtgacttcatcgtgccctgggacaccctgagcaccacccagaagaagagcctgaaccacaggtaccagatgggctgcgagtgcaagatcacgcgctgccccatgatcccgtgctacatctcctccccggacgagtgcctctggatggactgggtcacagagaagaacatcaacgggcaccaggccaagttcttcgcctgcatcaagagaagtgacggctcctgtgcgtggtaccgcggcgcggcgccccccaagcaggagtttctcgacatcgaggacccataagcaggcctccaacgcccctgtggccaactgcaaaaaaagcctccaagggtttcgactggtccagctctgacatcccttcctggaaacagcatgaataaaacactcatcccatgggtccaaattaatatgattctgctccccccttctccttttagacatggttgtgggtctggagggagacgtgggtccaaggtcctcatcccatcctccctctgccaggcactatgtgtctggggcttcgatccttgggtgcaggcagggctgggacacgcggcttccctcccagtccctgccttggcaccgtcacagatgccaagcaggcagcacttagggatctcccagctgggttagggcagggcctggaaatgtgcattttgcagaaacttttgagggtcgttgcaagactgtgtagcaggcctaccaggtccctttcatcttgagagggacatggcccttgttttctgcagcttccacgcctctgcactccctgcccctggcaagtgctcccatcgccccggtgcccaccatgagctcccagcacctgactccccccacatccaagggcagcctggaaccagtggctagttcttgaaggagccccatcaatcctattaatcctcagaattccagtgggagcctccctctgagccttgtagaaatgggagcgagaaaccccagctgagctgcgttccagcctcagctgagtctttttggtctgcaccccacccccccaccctccccccccgcccacatgctccccagcttgcaggaggaatcggtgaggtcctgtcctgaggctgctgtccggggccggtggctgccctcaaggtcccttccctagctgctgcggttgccattgcttcttgcctgttctggcatcaggcacctggattgagttgcacagctttgctttatccgggcttgtgtgcagggcccggctgggctccccatctgcacatcctgaggacagaaaaagctgggtcttgctgtgccctcccaggcttagtgttccctccctcaaagactgacagccatcgttctgcacggggctttctgcatgtgacgccagctaagcatagtaagaagtccagcctaggaagggaaggattttggaggtaggtggctttggtgacacactcacttctttctcagcctccaggacactatggcctgttttaagagacatcttatttttctaaaggtgaattctcagatgataggtgaacctgagttgcagatataccaacttctgcttgtatttcttaaatgacaaagattacctagctaagaaacttcctagggaactagggaacctatgtgttccctcagtgtggtttcctgaagccagtgatatgggggttaggataggaagaactttctcggtaatgataaggagaatctcttgtttcctcccacctgtgttgtaaagataaactgacgatatacaggcacattatgtaaacatacacacgcaatgaaaccgaagcttggcggcctgggcgtggtcttgcaaaatgcttccaaagccaccttagcctgttctattcagcggcaaccccaaagcacctgttaagactcctgacccccaagtggcatgcagcccccatgcccaccgggacctggtcagcacagatcttgatgacttccctttctagggcagactgggagggtatccaggaatcggcccctgccccacgggcgttttcatgctgtacagtgacctaaagttggtaagatgtcataatggaccagtccatgtgatttcagtatatacaactccaccagacccctccaacccatataacaccccacccctgttcgcttcctgtatggtgatatcatatgtaacatttactcctgtttctgctgattgtttttttaatgttttggtttgtttttgacatcagctgtaatcattcctgtgctgtgttttttattacccttggtaggtattagacttgcacttttttaaaaaaaggtttctgcatcgtggaagcatttgacccagagtggaacgcgtggcctatgcaggtggattccttcaggtctttcctttggttctttgagcatctttgctttcattcgtctcccgtctttggttctccagttcaaattattgcaaagtaaaggatctttgagtaggttcggtctgaaaggtgtggcctttatatttgatccacacacgttggtcttttaaccgtgctgagcagaaaacaaaacaggttaagaagagccgggtggcagctgacagaggaagccgctcaaataccttcacaataaatagtggcaatatatatatagtttaagaaggctctccatttggcatcgtttaatttatatgttatgttctaagcacagctctcttctcctattttcatcctgcaagcaactcaaaatatttaaaataaagtttacattgtagttattttca

SEQ ID NO: 452624 - DNA, 997 bp, Homo sapiens
ccccctgatcgagccggtaccagcaggctgggcccagattagatgtcataatggaccagtccatgtgatttcagtatatacaactccaccagacccctccaacccatataacaccccacccctgttcgcttcctgtatggtgatatcatatgtaacatttactcctgtttctgctgattgtttttttaatgttttggtttgtttttgacatcagctgtaatcattcctgtgctgtgttttttattacccttggtaggtattagacttgcacttttttaaaaaaaggtttctgcatcgtggaagcatttgacccagagtggaacgcgtggcctatgcaggtggattccttcaggtctttcctttggttctttgagcatctttgctttcattcgtctcccgtctttggttctccagttcaaattattgcaaagtaaaggatctttgagtaggttcggtctgaaaggtgtggcctttatatttgatccacacacgttggtcttttaaccgtgctgagcagaaaacaaaacaggttaagaagagccgggtggcagctgacagaggaagccgctcaaataccttcacaataaatagtggcaatatatatatagtttaagaaggctctccatttggcatcgtttaatttatatgttatgttctaagcacagctctcttctcctattttcatcctgcaagcaactcaaaatatttaaaataaagtttacattgtagttattttcaaatctttgcttgataagtattaagaaatattggacttgctgccgtaatttaaagctctgttgattttgtttccgtttggatttttgggggaggggagcactgtgtttatgctggaatatgaagtctgagaccttccggtgctgggaacacacaagagttgttgaaagttgacaagcagactgcgcatgtctctgatgctttgtatcattcttgagcaatcgctcggtccgtggacaataaacagtattatcaaagagaa

SEQ ID NO: 452625 - DNA, 3103 bp, Homo sapiens
cgcagcaaacacatccgtagaaggcagcgcggccgccgagagccgcagcgccgctcgcccgccgccccccaccccgccgccccgcccggcgaattgcgccccgcgcccctcccctcgcgcccccgagacaaagaggagagaaagtttgcgcggccgagcggggcaggtgaggagggtgagccgcgcgggaggggcccgcctcggccccggctcagcccccgcccgcgcccccagcccgccgccgcgagcagcgcccggaccccccagcggcggcccccgcccgcccagccccccggcccgccatgggcgccgcggcccgcaccctgcggctggcgctcggcctcctgctgctggcgacgctgcttcgcccggccgacgcctgcagctgctccccggtgcacccgcaacaggcgttttgcaatgcagatgtagtgatcagggccaaagcggtcagtgagaaggaagtggactctggaaacgacatttatggcaaccctatcaagaggatccagtatgagatcaagcagataaagatgttcaaagggcctgagaaggatatagagtttatctacacggccccctcctcggcagtgtgtggggtctcgctggacgttggaggaaagaaggaatatctcattgcaggaaaggccgagggggacggcaagatgcacatcaccctctgtgacttcatcgtgccctgggacaccctgagcaccacccagaagaagagcctgaaccacaggtaccagatgggctgcgagtgcaagatcacgcgctgccccatgatcccgtgctacatctcctccccggacgagtgcctctggatggactgggtcacagagaagaacatcaacgggcaccaggccaagttcttcgcctgcatcaagagaagtgacggctcctgtgcgtggtaccgcggcgcggcgccccccaagcaggagtttctcgacatcgaggacccataagcaggcctccaacgcccctgtggccaactgcaaaaaaagcctccaagggtttcgactggtccagctctgacatcccttcctggaaacagcatgaataaaacactcatcccatgggtccaaattaatatgattctgctccccccttctccttttagacatggttgtgggtctggagggagacgtgggtccaaggtcctcatcccatcctccctctgccaggcactatgtgtctggggcttcgatccttgggtgcaggcagggctgggacacgcggcttccctcccagtccctgccttggcaccgtcacagatgccaagcaggcagcacttagggatctcccagctgggttagggcagggcctggaaatgtgcattttgcagaaacttttgagggtcgttgcaagactgtgtagcaggcctaccaggtccctttcatcttgagagggacatggcccttgttttctgcagcttccacgcctctgcactccctgcccctggcaagtgctcccatcgccccggtgcccaccatgagctcccagcacctgactccccccacatccaagggcagcctggaaccagtggctagttcttgaaggagccccatcaatcctattaatcctcagaattccagtgggagcctccctctgagccttgtagaaatgggagcgagaaaccccagctgagctgcgttccagcctcagctgagtctttttggtctgcaccccacccccccaccctccccccccgcccacatgctccccagcttgcaggaggaatcggtgaggtcctgtcctgaggctgctgtccggggccggtggctgccctcaaggtcccttccctagctgctgcggttgccattgcttcttgcctgttctggcatcaggcacctggattgagttgcacagctttgctttatccgggcttgtgtgcagggcccggctgggctccccatctgcacatcctgaggacagaaaaagctgggtcttgctgtgccctcccaggcttagtgttccctccctcaaagactgacagccatcgttctgcacggggctttctgcatgtgacgccagctaagcatagtaagaagtccagcctaggaagggaaggattttggaggtaggtggctttggtgacacactcacttctttctcagcctccaggacactatggcctgttttaagagacatcttatttttctaaaggtgaattctcagatgataggtgaacctgagttgcagatataccaacttctgcttgtatttcttaaatgacaaagattacctagctaagaaacttcctagggaactagggaacctatgtgttccctcagtgtggtttcctgaagccagtgatatgggggttaggataggaagaactttctcggtaatgataaggagaatctcttgtttcctcccacctgtgttgtaaagataaactgacgatatacaggcacattatgtaaacatacacacgcaatgaaaccgaagcttggcggcctgggcgtggtcttgcaaaatgcttccaaagccaccttagcctgttctattcagcggcaaccccaaagcacctgttaagactcctgacccccaagtggcatgcagcccccatgcccaccgggacctggtcagcacagatcttgatgacttccctttctagggcagactgggagggtatccaggaatcggcccctgccccacgggcgttttcatgctgtacagtgacctaaagttggtaagatgtcataatggaccagtccatgtgatttcagtatatacaactccaccagacccctccaacccatataacaccccacccctgttcgcttcctgtatggtgatatcatatgtaacatttactcctgtttctgctgattgtttttttaatgttttggtttgtttttgacatcagctgtaatcattcctgtgctgtgttttttattacccttggtaggtattagacttgcacttttttaaaaaaaggtttctgcatcctggaatatgaagtctgagaccttccggtgctgggaacacacaagagttgttgaaagttgacaagcagactgcgcatgtctctgatgctttgtatcattcttgagcaatcgctcggtccgtggacaataaacagtattatcaaagagaa

SEQ ID NO: 452626 - DNA, 938 bp, Homo sapiens
ttatatccagtacctacactaggatccctcatcctagatccactagttgataaaccccacccctgttcgcttcctgtatggtgatatcatatgtaacatttactcctgtttctgctgattgtttttttaatgttttggtttgtttttgacatcagctgtaatcattcctgtgctgtgttttttattacccttggtaggtattagacttgcacttttttaaaaaaaggtttctgcatcgtggaagcatttgacccagagtggaacgcgtggcctatgcaggtggattccttcaggtctttcctttggttctttgagcatctttgctttcattcgtctcccgtctttggttctccagttcaaattattgcaaagtaaaggatctttgagtaggttcggtctgaaaggtgtggcctttatatttgatccacacacgttggtcttttaaccgtgctgagcagaaaacaaaacaggttaagaagagccgggtggcagctgacagaggaagccgctcaaataccttcacaataaatagtggcaatatatatatagtttaagaaggctctccatttggcatcgtttaatttatatgttatgttctaagcacagctctcttctcctattttcatcctgcaagcaactcaaaatatttaaaataaagtttacattgtagttattttcaaatctttgcttgataagtattaagaaatattggacttgctgccgtaatttaaagctctgttgattttgtttccgtttggatttttgggggaggggagcactgtgtttatgctggaatatgaagtctgagaccttccggtgctgggaacacacaagagttgttgaaagttgacaagcagactgcgcatgtctctgatgctttgtatcattcttgagcaatcgctcggtccgtggacaataaacagtattatcaaagagaa

SEQ ID NO: 452627 - DNA, 2795 bp, Homo sapiens
cgcagcaaacacatccgtagaaggcagcgcggccgccgagagccgcagcgccgctcgcccgccgccccccaccccgccgccccgcccggcgaattgcgccccgcgcccctcccctcgcgcccccgagacaaagaggagagaaagtttgcgcggccgagcggggcaggtgaggagggtgagccgcgcgggaggggcccgcctcggccccggctcagcccccgcccgcgcccccagcccgccgccgcgagcagcgcccggaccccccagcggcggcccccgcccgcccagccccccggcccgccatgggcgccgcggcccgcaccctgcggctggcgctcggcctcctgctgctggcgacgctgcttcgcccggccgacgcctgcagctgctccccggtgcacccgcaacaggcgttttgcaatgcagatgtagtgatcagggccaaagcggtcagtgagaaggaagtggactctggaaacgacatttatggcaaccctatcaagaggatccagtatgagatcaagcagataaagatgttcaaagggcctgagaaggatatagagtttatctacacggccccctcctcggcagtgtgtggggtctcgctggacgttggaggaaagaaggaatatctcattgcaggaaaggccgagggggacggcaagatgcacatcaccctctgtgacttcatcgtgccctgggacaccctgagcaccacccagaagaagagcctgaaccacaggtaccagatgggctgcgagtgcaagatcacgcgctgccccatgatcccgtgctacatctcctccccggacgagtgcctctggatggactgggtcacagagaagaacatcaacgggcaccaggccaagttcttcgcctgcatcaagagaagtgacggctcctgtgcgtggtaccgcggcgcggcgccccccaagcaggagtttctcgacatcgaggacccataagcaggcctccaacgcccctgtggccaactgcaaaaaaagcctccaagggtttcgactggtccagctctgacatcccttcctggaaacagcatgaataaaacactcatcccatgggtccaaattaatatgattctgctccccccttctccttttagacatggttgtgggtctggagggagacgtgggtccaaggtcctcatcccatcctccctctgccaggcactatgtgtctggggcttcgatccttgggtgcaggcagggctgggacacgcggcttccctcccagtccctgccttggcaccgtcacagatgccaagcaggcagcacttagggatctcccagctgggttagggcagggcctggaaatgtgcattttgcagaaacttttgagggtcgttgcaagactgtgtagcaggcctaccaggtccctttcatcttgagagggacatggcccttgttttctgcagcttccacgcctctgcactccctgcccctggcaagtgctcccatcgccccggtgcccaccatgagctcccagcacctgactccccccacatccaagggcagcctggaaccagtggctagttcttgaaggagccccatcaatcctattaatcctcagaattccagtgggagcctccctctgagccttgtagaaatgggagcgagaaaccccagctgagctgcgttccagcctcagctgagtctttttggtctgcaccccacccccccaccctccccccccgcccacatgctccccagcttgcaggaggaatcggtgaggtcctgtcctgaggctgctgtccggggccggtggctgccctcaaggtcccttccctagctgctgcggttgccattgcttcttgcctgttctggcatcaggcacctggattgagttgcacagctttgctttatccgggcttgtgtgcagggcccggctgggctccccatctgcacatcctgaggacagaaaaagctgggtcttgctgtgccctcccaggcttagtgttccctccctcaaagactgacagccatcgttctgcacggggctttctgcatgtgacgccagctaagcatagtaagaagtccagcctaggaagggaaggattttggaggtaggtggctttggtgacacactcacttctttctcagcctccaggacactatggcctgttttaagagacatcttatttttctaaaggtgaattctcagatgataggtgaacctgagttgcagatataccaacttctgcttgtatttcttaaatgacaaagattacctagctaagaaacttcctagggaactagggaacctatgtgttccctcagtgtggtttcctgaagccagtgatatgggggttaggataggaagaactttctcggtaatgataaggagaatctcttgtttcctcccacctgtgttgtaaagataaactgacgatatacaggcacattatgtaaacatacacacgcaatgaaaccgaagcttggcggcctgggcgtggtcttgcaaaatgcttccaaagccaccttagcctgttctattcagcggcaaccccaaagcacctgttaagactcctgacccccaagtggcatgcagcccccatgcccaccgggacctggtcagcacagatcttgatgacttccctttctagggcagactgggagggtatccaggaatcggcccctgccccacgggcgttttcatgctgtacagtgacctaaagttggtaagatgtcataatggaccagtccatgtgatttcagtatatacaactccaccagacccctccaacccatataacgcatcacccgttcgggatcctcatg

SEQ ID NO: 452628 - DNA, 2064 bp, Homo sapiens
cgcagcaaacacatccgtagaaggcagcgcggccgccgagagccgcagcgccgctcgcccgccgccccccaccccgccgccccgcccggcgaattgcgccccgcgcccctcccctcgcgcccccgagacaaagaggagagaaagtttgcgcggccgagcggggcaggtgaggagggtgagccgcgcgggaggggcccgcctcggccccggctcagcccccgcccgcgcccccagcccgccgccgcgagcagcgcccggaccccccagcggcggcccccgcccgcccagccccccggcccgccatgggcgccgcggcccgcaccctgcggctggcgctcggcctcctgctgctggcgacgctgcttcgcccggccgacgcctgcagctgctccccggtgcacccgcaacaggcgttttgcaatgcagatgtagtgatcagggccaaagcggtcagtgagaaggaagtggactctggaaacgacatttatggcaaccctatcaagaggatccagtatgagatcaagcagataaagatgttcaaagggcctgagaaggatatagagtttatctacacggccccctcctcggcagtgtgtggggtctcgctggacgttggaggaaagaaggaatatctcattgcaggaaaggccgagggggacggcaagatgcacatcaccctctgtgacttcatcgtgccctgggacaccctgagcaccacccagaagaagagcctgaaccacaggtaccagatgggctgcgagtgcaagatcacgcgctgccccatgatcccgtgctacatctcctccccggacgagtgcctctggatggactgggtcacagagaagaacatcaacgggcaccaggccaagttcttcgcctgcatcaagagaagtgacggctcctgtgcgtggtaccgcggcgcggcgccccccaagcaggagtttctcgacatcgaggacccataagcaggcctccaacgcccctgtggccaactgcaaaaaaagcctccaagggtttcgactggtccagctctgacatcccttcctggaaacagcatgaataaaacactcatcccatgggtccaaattaatatgattctgctccccccttctccttttagacatggttgtgggtctggagggagacgtgggtccaaggtcctcatcccatcctccctctgccaggcactatgtgtctggggcttcgatccttgggtgcaggcagggctgggacacgcggcttccctcccagtccctgccttggcaccgtcacagatgccaagcaggcagcacttagggatctcccagctgggttagggcagggcctggaaatgtgcattttgcagaaacttttgagggtcgttgcaagactgtgtagcaggcctaccaggtccctttcatcttgagagggacatggcccttgttttctgcagcttccacgcctctgcactccctgcccctggcaagtgctcccatcgccccggtgcccaccatgagctcccagcacctgactccccccacatccaagggcagcctggaaccagtggctagttcttgaaggagccccatcaatcctattaatcctcagaattccagtgggagcctccctctgagccttgtagaaatgggagcgagaaaccccagctgagctgcgttccagcctcagctgagtctttttggtctgcaccccacccccccaccctccccccccgcccacatgctccccagcttgcaggaggaatcggtgaggtcctgtcctgaggctgctgtccggggccggtggctgccctcaaggtcccttccctagctgctgcggttgccattgcttcttgcctgttctggcatcaggcacctggattgagttgcacagctttgctttatccgggcttgtgtgcagggcccggctgggctccccatctgcacatcctgaggacagaaaaagctgggtcttgctgtgccctcccaggcttagtgttccctccctccaaaatccttcccttcctaggctggacttcttactatgcttagctggcgtcacatgcagaaagccccgtgcagagatggc

SEQ ID NO: 452629 - DNA, 671 bp, Homo sapiens
  misc_feature (1)..(1): n is a, c, g, or t
  misc_feature (10)..(10): n is a, c, g, or t
  misc_feature (502)..(502): n is a, c, g, or t
  misc_feature (520)..(520): n is a, c, g, or t
  misc_feature (590)..(590): n is a, c, g, or t
  misc_feature (620)..(620): n is a, c, g, or t
  misc_feature (623)..(623): n is a, c, g, or t
  misc_feature (626)..(626): n is a, c, g, or t
  misc_feature (631)..(631): n is a, c, g, or t
  misc_feature (634)..(634): n is a, c, g, or t
  misc_feature (636)..(636): n is a, c, g, or t
  misc_feature (645)..(645): n is a, c, g, or t
nattcggcangagggggagcactgtgtttatgctggaatatgaagtctgagacttccggtgctgggaacacacaagagttgttgaaaacagctctcttctcctattttcatcctgcaagcaactcaaaatatttaaaataaagtttacattgtagttattttcaaatctttgcttgataagtattaagaaatattggacttgctgccgtaatttaaagctctgttgattttgtttccgtttggatttttgggggaggggagcactgtgtttatgctggaatatgaagtctgagaccttccggtgctgggaacacacaagagttgttgaaagttgacaagcagactgcgcatgtctctgatgctttgtatcattcttgagcaatcgctcggtccgtggacaataaacagtattatcaaagagaaaaaaaaaaaaaaaaaaaaaaaaaaaaacaaaaaaaaaacaaacaaaaaaaaaaaaaaatgtgtgtcggcgcgcgcgccncgggcccctggaaaaagnttttaaagaacaatcgggtggggccgccgcggggccccaatagggaaagggaaacggggccaaagcgggntcccaagaggaaaaccggggcaaagaaaanggngcnggggnttncncccacattnaaaaaacggccgggggggaaacccga

SEQ ID NO: 452630 - DNA, 1061 bp, Homo sapiens
cgcagcaaacacatccgtagaaggcagcgcggccgccgagagccgcagcgccgctcgcccgccgccccccaccccgccgccccgcccggcgaattgcgccccgcgcccctcccctcgcgcccccgagacaaagaggagagaaagtttgcgcggccgagcggggcaggtgaggagggtgagccgcgcgggaggggcccgcctcggccccggctcagcccccgcccgcgcccccagcccgccgccgcgagcagcgcccggaccccccagcggcggcccccgcccgcccagccccccggcccgccatgggcgccgcggcccgcaccctgcggctggcgctcggcctcctgctgctggcgacgctgcttcgcccggccgacgcctgcagctgctccccggtgcacccgcaacaggcgttttgcaatgcagatgtagtgatcagggccaaagcggtcagtgagaaggaagtggactctggaaacgacatttatggcaaccctatcaagaggatccagtatgagatcaagcagataaagatgttcaaagggcctgagaaggatatagagtttatctacacggccccctcctcggcagtgtgtggggtctcgctggacgttggaggaaagaaggaatatctcattgcaggaaaggccgagggggacggcaagatgcacatcaccctctgtgacttcatcgtgccctgggacaccctgagcaccacccagaagaagagcctgaaccacaggtaccagatgggctgcgagtgcaagatcacgcgctgccccatgatcccgtgctacatctcctccccggacgagtgcctctggatggactgggtcacagagaagaacatcaacgggcaccaggccaagttcttcgcctgcatcaagagaagtgacggctcctgtgcgtggtaccgcggcgcggcgccccccaagcaggagtttctcgacatcgaggacccataagcaggcctccaacgcccctgtggccaactgcaaaaaaagccttttaacacatgaacagctactgacatacccatcctgaagacggactgggtacca

SEQ ID NO: 452631 - DNA, 390 bp, Homo sapiens
ctcctgtcagcttctgcctccctgtaatgtgttctgggtggtctagctcagtcatctggagacacacacagtaagtaccacccctcttccccaagcatttcaggtgcttctcgtggtgacaagcactggcatctctgtagatgggtgctgctgttgttatcatccccatcctaaagagcaaactgaggcacccagagtgaagtcgcttggcctaggtcacatagtactcttaagcaccatactctgccattctagacttttctatcctttgcaaacacccttgccccacctcacctcctttggcttttcttcctaggacctttggtcagtgggcccctcctgaccaaaggagttcattctcctcctggactccaagcctgcggcctcttc

SEQ ID NO: 452632 - DNA, 3655 bp, Homo sapiens
cgcagcaaacacatccgtagaaggcagcgcggccgccgagagccgcagcgccgctcgcccgccgccccccaccccgccgccccgcccggcgaattgcgccccgcgcccctcccctcgcgcccccgagacaaagaggagagaaagtttgcgcggccgagcggggcaggtgaggagggtgagccgcgcgggaggggcccgcctcggccccggctcagcccccgcccgcgcccccagcccgccgccgcgagcagcgcccggaccccccagcggcggcccccgcccgcccagccccccggcccgccatgggcgccgcggcccgcaccctgcggctggcgctcggcctcctgctgctggcgacgctgcttcgcccggccgacgcctgcagctgctccccggtgcacccgcaacaggcgttttgcaatgcagatgtagtgatcagggccaaagcggtcagtgagaaggaagtggactctggaaacgacatttatggcaaccctatcaagaggatccagtatgagatcaagcagataaagatgttcaaagggcctgagaaggatatagagtttatctacacggccccctcctcggcagtgtgtggggtctcgctggacgttggaggaaagaaggaatatctcattgcaggaaaggccgagggggacggcaagatgcacatcaccctctgtgacttcatcgtgccctgggacaccctgagcaccacccagaagaagagcctgaaccacaggtaccagatgggctgcgagtgcaagatcacgcgctgccccatgatcccgtgctacatctcctccccggacgagtgcctctggatggactgggtcacagagaagaacatcaacgggcaccaggccaagttcttcgcctgcatcaagagaagtgacggctcctgtgcgtggtaccgcggcgcggcgccccccaagcaggagtttctcgacatcgaggacccataagcaggcctccaacgcccctgtggccaactgcaaaaaaagcctccaagggtttcgactggtccagctctgacatcccttcctggaaacagcatgaataaaacactcatcccatgggtccaaattaatatgattctgctccccccttctccttttagacatggttgtgggtctggagggagacgtgggtccaaggtcctcatcccatcctccctctgccaggcactatgtgtctggggcttcgatccttgggtgcaggcagggctgggacacgcggcttccctcccagtccctgccttggcaccgtcacagatgccaagcaggcagcacttagggatctcccagctgggttagggcagggcctggaaatgtgcattttgcagaaacttttgagggtcgttgcaagactgtgtagcaggcctaccaggtccctttcatcttgagagggacatggcccttgttttctgcagcttccacgcctctgcactccctgcccctggcaagtgctcccatcgccccggtgcccaccatgagctcccagcacctgactccccccacatccaagggcagcctggaaccagtggctagttcttgaaggagccccatcaatcctattaatcctcagaattccagtgggagcctccctctgagccttgtagaaatgggagcgagaaaccccagctgagctgcgttccagcctcagctgagtctttttggtctgcaccccacccccccaccctccccccccgcccacatgctccccagcttgcaggaggaatcggtgaggtcctgtcctgaggctgctgtccggggccggtggctgccctcaaggtcccttccctagctgctgcggttgccattgcttcttgcctgttctggcatcaggcacctggattgagttgcacagctttgctttatccgggcttgtgtgcagggcccggctgggctccccatctgcacatcctgaggacagaaaaagctgggtcttgctgtgccctcccaggcttagtgttccctccctcaaagactgacagccatcgttctgcacggggctttctgcatgtgacgccagctaagcatagtaagaagtccagcctaggaagggaaggattttggaggtaggtggctttggtgacacactcacttctttctcagcctccaggacactatggcctgttttaagagacatcttatttttctaaaggtgaattctcagatgataggtgaacctgagttgcagatataccaacttctgcttgtatttcttaaatgacaaagattacctagctaagaaacttcctagggaactagggaacctatgtgttccctcagtgtggtttcctgaagccagtgatatgggggttaggataggaagaactttctcggtaatgataaggagaatctcttgtttcctcccacctgtgttgtaaagataaactgacgatatacaggcacattatgtaaacatacacacgcaatgaaaccgaagcttggcggcctgggcgtggtcttgcaaaatgcttccaaagccaccttagcctgttctattcagcggcaaccccaaagcacctgttaagactcctgacccccaagtggcatgcagcccccatgcccaccgggacctggtcagcacagatcttgatgacttccctttctagggcagactgggagggtatccaggaatcggcccctgccccacgggcgttttcatgctgtacagtgacctaaagttggtaagatgtcataatggaccagtccatgtgatttcagtatatacaactccaccagacccctccaacccatataacaccccacccctgttcgcttcctgtatggtgatatcatatgtaacatttactcctgtttctgctgattgtttttttaatgttttggtttgtttttgacatcagctgtaatcattcctgtgctgtgttttttattacccttggtaggtattagacttgcacttttttaaaaaaaggtttctgcatcgtggaagcatttgacccagagtggaacgcgtggcctatgcaggtggattccttcaggtctttcctttggttctttgagcatctttgctttcattcgtctcccgtctttggttctccagttcaaattattgcaaagtaaaggatctttgagtaggttcggtctgaaaggtgtggcctttatatttgatccacacacgttggtcttttaaccgtgctgagcagaaaacaaaacaggttaagaagagccgggtggcagctgacagaggaagccgctcaaataccttcacaataaatagtggcaatatatatatagtttaagaaggctctccatttggcatcgtttaatttatatgttatgttctaagcacagctctcttctcctattttcatcctgcaagcaactcaaaatatttaaaataaagtttacattgtagttattttcaaatctttgcttgataagtattaagaaatattggacttgctgccgtaatttaaagctctgttgattttgtttccgtttggatttttgggggaggggagcactgtgtttatgctggaatatgaagtctgagaccttccggtgctgggaacacacaagagttgttgaaagttgacaagcagactgcgcatgtctctgatgctttgtatcattcttgagcaatcgctcggtccgtggacaataaacagtattatcaaagagaa

SEQ ID NO: 452633 - DNA, 3422 bp, Homo sapiens
ggctgggcatcatctctcagcctggaggaggagacgccatgccgggggctgggatcaccatgccccttgcccgtctcgcaccttgctgctgtctgtaaccccccagcacctcccgcaggcctggacgtcttatccctctccttagccccaggagcgtgtttcaggaactctcctcacctctgtgtcttgtgttttgcagtgatcagggccaaagcggtcagtgagaaggaagtggactctggaaacgacatttatggcaaccctatcaagaggatccagtatgagatcaagcagataaagatgttcaaagggcctgagaaggatatagagtttatctacacggccccctcctcggcagtgtgtggggtctcgctggacgttggaggaaagaaggaatatctcattgcaggaaaggccgagggggacggcaagatgcacatcaccctctgtgacttcatcgtgccctgggacaccctgagcaccacccagaagaagagcctgaaccacaggtaccagatgggctgcgagtgcaagatcacgcgctgccccatgatcccgtgctacatctcctccccggacgagtgcctctggatggactgggtcacagagaagaacatcaacgggcaccaggccaagttcttcgcctgcatcaagagaagtgacggctcctgtgcgtggtaccgcggcgcggcgccccccaagcaggagtttctcgacatcgaggacccataagcaggcctccaacgcccctgtggccaactgcaaaaaaagcctccaagggtttcgactggtccagctctgacatcccttcctggaaacagcatgaataaaacactcatcccatgggtccaaattaatatgattctgctccccccttctccttttagacatggttgtgggtctggagggagacgtgggtccaaggtcctcatcccatcctccctctgccaggcactatgtgtctggggcttcgatccttgggtgcaggcagggctgggacacgcggcttccctcccagtccctgccttggcaccgtcacagatgccaagcaggcagcacttagggatctcccagctgggttagggcagggcctggaaatgtgcattttgcagaaacttttgagggtcgttgcaagactgtgtagcaggcctaccaggtccctttcatcttgagagggacatggcccttgttttctgcagcttccacgcctctgcactccctgcccctggcaagtgctcccatcgccccggtgcccaccatgagctcccagcacctgactccccccacatccaagggcagcctggaaccagtggctagttcttgaaggagccccatcaatcctattaatcctcagaattccagtgggagcctccctctgagccttgtagaaatgggagcgagaaaccccagctgagctgcgttccagcctcagctgagtctttttggtctgcaccccacccccccaccctccccccccgcccacatgctccccagcttgcaggaggaatcggtgaggtcctgtcctgaggctgctgtccggggccggtggctgccctcaaggtcccttccctagctgctgcggttgccattgcttcttgcctgttctggcatcaggcacctggattgagttgcacagctttgctttatccgggcttgtgtgcagggcccggctgggctccccatctgcacatcctgaggacagaaaaagctgggtcttgctgtgccctcccaggcttagtgttccctccctcaaagactgacagccatcgttctgcacggggctttctgcatgtgacgccagctaagcatagtaagaagtccagcctaggaagggaaggattttggaggtaggtggctttggtgacacactcacttctttctcagcctccaggacactatggcctgttttaagagacatcttatttttctaaaggtgaattctcagatgataggtgaacctgagttgcagatataccaacttctgcttgtatttcttaaatgacaaagattacctagctaagaaacttcctagggaactagggaacctatgtgttccctcagtgtggtttcctgaagccagtgatatgggggttaggataggaagaactttctcggtaatgataaggagaatctcttgtttcctcccacctgtgttgtaaagataaactgacgatatacaggcacattatgtaaacatacacacgcaatgaaaccgaagcttggcggcctgggcgtggtcttgcaaaatgcttccaaagccaccttagcctgttctattcagcggcaaccccaaagcacctgttaagactcctgacccccaagtggcatgcagcccccatgcccaccgggacctggtcagcacagatcttgatgacttccctttctagggcagactgggagggtatccaggaatcggcccctgccccacgggcgttttcatgctgtacagtgacctaaagttggtaagatgtcataatggaccagtccatgtgatttcagtatatacaactccaccagacccctccaacccatataacaccccacccctgttcgcttcctgtatggtgatatcatatgtaacatttactcctgtttctgctgattgtttttttaatgttttggtttgtttttgacatcagctgtaatcattcctgtgctgtgttttttattacccttggtaggtattagacttgcacttttttaaaaaaaggtttctgcatcgtggaagcatttgacccagagtggaacgcgtggcctatgcaggtggattccttcaggtctttcctttggttctttgagcatctttgctttcattcgtctcccgtctttggttctccagttcaaattattgcaaagtaaaggatctttgagtaggttcggtctgaaaggtgtggcctttatatttgatccacacacgttggtcttttaaccgtgctgagcagaaaacaaaacaggttaagaagagccgggtggcagctgacagaggaagccgctcaaataccttcacaataaatagtggcaatatatatatagtttaagaaggctctccatttggcatcgtttaatttatatgttatgttctaagcacagctctcttctcctattttcatcctgcaagcaactcaaaatatttaaaataaagtttacattgtagttattttcaaatctttgcttgataagtattaagaaatattggacttgctgccgtaatttaaagctctgttgattttgtttccgtttggatttttgggggaggggagcactgtgtttatgctggaatatgaagtctgagaccttccggtgctgggaacacacaagagttgttgaaagttgacaagcagactgcgcatgtctctgatgctttgtatcattcttgagcaatcgctcggtccgtggacaataaacagtattatcaaagagaa

SEQ ID NO: 452634 - DNA, 3381 bp, Homo sapiens
aaagtttgcactggattttattggagccccatctccccagcggcaggcgggcggactgtatatatgtatatactcagtgcttcctgccctcctgtcagcttctgcctccctgtaatgtgttctgggtggtctagctcagtcatctggagacacacacatgatcagggccaaagcggtcagtgagaaggaagtggactctggaaacgacatttatggcaaccctatcaagaggatccagtatgagatcaagcagataaagatgttcaaagggcctgagaaggatatagagtttatctacacggccccctcctcggcagtgtgtggggtctcgctggacgttggaggaaagaaggaatatctcattgcaggaaaggccgagggggacggcaagatgcacatcaccctctgtgacttcatcgtgccctgggacaccctgagcaccacccagaagaagagcctgaaccacaggtaccagatgggctgcgagtgcaagatcacgcgctgccccatgatcccgtgctacatctcctccccggacgagtgcctctggatggactgggtcacagagaagaacatcaacgggcaccaggccaagttcttcgcctgcatcaagagaagtgacggctcctgtgcgtggtaccgcggcgcggcgccccccaagcaggagtttctcgacatcgaggacccataagcaggcctccaacgcccctgtggccaactgcaaaaaaagcctccaagggtttcgactggtccagctctgacatcccttcctggaaacagcatgaataaaacactcatcccatgggtccaaattaatatgattctgctccccccttctccttttagacatggttgtgggtctggagggagacgtgggtccaaggtcctcatcccatcctccctctgccaggcactatgtgtctggggcttcgatccttgggtgcaggcagggctgggacacgcggcttccctcccagtccctgccttggcaccgtcacagatgccaagcaggcagcacttagggatctcccagctgggttagggcagggcctggaaatgtgcattttgcagaaacttttgagggtcgttgcaagactgtgtagcaggcctaccaggtccctttcatcttgagagggacatggcccttgttttctgcagcttccacgcctctgcactccctgcccctggcaagtgctcccatcgccccggtgcccaccatgagctcccagcacctgactccccccacatccaagggcagcctggaaccagtggctagttcttgaaggagccccatcaatcctattaatcctcagaattccagtgggagcctccctctgagccttgtagaaatgggagcgagaaaccccagctgagctgcgttccagcctcagctgagtctttttggtctgcaccccacccccccaccctccccccccgcccacatgctccccagcttgcaggaggaatcggtgaggtcctgtcctgaggctgctgtccggggccggtggctgccctcaaggtcccttccctagctgctgcggttgccattgcttcttgcctgttctggcatcaggcacctggattgagttgcacagctttgctttatccgggcttgtgtgcagggcccggctgggctccccatctgcacatcctgaggacagaaaaagctgggtcttgctgtgccctcccaggcttagtgttccctccctcaaagactgacagccatcgttctgcacggggctttctgcatgtgacgccagctaagcatagtaagaagtccagcctaggaagggaaggattttggaggtaggtggctttggtgacacactcacttctttctcagcctccaggacactatggcctgttttaagagacatcttatttttctaaaggtgaattctcagatgataggtgaacctgagttgcagatataccaacttctgcttgtatttcttaaatgacaaagattacctagctaagaaacttcctagggaactagggaacctatgtgttccctcagtgtggtttcctgaagccagtgatatgggggttaggataggaagaactttctcggtaatgataaggagaatctcttgtttcctcccacctgtgttgtaaagataaactgacgatatacaggcacattatgtaaacatacacacgcaatgaaaccgaagcttggcggcctgggcgtggtcttgcaaaatgcttccaaagccaccttagcctgttctattcagcggcaaccccaaagcacctgttaagactcctgacccccaagtggcatgcagcccccatgcccaccgggacctggtcagcacagatcttgatgacttccctttctagggcagactgggagggtatccaggaatcggcccctgccccacgggcgttttcatgctgtacagtgacctaaagttggtaagatgtcataatggaccagtccatgtgatttcagtatatacaactccaccagacccctccaacccatataacaccccacccctgttcgcttcctgtatggtgatatcatatgtaacatttactcctgtttctgctgattgtttttttaatgttttggtttgtttttgacatcagctgtaatcattcctgtgctgtgttttttattacccttggtaggtattagacttgcacttttttaaaaaaaggtttctgcatcgtggaagcatttgacccagagtggaacgcgtggcctatgcaggtggattccttcaggtctttcctttggttctttgagcatctttgctttcattcgtctcccgtctttggttctccagttcaaattattgcaaagtaaaggatctttgagtaggttcggtctgaaaggtgtggcctttatatttgatccacacacgttggtcttttaaccgtgctgagcagaaaacaaaacaggttaagaagagccgggtggcagctgacagaggaagccgctcaaataccttcacaataaatagtggcaatatatatatagtttaagaaggctctccatttggcatcgtttaatttatatgttatgttctaagcacagctctcttctcctattttcatcctgcaagcaactcaaaatatttaaaataaagtttacattgtagttattttcaaatctttgcttgataagtattaagaaatattggacttgctgccgtaatttaaagctctgttgattttgtttccgtttggatttttgggggaggggagcactgtgtttatgctggaatatgaagtctgagaccttccggtgctgggaacacacaagagttgttgaaagttgacaagcagactgcgcatgtctctgatgctttgtatcattcttgagcaatcgctcggtccgtggacaataaacagtattatcaaagagaa

SEQ ID NO: 452635 - DNA, 3718 bp, Homo sapiens
cccatggcaacagcctgctatgagtagccagccagggcagaggccgggctgcaggtggaggcggggaagcgattccggccacctttgtgatgggcgtctcactacctacaaagtcagcccagtgatttcaagacagccctggagacagtgcttcctgccctcctgtcagcttctgcctccctgtaatgtgttctgggtggtctagctcagtcatctggagacacacacaagcacaggcacttcgtagctgttgaccatcatttagctccacgtctgcccgtcggttcctcgtgcgtggaatccagcaccacgtgggtgtctctgccgagctctcggcatttcctgagccctcccggaagccagactctgttctcggcgcttcacacgggccgtctcgtctgatgctgtggcgtcctgcagggtgggaacgggcggtgcccgtggacgtggcgctgtgcctgccggcgtcctgggcaccacagcgttgccgcttgcccactgcctcctagcatggccagtgatcagggccaaagcggtcagtgagaaggaagtggactctggaaacgacatttatggcaaccctatcaagaggatccagtatgagatcaagcagataaagatgttcaaagggcctgagaaggatatagagtttatctacacggccccctcctcggcagtgtgtggggtctcgctggacgttggaggaaagaaggaatatctcattgcagatgcacatcaccctctgtgacttcatcgtgccctgggacaccctgagcaccacccagaagaagagcctgaaccacaggtaccagatgggctgcgagtgcaagatcacgcgctgccccatgatcccgtgctacatctcctccccggacgagtgcctctggatggactgggtcacagagaagaacatcaacgggcaccaggccaagttcttcgcctgcatcaagagaagtgacggctcctgtgcgtggtaccgcggcgcggcgccccccaagcaggagtttctcgacatcgaggacccataagcaggcctccaacgcccctgtggccaactgcaaaaaaagcctccaagggtttcgactggtccagctctgacatcccttcctggaaacagcatgaataaaacactcatcccatgggtccaaattaatatgattctgctccccccttctccttttagacatggttgtgggtctggagggagacgtgggtccaaggtcctcatcccatcctccctctgccaggcactatgtgtctggggcttcgatccttgggtgcaggcagggctgggacacgcggcttccctcccagtccctgccttggcaccgtcacagatgccaagcaggcagcacttagggatctcccagctgggttagggcagggcctggaaatgtgcattttgcagaaacttttgagggtcgttgcaagactgtgtagcaggcctaccaggtccctttcatcttgagagggacatggcccttgttttctgcagcttccacgcctctgcactccctgcccctggcaagtgctcccatcgccccggtgcccaccatgagctcccagcacctgactccccccacatccaagggcagcctggaaccagtggctagttcttgaaggagccccatcaatcctattaatcctcagaattccagtgggagcctccctctgagccttgtagaaatgggagcgagaaaccccagctgagctgcgttccagcctcagctgagtctttttggtctgcaccccacccccccaccctccccccccgcccacatgctccccagcttgcaggaggaatcggtgaggtcctgtcctgaggctgctgtccggggccggtggctgccctcaaggtcccttccctagctgctgcggttgccattgcttcttgcctgttctggcatcaggcacctggattgagttgcacagctttgctttatccgggcttgtgtgcagggcccggctgggctccccatctgcacatcctgaggacagaaaaagctgggtcttgctgtgccctcccaggcttagtgttccctccctcaaagactgacagccatcgttctgcacggggctttctgcatgtgacgccagctaagcatagtaagaagtccagcctaggaagggaaggattttggaggtaggtggctttggtgacacactcacttctttctcagcctccaggacactatggcctgttttaagagacatcttatttttctaaaggtgaattctcagatgataggtgaacctgagttgcagatataccaacttctgcttgtatttcttaaatgacaaagattacctagctaagaaacttcctagggaactagggaacctatgtgttccctcagtgtggtttcctgaagccagtgatatgggggttaggataggaagaactttctcggtaatgataaggagaatctcttgtttcctcccacctgtgttgtaaagataaactgacgatatacaggcacattatgtaaacatacacacgcaatgaaaccgaagcttggcggcctgggcgtggtcttgcaaaatgcttccaaagccaccttagcctgttctattcagcggcaaccccaaagcacctgttaagactcctgacccccaagtggcatgcagcccccatgcccaccgggacctggtcagcacagatcttgatgacttccctttctagggcagactgggagggtatccaggaatcggcccctgccccacgggcgttttcatgctgtacagtgacctaaagttggtaagatgtcataatggaccagtccatgtgatttcagtatatacaactccaccagacccctccaacccatataacaccccacccctgttcgcttcctgtatggtgatatcatatgtaacatttactcctgtttctgctgattgtttttttaatgttttggtttgtttttgacatcagctgtaatcattcctgtgctgtgttttttattacccttggtaggtattagacttgcacttttttaaaaaaaggtttctgcatcgtggaagcatttgacccagagtggaacgcgtggcctatgcaggtggattccttcaggtctttcctttggttctttgagcatctttgctttcattcgtctcccgtctttggttctccagttcaaattattgcaaagtaaaggatctttgagtaggttcggtctgaaaggtgtggcctttatatttgatccacacacgttggtcttttaaccgtgctgagcagaaaacaaaacaggttaagaagagccgggtggcagctgacagaggaagccgctcaaataccttcacaataaatagtggcaatatatatatagtttaagaaggctctccatttggcatcgtttaatttatatgttatgttctaagcacagctctcttctcctattttcatcctgcaagcaactcaaaatatttaaaataaagtttacattgtagttattttcaaatctttgcttgataagtattaagaaatattggacttgctgccgtaatttaaagctctgttgattttgtttccgtttggatttttgggggaggggagcactgtgtttatgctggaatatgaagtctgagaccttccggtgctgggaacacacaagagttgttgaaagttgacaagcagactgcgcatgtctctgatgctttgtatcattcttgagcaatcgctcggtccgtggacaataaacagtattatcaaagagaa

SEQ ID NO: 452636 - DNA, 4024 bp, Homo sapiens
  misc_feature (3698)..(3698): n is a, c, g, or t
  misc_feature (3730)..(3731): n is a, c, g, or t
  misc_feature (3762)..(3763): n is a, c, g, or t
  misc_feature (3766)..(3766): n is a, c, g, or t
  misc_feature (3769)..(3769): n is a, c, g, or t
  misc_feature (3771)..(3772): n is a, c, g, or t
  misc_feature (3774)..(3775): n is a, c, g, or t
  misc_feature (3788)..(3788): n is a, c, g, or t
  misc_feature (3790)..(3790): n is a, c, g, or t
  misc_feature (3792)..(3792): n is a, c, g, or t
  misc_feature (3795)..(3795): n is a, c, g, or t
  misc_feature (3812)..(3813): n is a, c, g, or t
cgcagcaaacacatccgtagaaggcagcgcggccgccgagagccgcagcgccgctcgcccgccgccccccaccccgccgccccgcccggcgaattgcgccccgcgcccctcccctcgcgcccccgagacaaagaggagagaaagtttgcgcggccgagcggggcaggtgaggagggtgagccgcgcgggaggggcccgcctcggccccggctcagcccccgcccgcgcccccagcccgccgccgcgagcagcgcccggaccccccagcggcggcccccgcccgcccagccccccggcccgccatgggcgccgcggcccgcaccctgcggctggcgctcggcctcctgctgctggcgacgctgcttcgcccggccgacgcctgcagctgctccccggtgcacccgcaacaggcgttttgcaatgcagatgtagtgatcagggccaaagcggtcagtgagaaggaagtggactctggaaacgacatttatggcaaccctatcaagaggatccagtatgagatcaagcagataaagatgttcaaagggcctgagaaggatatagagtttatctacacggccccctcctcggcagtgtgtggggtctcgctggacgttggaggaaagaaggaatatctcattgcaggaaaggccgagggggacggcaagatgcacatcaccctctgtgacttcatcgtgccctgggacaccctgagcaccacccagaagaagagcctgaaccacaggtaccagatgggctgcgagtgcaagatcacgcgctgccccatgatcccgtgctacatctcctccccggacgagtgcctctggatggactgggtcacagagaagaacatcaacgggcaccaggccaagttcttcgcctgcatcaagagaagtgacggctcctgtgcgtggtaccgcggcgcggcgccccccaagcaggagtttctcgacatcgaggacccataagcaggcctccaacgcccctgtggccaactgcaaaaaaagcctccaagggtttcgactggtccagctctgacatcccttcctggaaacagcatgaataaaacactcatcccatgggtccaaattaatatgattctgctccccccttctccttttagacatggttgtgggtctggagggagacgtgggtccaaggtcctcatcccatcctccctctgccaggcactatgtgtctggggcttcgatccttgggtgcaggcagggctgggacacgcggcttccctcccagtccctgccttggcaccgtcacagatgccaagcaggcagcacttagggatctcccagctgggttagggcagggcctggaaatgtgcattttgcagaaacttttgagggtcgttgcaagactgtgtagcaggcctaccaggtccctttcatcttgagagggacatggcccttgttttctgcagcttccacgcctctgcactccctgcccctggcaagtgctcccatcgccccggtgcccaccatgagctcccagcacctgactccccccacatccaagggcagcctggaaccagtggctagttcttgaaggagccccatcaatcctattaatcctcagaattccagtgggagcctccctctgagccttgtagaaatgggagcgagaaaccccagctgagctgcgttccagcctcagctgagtctttttggtctgcaccccacccccccaccctccccccccgcccacatgctccccagcttgcaggaggaatcggtgaggtcctgtcctgaggctgctgtccggggccggtggctgccctcaaggtcccttccctagctgctgcggttgccattgcttcttgcctgttctggcatcaggcacctggattgagttgcacagctttgctttatccgggcttgtgtgcagggcccggctgggctccccatctgcacatcctgaggacagaaaaagctgggtcttgctgtgccctcccaggcttagtgttccctccctcaaagactgacagccatcgttctgcacggggctttctgcatgtgacgccagctaagcatagtaagaagtccagcctaggaagggaaggattttggaggtaggtggctttggtgacacactcacttctttctcagcctccaggacactatggcctgttttaagagacatcttatttttctaaaggtgaattctcagatgataggtgaacctgagttgcagatataccaacttctgcttgtatttcttaaatgacaaagattacctagctaagaaacttcctagggaactagggaacctatgtgttccctcagtgtggtttcctgaagccagtgatatgggggttaggataggaagaactttctcggtaatgataaggagaatctcttgtttcctcccacctgtgttgtaaagataaactgacgatatacaggcacattatgtaaacatacacacgcaatgaaaccgaagcttggcggcctgggcgtggtcttgcaaaatgcttccaaagccaccttagcctgttctattcagcggcaaccccaaagcacctgttaagactcctgacccccaagtggcatgcagcccccatgcccaccgggacctggtcagcacagatcttgatgacttccctttctagggcagactgggagggtatccaggaatcggcccctgccccacgggcgttttcatgctgtacagtgacctaaagttggtaagatgtcataatggaccagtccatgtgatttcagtatatacaactccaccagacccctccaacccatataacaccccacccctgttcgcttcctgtatggtgatatcatatgtaacatttactcctgtttctgctgattgtttttttaatgttttggtttgtttttgacatcagctgtaatcattcctgtgctgtgttttttattacccttggtaggtattagacttgcacttttttaaaaaaaggtttctgcatcgtggaagcatttgacccagagtggaacgcgtggcctatgcaggtggattccttcaggtctttcctttggttctttgagcatctttgctttcattcgtctcccgtctttggttctccagttcaaattattgcaaagtaaaggatctttgagtaggttcggtctgaaaggtgtggcctttatatttgatccacacacgttggtcttttaaccgtgctgagcagaaaacaaaacaggttaagaagagccgggtggcagctgacagaggaagccgctcaaataccttcacaataaatagtggcaatatatatatagtttaagaaggctctccatttggcatcgtttaatttatatgttatgttctaagcacagctctcttctcctattttcatcctgcaagcaactcaaaatatttaaaataaagtttacattgtagttattttcaaatctttgcttgataagtattaagaaatattggacttgctgccgtaatttaaagctctgttgattttgtttccgtttggatttttgggggaggggagcactgtgtttatgctggaatatgaagtctgagaccttccggtgctgggaacacacaagagttgttgaaagttgacaagcagactgcgcatgtctctgatgctttgtatcattcttgagcaatcgctcggtccgtggacaataaacagtattatcaaagagaaaaaaaaaaaaaaaaaaaaaaaaaacgtgggcgggcgcgcgccngggcccctcgaagaaagctttcaaaaacccanncgcgtgggggcggcgcgggggcccagggggnnaanggngnnanngtgggccaaaagngngntcncaaaggaaaccggggcnnaggcaaagggcggggggactctccaccaacaatacaaaaaacaggcacgcggggcgggcacaccgcgcagggtttcatcgcacaacaatcccccaaaaagtggggagatcgcaggagagggacacaacgagggacctacataacagacgggggatgccacaggggcaaaccgcacaattcaaaaagagccccagagagccgagggggaatt

SEQ ID NO: 452637 - DNA, 3879 bp, Homo sapiens
  misc_feature (3710)..(3710): n is a, c, g, or t
  misc_feature (3728)..(3728): n is a, c, g, or t
  misc_feature (3798)..(3798): n is a, c, g, or t
  misc_feature (3828)..(3828): n is a, c, g, or t
  misc_feature (3831)..(3831): n is a, c, g, or t
  misc_feature (3834)..(3834): n is a, c, g, or t
  misc_feature (3839)..(3839): n is a, c, g, or t
  misc_feature (3842)..(3842): n is a, c, g, or t
  misc_feature (3844)..(3844): n is a, c, g, or t
  misc_feature (3853)..(3853): n is a, c, g, or t
cgcagcaaacacatccgtagaaggcagcgcggccgccgagagccgcagcgccgctcgcccgccgccccccaccccgccgccccgcccggcgaattgcgccccgcgcccctcccctcgcgcccccgagacaaagaggagagaaagtttgcgcggccgagcggggcaggtgaggagggtgagccgcgcgggaggggcccgcctcggccccggctcagcccccgcccgcgcccccagcccgccgccgcgagcagcgcccggaccccccagcggcggcccccgcccgcccagccccccggcccgccatgggcgccgcggcccgcaccctgcggctggcgctcggcctcctgctgctggcgacgctgcttcgcccggccgacgcctgcagctgctccccggtgcacccgcaacaggcgttttgcaatgcagatgtagtgatcagggccaaagcggtcagtgagaaggaagtggactctggaaacgacatttatggcaaccctatcaagaggatccagtatgagatcaagcagataaagatgttcaaagggcctgagaaggatatagagtttatctacacggccccctcctcggcagtgtgtggggtctcgctggacgttggaggaaagaaggaatatctcattgcaggaaaggccgagggggacggcaagatgcacatcaccctctgtgacttcatcgtgccctgggacaccctgagcaccacccagaagaagagcctgaaccacaggtaccagatgggctgcgagtgcaagatcacgcgctgccccatgatcccgtgctacatctcctccccggacgagtgcctctggatggactgggtcacagagaagaacatcaacgggcaccaggccaagttcttcgcctgcatcaagagaagtgacggctcctgtgcgtggtaccgcggcgcggcgccccccaagcaggagtttctcgacatcgaggacccataagcaggcctccaacgcccctgtggccaactgcaaaaaaagcctccaagggtttcgactggtccagctctgacatcccttcctggaaacagcatgaataaaacactcatcccatgggtccaaattaatatgattctgctccccccttctccttttagacatggttgtgggtctggagggagacgtgggtccaaggtcctcatcccatcctccctctgccaggcactatgtgtctggggcttcgatccttgggtgcaggcagggctgggacacgcggcttccctcccagtccctgccttggcaccgtcacagatgccaagcaggcagcacttagggatctcccagctgggttagggcagggcctggaaatgtgcattttgcagaaacttttgagggtcgttgcaagactgtgtagcaggcctaccaggtccctttcatcttgagagggacatggcccttgttttctgcagcttccacgcctctgcactccctgcccctggcaagtgctcccatcgccccggtgcccaccatgagctcccagcacctgactccccccacatccaagggcagcctggaaccagtggctagttcttgaaggagccccatcaatcctattaatcctcagaattccagtgggagcctccctctgagccttgtagaaatgggagcgagaaaccccagctgagctgcgttccagcctcagctgagtctttttggtctgcaccccacccccccaccctccccccccgcccacatgctccccagcttgcaggaggaatcggtgaggtcctgtcctgaggctgctgtccggggccggtggctgccctcaaggtcccttccctagctgctgcggttgccattgcttcttgcctgttctggcatcaggcacctggattgagttgcacagctttgctttatccgggcttgtgtgcagggcccggctgggctccccatctgcacatcctgaggacagaaaaagctgggtcttgctgtgccctcccaggcttagtgttccctccctcaaagactgacagccatcgttctgcacggggctttctgcatgtgacgccagctaagcatagtaagaagtccagcctaggaagggaaggattttggaggtaggtggctttggtgacacactcacttctttctcagcctccaggacactatggcctgttttaagagacatcttatttttctaaaggtgaattctcagatgataggtgaacctgagttgcagatataccaacttctgcttgtatttcttaaatgacaaagattacctagctaagaaacttcctagggaactagggaacctatgtgttccctcagtgtggtttcctgaagccagtgatatgggggttaggataggaagaactttctcggtaatgataaggagaatctcttgtttcctcccacctgtgttgtaaagataaactgacgatatacaggcacattatgtaaacatacacacgcaatgaaaccgaagcttggcggcctgggcgtggtcttgcaaaatgcttccaaagccaccttagcctgttctattcagcggcaaccccaaagcacctgttaagactcctgacccccaagtggcatgcagcccccatgcccaccgggacctggtcagcacagatcttgatgacttccctttctagggcagactgggagggtatccaggaatcggcccctgccccacgggcgttttcatgctgtacagtgacctaaagttggtaagatgtcataatggaccagtccatgtgatttcagtatatacaactccaccagacccctccaacccatataacaccccacccctgttcgcttcctgtatggtgatatcatatgtaacatttactcctgtttctgctgattgtttttttaatgttttggtttgtttttgacatcagctgtaatcattcctgtgctgtgttttttattacccttggtaggtattagacttgcacttttttaaaaaaaggtttctgcatcgtggaagcatttgacccagagtggaacgcgtggcctatgcaggtggattccttcaggtctttcctttggttctttgagcatctttgctttcattcgtctcccgtctttggttctccagttcaaattattgcaaagtaaaggatctttgagtaggttcggtctgaaaggtgtggcctttatatttgatccacacacgttggtcttttaaccgtgctgagcagaaaacaaaacaggttaagaagagccgggtggcagctgacagaggaagccgctcaaataccttcacaataaatagtggcaatatatatatagtttaagaaggctctccatttggcatcgtttaatttatatgttatgttctaagcacagctctcttctcctattttcatcctgcaagcaactcaaaatatttaaaataaagtttacattgtagttattttcaaatctttgcttgataagtattaagaaatattggacttgctgccgtaatttaaagctctgttgattttgtttccgtttggatttttgggggaggggagcactgtgtttatgctggaatatgaagtctgagaccttccggtgctgggaacacacaagagttgttgaaagttgacaagcagactgcgcatgtctctgatgctttgtatcattcttgagcaatcgctcggtccgtggacaataaacagtattatcaaagagaaaaacaaaaaaaaaacaaacaaaaaaaaaaaaaaatgtgtgtcggcgcgcgcgccncgggcccctggaaaaagnttttaaagaacaatcgggtggggccgccgcggggccccaatagggaaagggaaacggggccaaagcgggntcccaagaggaaaaccggggcaaagaaaanggngcnggggnttncncccacattnaaaaaacggccgggggggaaacccga

SEQ ID NO: 452638 - DNA, 3637 bp, Homo sapiens
cgcagcaaacacatccgtagaaggcagcgcggccgccgagagccgcagcgccgctcgcccgccgccccccaccccgccgccccgcccggcgaattgcgccccgcgcccctcccctcgcgcccccgagacaaagaggagagaaagtttgcgcggccgagcggggcaggtgaggagggtgagccgcgcgggaggggcccgcctcggccccggctcagcccccgcccgcgcccccagcccgccgccgcgagcagcgcccggaccccccagcggcggcccccgcccgcccagccccccggcccgccatgggcgccgcggcccgcaccctgcggctggcgctcggcctcctgctgctggcgacgctgcttcgcccggccgacgcctgcagctgctccccggtgcacccgcaacaggcgttttgcaatgcagatgtagtgatcagggccaaagcggtcagtgagaaggaagtggactctggaaacgacatttatggcaaccctatcaagaggatccagtatgagatcaagcagataaagatgttcaaagggcctgagaaggatatagagtttatctacacggccccctcctcggcagtgtgtggggtctcgctggacgttggaggaaagaaggaatatctcattgcaggaaaggccgagggggacggcaagatgcacatcaccctctgtgacttcatcgtgccctgggacaccctgagcaccacccagaagaagagcctgaaccacaggtaccagatgggctgcgagtgcaagatcacgcgctgccccatgatcccgtgctacatctcctccccggacgagtgcctctggatggactgggtcacagagaagaacatcaacgggcaccaggccaagttcttcgcctgcatcaagagaagtgacggctcctgtgcgtggtaccgcggcgcggcgccccccaagcaggagtttctcgacatcgaggacccataagcaggcctccaacgcccctgtggccaactgcaaaaaaagcctccaagggtttcgactggtccagctctgacatcccttcctggaaacagcatgaataaaacactcatcccatgggtccaaattaatatgattctgctccccccttctccttttagacatggttgtgggtctggagggagacgtgggtccaaggtcctcatcccatcctccctctgccaggcactatgtgtctggggcttcgatccttgggtgcaggcagggctgggacacgcggcttccctcccagtccctgccttggcaccgtcacagatgccaagcaggcagcacttagggatctcccagctgggttagggcagggcctggaaatgtgcattttgcagaaacttttgagggtcgttgcaagactgtgtagcaggcctaccaggtccctttcatcttgagagggacatggcccttgttttctgcagcttccacgcctctgcactccctgcccctggcaagtgctcccatcgccccggtgcccaccatgagctcccagcacctgactccccccacatccaagggcagcctggaaccagtggctagttcttgaaggagccccatcaatcctattaatcctcagaattccagtgggagcctccctctgagccttgtagaaatgggagcgagaaaccccagctgagctgcgttccagcctcagctgagtctttttggtctgcaccccacccccccaccctccccccccgcccacatgctccccagcttgcaggaggaatcggtgaggtcctgtcctgaggctgctgtccggggccggtggctgccctcaaggtcccttccctagctgctgcggttgccattgcttcttgcctgttctggcatcaggcacctggattgagttgcacagctttgctttatccgggcttgtgtgcagggcccggctgggctccccatctgcacatcctgaggacagaaaaagctgggtcttgctgtgccctcccaggcttagtgttccctccctcaaagactgacagccatcgttctgcacggggctttctgcatgtgacgccagctaagcatagtaagaagtccagcctaggaagggaaggattttggaggtaggtggctttggtgacacactcacttctttctcagcctccaggacactatggcctgttttaagagacatcttatttttctaaaggtgaattctcagatgataggtgaacctgagttgcagatataccaacttctgcttgtatttcttaaatgacaaagattacctagctaagaaacttcctagggaactagggaacctatgtgttccctcagtgtggtttcctgaagccagtgatatgggggttaggataggaagaactttctcggtaatgataaggagaatctcttgtttcctcccacctgtgttgtaaagataaactgacgatatacaggcacattatgtaaacatacacacgcaatgaaaccgaagcttggcggcctgggcgtggtcttgcaaaatgcttccaaagccaccttagcctgttctattcagcggcaaccccaaagcacctgttaagactcctgacccccaagtggcatgcagcccccatgcccaccgggacctggtcagcacagatcttgatgacttccctttctagggcagactgggagggtatccaggaatcggcccctgccccacgggcgttttcatgctgtacagtgacctaaagttggtaagatgtcataatggaccagtccatgtgatttcagtatatacaactccaccagacccctccaacccatataacaccccacccctgttcgcttcctgtatggtgatatcatatgtaacatttactcctgtttctgctgattgtttttttaatgttttggtttgtttttgacatcagctgtaatcattcctgtgctgtgttttttattacccttggtaggtattagacttgcacttttttaaaaaaaggtttctgcatcgtggaagcatttgacccagagtggaacgcgtggcctatgcaggtggattccttcaggtctttcctttggttctttgagcatctttgctttcattcgtctcccgtctttggttctccagttcaaattattgcaaagtaaaggatctttgagtaggttcggtctgaaaggtgtggcctttatatttgatccacacacgttggtcttttaaccgtgctgagcagaaaacaaaacaggttaagaagagccgggtggcagctgacagaggaagccgctcaaataccttcacaataaatagtggcaatatatatatagtttaagaaggctctccatttggcatcgtttaatttatatgttatgttctaagcacagctctcttctcctattttcatcctgcaagcaactcaaaatatttaaaataaagtttacattgtagttattttcaaatctttgcttgataagtattaagaaatattggacttgctgccgtaatttaaagctctgttgattttgtttccgtttggatttttgggggaggggagcactgtgtttatgtccacggaccgagcgattgctcaagaatgatacaaagcatcagagacatgcgcagtctgcttgtcaactttcaacaactcttgtgtgttcccagcaccggaaggtctcagacttcatattccactcgtgcc

SEQ ID NO: 452639 - DNA, 3105 bp, Homo sapiens
cgcagcaaacacatccgtagaaggcagcgcggccgccgagagccgcagcgccgctcgcccgccgccccccaccccgccgccccgcccggcgaattgcgccccgcgcccctcccctcgcgcccccgagacaaagaggagagaaagtttgcgcggccgagcggggcaggtgaggagggtgagccgcgcgggaggggcccgcctcggccccggctcagcccccgcccgcgcccccagcccgccgccgcgagcagcgcccggaccccccagcggcggcccccgcccgcccagccccccggcccgccatgggcgccgcggcccgcaccctgcggctggcgctcggcctcctgctgctggcgacgctgcttcgcccggccgacgcctgcagctgctccccggtgcacccgcaacaggcgttttgcaatgcagatgtagtgatcagggccaaagcggtcagtgagaaggaagtggactctggaaacgacatttatggcaaccctatcaagaggatccagtatgagatcaagcagataaagatgttcaaagggcctgagaaggatatagagtttatctacacggccccctcctcggcagtgtgtggggtctcgctggacgttggaggaaagaaggaatatctcattgcaggaaaggccgagggggacggcaagatgcacatcaccctctgtgacttcatcgtgccctgggacaccctgagcaccacccagaagaagagcctgaaccacaggtaccagatgggctgcgagtgcaagatcacgcgctgccccatgatcccgtgctacatctcctccccggacgagtgcctctggatggactgggtcacagagaagaacatcaacgggcaccaggccaagttcttcgcctgcatcaagagaagtgacggctcctgtgcgtggtaccgcggcgcggcgccccccaagcaggagtttctcgacatcgaggacccataagcaggcctccaacgcccctgtggccaactgcaaaaaaagcctccaagggtttcgactggtccagctctgacatcccttcctggaaacagcatgaataaaacactcatcccatgggtccaaattaatatgattctgctccccccttctccttttagacatggttgtgggtctggagggagacgtgggtccaaggtcctcatcccatcctccctctgccaggcactatgtgtctggggcttcgatccttgggtgcaggcagggctgggacacgcggcttccctcccagtccctgccttggcaccgtcacagatgccaagcaggcagcacttagggatctcccagctgggttagggcagggcctggaaatgtgcattttgcagaaacttttgagggtcgttgcaagactgtgtagcaggcctaccaggtccctttcatcttgagagggacatggcccttgttttctgcagcttccacgcctctgcactccctgcccctggcaagtgctcccatcgccccggtgcccaccatgagctcccagcacctgactccccccacatccaagggcagcctggaaccagtggctagttcttgaaggagccccatcaatcctattaatcctcagaattccagtgggagcctccctctgagccttgtagaaatgggagcgagaaaccccagctgagctgcgttccagcctcagctgagtctttttggtctgcaccccacccccccaccctccccccccgcccacatgctccccagcttgcaggaggaatcggtgaggtcctgtcctgaggctgctgtccggggccggtggctgccctcaaggtcccttccctagctgctgcggttgccattgcttcttgcctgttctggcatcaggcacctggattgagttgcacagctttgctttatccgggcttgtgtgcagggcccggctgggctccccatctgcacatcctgaggacagaaaaagctgggtcttgctgtgccctcccaggcttagtgttccctccctcaaagactgacagccatcgttctgcacggggctttctgcatgtgacgccagctaagcatagtaagaagtccagcctaggaagggaaggattttggaggtaggtggctttggtgacacactcacttctttctcagcctccaggacactatggcctgttttaagagacatcttatttttctaaaggtgaattctcagatgataggtgaacctgagttgcagatataccaacttctgcttgtatttcttaaatgacaaagattacctagctaagaaacttcctagggaactagggaacctatgtgttccctcagtgtggtttcctgaagccagtgatatgggggttaggataggaagaactttctcggtaatgataaggagaatctcttgtttcctcccacctgtgttgtaaagataaactgacgatatacaggcacattatgtaaacatacacacgcaatgaaaccgaagcttggcggcctgggcgtggtcttgcaaaatgcttccaaagccaccttagcctgttctattcagcggcaaccccaaagcacctgttaagactcctgacccccaagtggcatgcagcccccatgcccaccgggacctggtcagcacagatcttgatgacttccctttctagggcagactgggagggtatccaggaatcggcccctgccccacgggcgttttcatgctgtacagtgacctaaagttggtaagatgtcataatggaccagtccatgtgatttcagtatatacaactccaccagacccctccaacccatataacaccccacccctgttcgcttcctgtatggtgatatcatatgtaacatttactcctgtttctgctgattgtttttttaatgttttggtttgtttttgacatcagctgtaatcattcctgtgctgtgttgcttgcttttttgtttttttagagatggggtcttgctatgttgcccaggctggtcttgaactcctgggctcaagtgatgctcccacctcaacctcccaaagcgctgggagtacaggcatgggccactgctcccaacctaccctgctttttttttcttttttttttttaataaagaatgtggtttatacccagttgatgaggaaaaactc

SEQ ID NO: 452640 - DNA, 2450 bp, Homo sapiens
cgcagcaaacacatccgtagaaggcagcgcggccgccgagagccgcagcgccgctcgcccgccgccccccaccccgccgccccgcccggcgaattgcgccccgcgcccctcccctcgcgcccccgagacaaagaggagagaaagtttgcgcggccgagcggggcaggtgaggagggtgagccgcgcgggaggggcccgcctcggccccggctcagcccccgcccgcgcccccagcccgccgccgcgagcagcgcccggaccccccagcggcggcccccgcccgcccagccccccggcccgccatgggcgccgcggcccgcaccctgcggctggcgctcggcctcctgctgctggcgacgctgcttcgcccggccgacgcctgcagctgctccccggtgcacccgcaacaggcgttttgcaatgcagatgtagtgatcagggccaaagcggtcagtgagaaggaagtggactctggaaacgacatttatggcaaccctatcaagaggatccagtatgagatcaagcagataaagatgttcaaagggcctgagaaggatatagagtttatctacacggccccctcctcggcagtgtgtggggtctcgctggacgttggaggaaagaaggaatatctcattgcaggaaaggccgagggggacggcaagatgcacatcaccctctgtgacttcatcgtgccctgggacaccctgagcaccacccagaagaagagcctgaaccacaggtaccagatgggctgcgagtgcaagatcacgcgctgccccatgatcccgtgctacatctcctccccggacgagtgcctctggatggactgggtcacagagaagaacatcaacgggcaccaggccaagttcttcgcctgcatcaagagaagtgacggctcctgtgcgtggtaccgcggcgcggcgccccccaagcaggagtttctcgacatcgaggacccataagcaggcctccaacgcccctgtggccaactgcaaaaaaagcctccaagggtttcgactggtccagctctgacatcccttcctggaaacagcatgaataaaacactcatcccatgggtccaaattaatatgattctgctccccccttctccttttagacatggttgtgggtctggagggagacgtgggtccaaggtcctcatcccatcctccctctgccaggcactatgtgtctggggcttcgatccttgggtgcaggcagggctgggacacgcggcttccctcccagtccctgccttggcaccgtcacagatgccaagcaggcagcacttagggatctcccagctgggttagggcagggcctggaaatgtgcattttgcagaaacttttgagggtcgttgcaagactgtgtagcaggcctaccaggtccctttcatcttgagagggacatggcccttgttttctgcagcttccacgcctctgcactccctgcccctggcaagtgctcccatcgccccggtgcccaccatgagctcccagcacctgactccccccacatccaagggcagcctggaaccagtggctagttcttgaaggagccccatcaatcctattaatcctcagaattccagtgggagcctccctctgagccttgtagaaatgggagcgagaaaccccagctgagctgcgttccagcctcagctgagtctttttggtctgcaccccacccccccaccctccccccccgcccacatgctccccagcttgcaggaggaatcggtgaggtcctgtcctgaggctgctgtccggggccggtggctgccctcaaggtcccttccctagctgctgcggttgccattgcttcttgcctgttctggcatcaggcacctggattgagttgcacagctttgctttatccgggcttgtgtgcagggcccggctgggctccccatctgcacatcctgaggacagaaaaagctgggtcttgctgtgccctcccaggcttagtgttccctccctcaaagactgacagccatcgttctgcacggggctttctgcatgtgacgccagctaagcatagtaagaagtccagcctaggaagggaaggattttggaggtaggtggctttggtgacacactcacttctttctcagcctccaggacactatggcctgttttaagagacatcttatttttctaaaggtgaattctcagatgataggtgaacctgagttgcagatataccaacttctgcttgtatttcttaaatgacaaagattacctagctaagaaacttcctagggaactagggaacctatgtgttccctcagtgtggtttcctgaagccagtgatatgggggttaggataggaagaactttctcggtaatgagtaggtcgtagcggaatcgggggtatgatgttcgaattcataagaacaggaaggttaaaagtagggtcttggtgacaaaatatgtagtgtagagtt

SEQ ID NO: 452641 - DNA, 3697 bp, Homo sapiens
tcatgcttgtgttggtgtgatggtctctgtgggtgggtggatgctttgggcgttgaaatctagaaatcctgttgctcagtttctagatgaagtcatgagcaaggccatcagtggagctctggccccgcccccaatgtgcagaagggccgggagcaaggcctggagttttcatgtgttttcagacccaggtttaggtgctctcttctcactgaaataactaagtgctctccactggcatcgagccctttccacaagtttttaaggctcttaacccacactttcactcctctgctactagtcttcagtgttgttaacagcaagagaaaattgggtttgtttaaaaatctacttctctgaggtggcacagttgctagctgggactacaggtgtctgccgccacgcctggctaatttttttgtatttttagtagagacggggtttcaccatgttggtcaggatggtctcgatttcctgacctcgtgatccgcctgtctcggcctcccaaagtgctgggattacaggcgtgagccaccacgcctggcctataagatacggtaaaaaaaaaaaactgtgacccctttgtcactaagggagaaagaaattaagtattgtcaaagttctataaagaatggaaatgtatgatattatacttcaaaggaatttgatgttgaaattttaaagaaaatttgtcatgttgatgagaagcttcactttcctgggaacttcattcgttttagggcatgagataaaagtcctggctaggggagccataggtctgttgtacaaggaatttgctttctaaacaagttgtaacttgccctaaggtccctgttggagcactaagaggtgacacaggccagagacaacgtttcgtttccccttccctgcaagctgggatcagccctgtgttttctcctttcagctgaagtgagcgaaggttctcagtgctggcaaaagagcccactttctaaaaggacttgggaagaaagctgctgggaacttgcttattaaaaagttccttagaattaaggtatctacccactgttttcgcacctttcaccttcctgggctttcctgccctccagcattcttctctagagaggttcctagcccgctcagcgcgagcgtctccagtaggtaatagcagctgaacgtgggttttccacggacttcaggcttggaggtgccatatacaagcacacttcttccttcccctggcttctccatgccaccacccactttaaagatgtaaactcagtagatttttcatccagtgaacggtcatcttcacatcgaaaggtgaaggccaccactgttctcaatgccaagcaacagaacgttctgagatggccgttcttccttgcacagcagctacggcaggttgttctgcagccaccccttagagggggctcttcgttttacctttgtacagttcttgtgtttacacatttgggccaaacagctttcagcaagggcatgtgtccacagctgatgggcagttaagaaccagcctgagctgaaggctagtaataccgtgctgtaggctctttaaaaggaaagcctggcataaacccagcatggaaaggaacattatcagttatctcaaattttgtctgccagggacaagaccctgttcattcttttgcccttttcagaactgtgagcttcaagtattcttgcttctctgtaaagggaagacatctcccttctctgaaatccttcaacaaaagaaaaggctcttggcagggtaggggagtcagtagctcaacactagatcatccctagagatggggcaagtttctgtctgaacacgtcttgggtccgagtccttaggtgttcggatgcagtactttgtgaatacttaagctactgcatgcttggtgtagcttgcaatttctctgtatttaaaagcagctgtgtttattttcttcaaaataacctgtatattatttagagcaagcaatgtaaatattactgagaagttactgcagggatttttgtgacagagtttgtatgggtttttaaaaaaatcttagacacccctttttaagatggggagaacagggttgactgcaccgttgaagcccgcccagcattataaggaaatgtttttaatgactgctgcatctttgtaaaacgtttggtcatctaacagatggttttaaagtgtacaatatccaaaataacgatagccctgtatccatacattgtttcattgaaagaattctctattgcctcttcttggtagagccagagtccttaaggaaaatcaggaaaatgaagaaaatgatggtgccatcttgaccagacttctgcacagtaatttaacgctatcctagggagacttggttgaaggcacagttctgggatcagggtctaaatgtgcagtttctgagaaccttcaagaccactcactgggcagggctctgtggagcactggagctgtttggattccccagccctttggtcatatcctggaattccgtggaggctgcagaacttagatgcagctgttttttacagcacctatttttgtcagattggtaaggaaacactgagtcacagaatacttaagaattggagactccagtaatgtaggatggcctgagaggacgtccaagtcccaaggggtggacacggcatgttcctcgggcacagcctcagtgggggccttccccaggcgcagctcggccacctgaggaaagggtgtttcggaggcgcagccacacacacagcgctggcagcctcacggtcacgcccatcactccctgccccccactgcccttgagaagttagtggtgtcacatccttagttttatagacagctaggaatagattgtgaagaacactcagttcactactgtgttacatttatatcacaagcttcaattaaaatggattttaaaggattttaggatttacctttagtattaacaacgtatctactgacatactgttaggattcaaaaccagttaagtataagaattacttcatgtggttttcctagggtacaatttataaaaggtagaaagcatccaagtggctcctcaacaattacaattcttaatgatttttctcacagctgtgcccttctgtcagggtcagtgtcaaaattcgttatcaaaggcaaaacctactgtgccaagctggggcgctatatgtgaacggagtggaaatgcttcagtcacctctgccgcagcttgtgattccagcagttctcacaaaccttctgtcacatgatgaaaagaagcagcttgtataattccaactggtgtttcatttctgttctaatgctaagtggtaacgcttaacaaacagactaaaagctgtgtgcagaagaaagggctgaatgagtaccgcctccctaggttccagcacagcgctcgggtctaagaagtagagccccggggtagggtgggccatccactgtcaggccagtgtctcaagaaagcctgaccagctgagctgctgctttttttttgggggggggggggggaggggcgtcttgaggctttttttttttttacaaagttagtttgtgatcaacgattcactacaattgaagtgttactttgtcagaatatttattcctttgtgtgacatgctagattccctggatgtagctgatcatttttattttgtaaatattacctaactttacataaactatatcataataaactatttttgcatcac

SEQ ID NO: 452642 - DNA, 3581 bp, Homo sapiens
tgacacatcaacattaacttttcctgaaaagaagagtttgcctaacatggtcctaaagaagcttggaatttataagactttcctttataagatatagtgggggtttttttgggtggaggggggttgttttttgttttttgttttcaagacagagtctcgctctgttgtccaggctggagtgtagtggcatgatctcggctcactgcaacctctgcctcccaggttcatgccattctcctgcctcagcctcccgagtagctgggactacaggtgtctgccgccacgcctggctaatttttttgtatttttagtagagacggggtttcaccatgttggtcaggatggtctcgatttcctgacctcgtgatccgcctgtctcggcctcccaaagtgctgggattacaggcgtgagccaccacgcctggcctataagatacggtaaaaaaaaaaaactgtgacccctttgtcactaagggagaaagaaattaagtattgtcaaagttctataaagaatggaaatgtatgatattatacttcaaaggaatttgatgttgaaattttaaagaaaatttgtcatgttgatgagaagcttcactttcctgggaacttcattcgttttagggcatgagataaaagtcctggctaggggagccataggtctgttgtacaaggaatttgctttctaaacaagttgtaacttgccctaaggtccctgttggagcactaagaggtgacacaggccagagacaacgtttcgtttccccttccctgcaagctgggatcagccctgtgttttctcctttcagctgaagtgagcgaaggttctcagtgctggcaaaagagcccactttctaaaaggacttgggaagaaagctgctgggaacttgcttattaaaaagttccttagaattaaggtatctacccactgttttcgcacctttcaccttcctgggctttcctgccctccagcattcttctctagagaggttcctagcccgctcagcgcgagcgtctccagtaggtaatagcagctgaacgtgggttttccacggacttcaggcttggaggtgccatatacaagcacacttcttccttcccctggcttctccatgccaccacccactttaaagatgtaaactcagtagatttttcatccagtgaacggtcatcttcacatcgaaaggtgaaggccaccactgttctcaatgccaagcaacagaacgttctgagatggccgttcttccttgcacagcagctacggcaggttgttctgcagccaccccttagagggggctcttcgttttacctttgtacagttcttgtgtttacacatttgggccaaacagctttcagcaagggcatgtgtccacagctgatgggcagttaagaaccagcctgagctgaaggctagtaataccgtgctgtaggctctttaaaaggaaagcctggcataaacccagcatggaaaggaacattatcagttatctcaaattttgtctgccagggacaagaccctgttcattcttttgcccttttcagaactgtgagcttcaagtattcttgcttctctgtaaagggaagacatctcccttctctgaaatccttcaacaaaagaaaaggctcttggcagggtaggggagtcagtagctcaacactagatcatccctagagatggggcaagtttctgtctgaacacgtcttgggtccgagtccttaggtgttcggatgcagtactttgtgaatacttaagctactgcatgcttggtgtagcttgcaatttctctgtatttaaaagcagctgtgtttattttcttcaaaataacctgtatattatttagagcaagcaatgtaaatattactgagaagttactgcagggatttttgtgacagagtttgtatgggtttttaaaaaaatcttagacacccctttttaagatggggagaacagggttgactgcaccgttgaagcccgcccagcattataaggaaatgtttttaatgactgctgcatctttgtaaaacgtttggtcatctaacagatggttttaaagtgtacaatatccaaaataacgatagccctgtatccatacattgtttcattgaaagaattctctattgcctcttcttggtagagccagagtccttaaggaaaatcaggaaaatgaagaaaatgatggtgccatcttgaccagacttctgcacagtaatttaacgctatcctagggagacttggttgaaggcacagttctgggatcagggtctaaatgtgcagtttctgagaaccttcaagaccactcactgggcagggctctgtggagcactggagctgtttggattccccagccctttggtcatatcctggaattccgtggaggctgcagaacttagatgcagctgttttttacagcacctatttttgtcagattggtaaggaaacactgagtcacagaatacttaagaattggagactccagtaatgtaggatggcctgagaggacgtccaagtcccaaggggtggacacggcatgttcctcgggcacagcctcagtgggggccttccccaggcgcagctcggccacctgaggaaagggtgtttcggaggcgcagccacacacacagcgctggcagcctcacggtcacgcccatcactccctgccccccactgcccttgagaagttagtggtgtcacatccttagttttatagacagctaggaatagattgtgaagaacactcagttcactactgtgttacatttatatcacaagcttcaattaaaatggattttaaaggattttaggatttacctttagtattaacaacgtatctactgacatactgttaggattcaaaaccagttaagtataagaattacttcatgtggttttcctagggtacaatttataaaaggtagaaagcatccaagtggctcctcaacaattacaattcttaatgatttttctcacagctgtgcccttctgtcagggtcagtgtcaaaattcgttatcaaaggcaaaacctactgtgccaagctggggcgctatatgtgaacggagtggaaatgcttcagtcacctctgccgcagcttgtgattccagcagttctcacaaaccttctgtcacatgatgaaaagaagcagcttgtataattccaactggtgtttcatttctgttctaatgctaagtggtaacgcttaacaaacagactaaaagctgtgtgcagaagaaagggctgaatgagtaccgcctccctaggttccagcacagcgctcgggtctaagaagtagagccccggggtagggtgggccatccactgtcaggccagtgtctcaagaaagcctgaccagctgagctgctgctttttttttgggggggggggggggaggggcgtcttgaggctttttttttttttacaaagttagtttgtgatcaacgattcactacaattgaagtgttactttgtcagaatatttattcctttgtgtgacatgctagattccctggatgtagctgatcatttttattttgtaaatattacctaactttacataaactatatcataataaactatttttgcatcac

SEQ ID NO: 452643 - DNA, 3832 bp, Homo sapiens
tcatgcttgtgttggtgtgatggtctctgtgggtgggtggatgctttgggcgttgaaatctagaaatcctgttgctcagtttctagatgaagtcatgagcaaggccatcagtggagctctggccccgcccccaatgtgcagaagggccgggagcaaggcctggagttttcatgtgttttcagacccaggtttaggtgctctcttctcactgaaataactaagtgctctccactggcatcgagccctttccacaagtttttaaggctcttaacccacactttcactcctctgctactagtcttcagtgttgttaacagcaagagaaaattgggtttgtttaaaaatctacttctctgaggtggcacagttgcgtagctgtagtcccagctactcaggaggctgaggtagtaggattgcttgagcccgggagtgtagtggcatgatctcggctcactgcaacctctgcctcccaggttcatgccattctcctgcctcagcctcccgagtagctgggactacaggtgtctgccgccacgcctggctaatttttttgtatttttagtagagacggggtttcaccatgttggtcaggatggtctcgatttcctgacctcgtgatccgcctgtctcggcctcccaaagtgctgggattacaggcgtgagccaccacgcctggcctataagatacggtaaaaaaaaaaaactgtgacccctttgtcactaagggagaaagaaattaagtattgtcaaagttctataaagaatggaaatgtatgatattatacttcaaaggaatttgatgttgaaattttaaagaaaatttgtcatgttgatgagaagcttcactttcctgggaacttcattcgttttagggcatgagataaaagtcctggctaggggagccataggtctgttgtacaaggaatttgctttctaaacaagttgtaacttgccctaaggtccctgttggagcactaagaggtgacacaggccagagacaacgtttcgtttccccttccctgcaagctgggatcagccctgtgttttctcctttcagctgaagtgagcgaaggttctcagtgctggcaaaagagcccactttctaaaaggacttgggaagaaagctgctgggaacttgcttattaaaaagttccttagaattaaggtatctacccactgttttcgcacctttcaccttcctgggctttcctgccctccagcattcttctctagagaggttcctagcccgctcagcgcgagcgtctccagtaggtaatagcagctgaacgtgggttttccacggacttcaggcttggaggtgccatatacaagcacacttcttccttcccctggcttctccatgccaccacccactttaaagatgtaaactcagtagatttttcatccagtgaacggtcatcttcacatcgaaaggtgaaggccaccactgttctcaatgccaagcaacagaacgttctgagatggccgttcttccttgcacagcagctacggcaggttgttctgcagccaccccttagagggggctcttcgttttacctttgtacagttcttgtgtttacacatttgggccaaacagctttcagcaagggcatgtgtccacagctgatgggcagttaagaaccagcctgagctgaaggctagtaataccgtgctgtaggctctttaaaaggaaagcctggcataaacccagcatggaaaggaacattatcagttatctcaaattttgtctgccagggacaagaccctgttcattcttttgcccttttcagaactgtgagcttcaagtattcttgcttctctgtaaagggaagacatctcccttctctgaaatccttcaacaaaagaaaaggctcttggcagggtaggggagtcagtagctcaacactagatcatccctagagatggggcaagtttctgtctgaacacgtcttgggtccgagtccttaggtgttcggatgcagtactttgtgaatacttaagctactgcatgcttggtgtagcttgcaatttctctgtatttaaaagcagctgtgtttattttcttcaaaataacctgtatattatttagagcaagcaatgtaaatattactgagaagttactgcagggatttttgtgacagagtttgtatgggtttttaaaaaaatcttagacacccctttttaagatggggagaacagggttgactgcaccgttgaagcccgcccagcattataaggaaatgtttttaatgactgctgcatctttgtaaaacgtttggtcatctaacagatggttttaaagtgtacaatatccaaaataacgatagccctgtatccatacattgtttcattgaaagaattctctattgcctcttcttggtagagccagagtccttaaggaaaatcaggaaaatgaagaaaatgatggtgccatcttgaccagacttctgcacagtaatttaacgctatcctagggagacttggttgaaggcacagttctgggatcagggtctaaatgtgcagtttctgagaaccttcaagaccactcactgggcagggctctgtggagcactggagctgtttggattccccagccctttggtcatatcctggaattccgtggaggctgcagaacttagatgcagctgttttttacagcacctatttttgtcagattggtaaggaaacactgagtcacagaatacttaagaattggagactccagtaatgtaggatggcctgagaggacgtccaagtcccaaggggtggacacggcatgttcctcgggcacagcctcagtgggggccttccccaggcgcagctcggccacctgaggaaagggtgtttcggaggcgcagccacacacacagcgctggcagcctcacggtcacgcccatcactccctgccccccactgcccttgagaagttagtggtgtcacatccttagttttatagacagctaggaatagattgtgaagaacactcagttcactactgtgttacatttatatcacaagcttcaattaaaatggattttaaaggattttaggatttacctttagtattaacaacgtatctactgacatactgttaggattcaaaaccagttaagtataagaattacttcatgtggttttcctagggtacaatttataaaaggtagaaagcatccaagtggctcctcaacaattacaattcttaatgatttttctcacagctgtgcccttctgtcagggtcagtgtcaaaattcgttatcaaaggcaaaacctactgtgccaagctggggcgctatatgtgaacggagtggaaatgcttcagtcacctctgccgcagcttgtgattccagcagttctcacaaaccttctgtcacatgatgaaaagaagcagcttgtataattccaactggtgtttcatttctgttctaatgctaagtggtaacgcttaacaaacagactaaaagctgtgtgcagaagaaagggctgaatgagtaccgcctccctaggttccagcacagcgctcgggtctaagaagtagagccccggggtagggtgggccatccactgtcaggccagtgtctcaagaaagcctgaccagctgagctgctgctttttttttgggggggggggggggaggggcgtcttgaggctttttttttttttacaaagttagtttgtgatcaacgattcactacaattgaagtgttactttgtcagaatatttattcctttgtgtgacatgctagattccctggatgtagctgatcatttttattttgtaaatattacctaactttacataaactatatcataataaactatttttgcatcac

SEQ ID NO: 452644 - DNA, 1907 bp, Homo sapiens
gtctcgcaccccgacgtggcttgtcttgggtccgagtccttaggtgttcggatgcagtactttgtgaatacttaagctactgcatgcttggtgtagcttgcaatttctctgtatttaaaagcagctgtgtttattttcttcaaaataacctgtatattatttagagcaagcaatgtaaatattactgagaagttactgcagggatttttgtgacagagtttgtatgggtttttaaaaaaatcttagacacccctttttaagatggggagaacagggttgactgcaccgttgaagcccgcccagcattataaggaaatgtttttaatgactgctgcatctttgtaaaacgtttggtcatctaacagatggttttaaagtgtacaatatccaaaataacgatagccctgtatccatacattgtttcattgaaagaattctctattgcctcttcttggtagagccagagtccttaaggaaaatcaggaaaatgaagaaaatgatggtgccatcttgaccagacttctgcacagtaatttaacgctatcctagggagacttggttgaaggcacagttctgggatcagggtctaaatgtgcagtttctgagaaccttcaagaccactcactgggcagggctctgtggagcactggagctgtttggattccccagccctttggtcatatcctggaattccgtggaggctgcagaacttagatgcagctgttttttacagcacctatttttgtcagattggtaaggaaacactgagtcacagaatacttaagaattggagactccagtaatgtaggatggcctgagaggacgtccaagtcccaaggggtggacacggcatgttcctcgggcacagcctcagtgggggccttccccaggcgcagctcggccacctgaggaaagggtgtttcggaggcgcagccacacacacagcgctggcagcctcacggtcacgcccatcactccctgccccccactgcccttgagaagttagtggtgtcacatccttagttttatagacagctaggaatagattgtgaagaacactcagttcactactgtgttacatttatatcacaagcttcaattaaaatggattttaaaggattttaggatttacctttagtattaacaacgtatctactgacatactgttaggattcaaaaccagttaagtataagaattacttcatgtggttttcctagggtacaatttataaaaggtagaaagcatccaagtggctcctcaacaattacaattcttaatgatttttctcacagctgtgcccttctgtcagggtcagtgtcaaaattcgttatcaaaggcaaaacctactgtgccaagctggggcgctatatgtgaacggagtggaaatgcttcagtcacctctgccgcagcttgtgattccagcagttctcacaaaccttctgtcacatgatgaaaagaagcagcttgtataattccaactggtgtttcatttctgttctaatgctaagtggtaacgcttaacaaacagactaaaagctgtgtgcagaagaaagggctgaatgagtaccgcctccctaggttccagcacagcgctcgggtctaagaagtagagccccggggtagggtgggccatccactgtcaggccagtgtctcaagaaagcctgaccagctgagctgctgctttttttttgggggggggggggggaggggcgtcttgaggctttttttttttttacaaagttagtttgtgatcaacgattcactacaattgaagtgttactttgtcagaatatttattcctttgtgtgacatgctagattccctggatgtagctgatcatttttattttgtaaatattacctaactttacataaactatatcataataaactatttttgcatcac

SEQ ID NO: 452645 - DNA, 1582 bp, Homo sapiens
tctgactctagaggttaccaactacacagctattcccagcaactatagcagctatccaagggagacttggtttgaaaggcacagttctgggatcagggtctaaatgtgcagtttctgagaaccttcaagaccactcactgggcagggctctgtggagcactggagaagaaaatgatggtgccatcttgaccagacttctgcacagtaatttaacgctatcctagggagacttggttgaaggcacagttctgggatcagggtctaaatgtgcagtttctgagaaccttcaagaccactcactgggcagggctctgtggagcactggagctgtttggattccccagccctttggtcatatcctggaattccgtggaggctgcagaacttagatgcagctgttttttacagcacctatttttgtcagattggtaaggaaacactgagtcacagaatacttaagaattggagactccagtaatgtaggatggcctgagaggacgtccaagtcccaaggggtggacacggcatgttcctcgggcacagcctcagtgggggccttccccaggcgcagctcggccacctgaggaaagggtgtttcggaggcgcagccacacacacagcgctggcagcctcacggtcacgcccatcactccctgccccccactgcccttgagaagttagtggtgtcacatccttagttttatagacagctaggaatagattgtgaagaacactcagttcactactgtgttacatttatatcacaagcttcaattaaaatggattttaaaggattttaggatttacctttagtattaacaacgtatctactgacatactgttaggattcaaaaccagttaagtataagaattacttcatgtggttttcctagggtacaatttataaaaggtagaaagcatccaagtggctcctcaacaattacaattcttaatgatttttctcacagctgtgcccttctgtcagggtcagtgtcaaaattcgttatcaaaggcaaaacctactgtgccaagctggggcgctatatgtgaacggagtggaaatgcttcagtcacctctgccgcagcttgtgattccagcagttctcacaaaccttctgtcacatgatgaaaagaagcagcttgtataattccaactggtgtttcatttctgttctaatgctaagtggtaacgcttaacaaacagactaaaagctgtgtgcagaagaaagggctgaatgagtaccgcctccctaggttccagcacagcgctcgggtctaagaagtagagccccggggtagggtgggccatccactgtcaggccagtgtctcaagaaagcctgaccagctgagctgctgctttttttttgggggggggggggggaggggcgtcttgaggctttttttttttttacaaagttagtttgtgatcaacgattcactacaattgaagtgttactttgtcagaatatttattcctttgtgtgacatgctagattccctggatgtagctgatcatttttattttgtaaatattacctaactttacataaactatatcataataaactatttttgcatcac

SEQ ID NO: 452646 - DNA, 3643 bp, Homo sapiens
tcatgcttgtgttggtgtgatggtctctgtgggtgggtggatgctttgggcgttgaaatctagaaatcctgttgctcagtttctagatgaagtcatgagcaaggccatcagtggagctctggccccgcccccaatgtgcagaagggccgggagcaaggcctggagttttcatgtgttttcagacccaggtttaggtgctctcttctcactgaaataactaagtgctctccactggcatcgagccctttccacaagtttttaaggctcttaacccacactttcactcctctgctactagtcttcagtgttgttaacagcaagagaaaattgggtttgtttaaaaatctacttctctgaggtggcacagttgctagctgggactacaggtgtctgccgccacgcctggctaatttttttgtatttttagtagagacggggtttcaccatgttggtcaggatggtctcgatttcctgacctcgtgatccgcctgtctcggcctcccaaagtgctgggattacaggcgtgagccaccacgcctggcctataagatacggtaaaaaaaaaaaactgtgacccctttgtcactaagggagaaagaaattaagtattgtcaaagttctataaagaatggaaatgtatgatattatacttcaaaggaatttgatgttgaaattttaaagaaaatttgtcatgttgatgagaagcttcactttcctgggaacttcattcgttttagggcatgagataaaagtcctggctaggggagccataggtctgttgtacaaggaatttgctttctaaacaagttgtaacttgccctaaggtccctgttggagcactaagaggtgacacaggccagagacaacgtttcgtttccccttccctgcaagctgggatcagccctgtgttttctcctttcagctgaagtgagcgaaggttctcagtgctggcaaaagagcccactttctaaaaggacttgggaagaaagctgctgggaacttgcttattaaaaagttccttagaattaaggtatctacccactgttttcgcacctttcaccttcctgggctttcctgccctccagcattcttctctagagaggttcctagcccgctcagcgcgagcgtctccagtaggtaatagcagctgaacgtgggttttccacggacttcaggcttggaggtgccatatacaagcacacttcttccttcccctggcttctccatgccaccacccactttaaagatgtaaactcagtagatttttcatccagtgaacggtcatcttcacatcgaaaggtgaaggccaccactgttctcaatgccaagcaacagaacgttctgagatggccgttcttccttgcacagcagctacggcaggttgttctgcagccaccccttagagggggctcttcgttttacctttgtacagttcttgtgtttacacatttgggccaaacagctttcagcaagggcatgtgtccacagctgatgggcagttaagaaccagcctgagctgaaggctagtaataccgtgctgtaggctctttaaaaggaaagcctggcataaacccagcatggaaaggaacattatcagttatctcaaattttgtctgccagggacaagaccctgttcattcttttgcccttttcagaactgtgagcttcaagtattcttgcttctctgtaaagggaagacatctcccttctctgaaatccttcaacaaaagaaaaggctcttggcagggtaggggagtcagtagctcaacactagatcatccctagagatggggcaagtttctgtctgaacacgtcttgggtccgagtccttaggtgttcggatgcagtactttgtgaatacttaagctactgcatgcttggtgtagcttgcaatttctctgtatttaaaagcagctgtgtttattttcttcaaaataacctgtatattatttagagcaagcaatgtaaatattactgagaagttactgcagggatttttgtgacagagtttgtatgggtttttaaaaaaatcttagacacccctttttaagatggggagaacagggttgactgcaccgttgaagcccgcccagcattataaggaaatgtttttaatgactgctgcatctttgtaaaacgtttggtcatctaacagatggttttaaagtgtacaatatccaaaataacgatagccctgtatccatacattgtttcattgaaagaattctctattgcctcttcttggtagagccagagtccttaaggaaaatcaggaaaatgaagaaggagacttggttgaaggcacagttctgggatcagggtctaaatgtgcagtttctgagaaccttcaagaccactcactgggcagggctctgtggagcactggagctgtttggattccccagccctttggtcatatcctggaattccgtggaggctgcagaacttagatgcagctgttttttacagcacctatttttgtcagattggtaaggaaacactgagtcacagaatacttaagaattggagactccagtaatgtaggatggcctgagaggacgtccaagtcccaaggggtggacacggcatgttcctcgggcacagcctcagtgggggccttccccaggcgcagctcggccacctgaggaaagggtgtttcggaggcgcagccacacacacagcgctggcagcctcacggtcacgcccatcactccctgccccccactgcccttgagaagttagtggtgtcacatccttagttttatagacagctaggaatagattgtgaagaacactcagttcactactgtgttacatttatatcacaagcttcaattaaaatggattttaaaggattttaggatttacctttagtattaacaacgtatctactgacatactgttaggattcaaaaccagttaagtataagaattacttcatgtggttttcctagggtacaatttataaaaggtagaaagcatccaagtggctcctcaacaattacaattcttaatgatttttctcacagctgtgcccttctgtcagggtcagtgtcaaaattcgttatcaaaggcaaaacctactgtgccaagctggggcgctatatgtgaacggagtggaaatgcttcagtcacctctgccgcagcttgtgattccagcagttctcacaaaccttctgtcacatgatgaaaagaagcagcttgtataattccaactggtgtttcatttctgttctaatgctaagtggtaacgcttaacaaacagactaaaagctgtgtgcagaagaaagggctgaatgagtaccgcctccctaggttccagcacagcgctcgggtctaagaagtagagccccggggtagggtgggccatccactgtcaggccagtgtctcaagaaagcctgaccagctgagctgctgctttttttttgggggggggggggggaggggcgtcttgaggctttttttttttttacaaagttagtttgtgatcaacgattcactacaattgaagtgttactttgtcagaatatttattcctttgtgtgacatgctagattccctggatgtagctgatcatttttattttgtaaatattacctaactttacataaactatatcataataaactatttttgcatcac

SEQ ID NO: 452647 - DNA, 3728 bp, Homo sapiens
  misc_feature (2965)..(2965): n is a, c, g, or t
  misc_feature (2969)..(2971): n is a, c, g, or t
  misc_feature (3012)..(3013): n is a, c, g, or t
  misc_feature (3023)..(3023): n is a, c, g, or t
  misc_feature (3029)..(3029): n is a, c, g, or t
tcatgcttgtgttggtgtgatggtctctgtgggtgggtggatgctttgggcgttgaaatctagaaatcctgttgctcagtttctagatgaagtcatgagcaaggccatcagtggagctctggccccgcccccaatgtgcagaagggccgggagcaaggcctggagttttcatgtgttttcagacccaggtttaggtgctctcttctcactgaaataactaagtgctctccactggcatcgagccctttccacaagtttttaaggctcttaacccacactttcactcctctgctactagtcttcagtgttgttaacagcaagagaaaattgggtttgtttaaaaatctacttctctgaggtggcacagttgctagctgggactacaggtgtctgccgccacgcctggctaatttttttgtatttttagtagagacggggtttcaccatgttggtcaggatggtctcgatttcctgacctcgtgatccgcctgtctcggcctcccaaagtgctgggattacaggcgtgagccaccacgcctggcctataagatacggtaaaaaaaaaaaactgtgacccctttgtcactaagggagaaagaaattaagtattgtcaaagttctataaagaatggaaatgtatgatattatacttcaaaggaatttgatgttgaaattttaaagaaaatttgtcatgttgatgagaagcttcactttcctgggaacttcattcgttttagggcatgagataaaagtcctggctaggggagccataggtctgttgtacaaggaatttgctttctaaacaagttgtaacttgccctaaggtccctgttggagcactaagaggtgacacaggccagagacaacgtttcgtttccccttccctgcaagctgggatcagccctgtgttttctcctttcagctgaagtgagcgaaggttctcagtgctggcaaaagagcccactttctaaaaggacttgggaagaaagctgctgggaacttgcttattaaaaagttccttagaattaaggtatctacccactgttttcgcacctttcaccttcctgggctttcctgccctccagcattcttctctagagaggttcctagcccgctcagcgcgagcgtctccagtaggtaatagcagctgaacgtgggttttccacggacttcaggcttggaggtgccatatacaagcacacttcttccttcccctggcttctccatgccaccacccactttaaagatgtaaactcagtagatttttcatccagtgaacggtcatcttcacatcgaaaggtgaaggccaccactgttctcaatgccaagcaacagaacgttctgagatggccgttcttccttgcacagcagctacggcaggttgttctgcagccaccccttagagggggctcttcgttttacctttgtacagttcttgtgtttacacatttgggccaaacagctttcagcaagggcatgtgtccacagctgatgggcagttaagaaccagcctgagctgaaggctagtaataccgtgctgtaggctctttaaaaggaaagcctggcataaacccagcatggaaaggaacattatcagttatctcaaattttgtctgccagggacaagaccctgttcattcttttgcccttttcagaactgtgagcttcaagtattcttgcttctctgtaaagggaagacatctcccttctctgaaatccttcaacaaaagaaaaggctcttggcagggtaggggagtcagtagctcaacactagatcatccctagagatggggcaagtttctgtctgaacacgtcttgggtccgagtccttaggtgttcggatgcagtactttgtgaatacttaagctactgcatgcttggtgtagcttgcaatttctctgtatttaaaagcagctgtgtttattttcttcaaaataacctgtatattatttagagcaagcaatgtaaatattactgagaagttactgcagggatttttgtgacagagtttgtatgggtttttaaaaaaatcttagacacccctttttaagatggggagaacagggttgactgcaccgttgaagcccgcccagcattataaggaaatgtttttaatgactgctgcatctttgtaaaacgtttggtcatctaacagatggttttaaagtgtacaatatccaaaataacgatagccctgtatccatacattgtttcattgaaagaattctctattgcctcttcttggtagagccagagtccttaaggaaaatcaggaaaatgaagaaaatgatggtgccatcttgaccagacttctgcacagtaatttaacgctatcctagggagacttggttgaaggcacagttctgggatcagggtctaaatgtgcagtttctgagaaccttcaagaccactcactgggcagggctctgtggagcactggagctgtttggattccccagccctttggtcatatcctggaattccgtggaggctgcagaacttagatgcagctgttttttacagcacctatttttgtcagattggtaaggaaacactgagtcacagaatacttaagaattggagactccagtaatgtaggatggcctgagaggacgtccaagtcccaaggggtggacacggcatgttcctcgggcacagcctcagtgggggccttccccaggcgcagctcggccacctgaggaaagggtgtttcggaggcgcagccacacacacagcgctggcagcctcacggtcacgcccatcactccctgccccccactgcccttgagaagttagtggtgtcacatccttagttttatagacagctaggaatagattgtgaagaacactcagttcactactgtgttacatttatatcacaagcttcaattaaaatggattttaaaggattttaggatttacctttagtattaacaacgtatctactgacatactgttagggggngggnnnggggggggggggggggggggggggggggggggtgggcgggnncggggggggngggggngggggggggggggggggggggagaggcgggggcgggggaggaggaggggggggggcggggggaagggaagggggggagggtgagaggggggccttctgtcagggtcagtgtcaaaattcgttatcaaaggcaaaacctactgtgccaagctggggcgctatatgtgaacggagtggaaatgcttcagtcacctctgccgcagcttgtgattccagcagttctcacaaaccttctgtcacatgatgaaaagaagcagcttgtataattccaactggtgtttcatttctgttctaatgctaagtggtaacgcttaacaaacagactaaaagctgtgtgcagaagaaagggctgaatgagtaccgcctccctaggttccagcacagcgctcgggtctaagaagtagagccccggggtagggtgggccatccactgtcaggccagtgtctcaagaaagcctgaccagctgagctgctgctttttttttgggggggggggggggaggggcgtcttgaggctttttttttttttacaaagttagtttgtgatcaacgattcactacaattgaagtgttactttgtcagaatatttattcctttgtgtgacatgctagattccctggatgtagctgatcatttttattttgtaaatattacctaactttacataaactatatcataataaactatttttgcatcac

SEQ ID NO: 452648 - DNA, 1363 bp, Homo sapiens
cagtttacagcgtcagggcagtttacagcgtcagggcagtttacagcgtcagggcagtttacagcgtcagggcagtttacagcgtcagggctctgtggagcactggagctgtttggattccccagccctttggtcatatcctggaattccgtggaggctgcagaacttagatgcagctgttttttacagcacctatttttgtcagattggtaaggaaacactgagtcacagaatacttaagaattggagactccagtaatgtaggatggcctgagaggacgtccaagtcccaaggggtggacacggcatgttcctcgggcacagcctcagtgggggccttccccaggcgcagctcggccacctgaggaaagggtgtttcggaggcgcagccacacacacagcgctggcagcctcacggtcacgcccatcactccctgccccccactgcccttgagaagttagtggtgtcacatccttagttttatagacagctaggaatagattgtgaagaacactcagttcactactgtgttacatttatatcacaagcttcaattaaaatggattttaaaggattttaggatttacctttagtattaacaacgtatctactgacatactgttaggattcaaaaccagttaagtataagaattacttcatgtggttttcctagggtacaatttataaaaggtagaaagcatccaagtggctcctcaacaattacaattcttaatgatttttctcacagctgtgcccttctgtcagggtcagtgtcaaaattcgttatcaaaggcaaaacctactgtgccaagctggggcgctatatgtgaacggagtggaaatgcttcagtcacctctgccgcagcttgtgattccagcagttctcacaaaccttctgtcacatgatgaaaagaagcagcttgtataattccaactggtgtttcatttctgttctaatgctaagtggtaacgcttaacaaacagactaaaagctgtgtgcagaagaaagggctgaatgagtaccgcctccctaggttccagcacagcgctcgggtctaagaagtagagccccggggtagggtgggccatccactgtcaggccagtgtctcaagaaagcctgaccagctgagctgctgctttttttttgggggggggggggggaggggcgtcttgaggctttttttttttttacaaagttagtttgtgatcaacgattcactacaattgaagtgttactttgtcagaatatttattcctttgtgtgacatgctagattccctggatgtagctgatcatttttattttgtaaatattacctaactttacataaactatatcataataaactatttttgcatcac

SEQ ID NO: 452649 - DNA, 1184 bp, Homo sapiens
tcatgcttgtgttggtgtgatggtctctgtgggtgggtggatgctttgggcgttgaaatctagaaatcctgttgctcagtttctagatgaagtcatgagcaaggccatcagtggagctctggccccgcccccaatgtgcagaagggccgggagcaaggcctggagttttcatgtgttttcagacccaggtttaggtgctctcttctcactgaaataactaagtgctctccactggcatcgagccctttccacaagtttttaaggctcttaacccacactttcactcctctgctactagtcttcagtgttgttaacagcaagagaaaattgggtttgtttaaaaatctacttctctgaggtggcacagttgcgtagctgtagtcccagctactcaggaggctgaggtagtaggattgcttgagcccgggaggtcgaggctgcaatcagtcatgatcgtgtcactgcactccagcctgggtgacaaagcaaggccccatatcagatatagatatacttatcagaccccccctgaccatttagattggcagtgctttgagaaatgcactatgacctttctgtgtcaatgggaatatacagaaggaacattcgggaccccgctgtcccccacagcctcattgttgtctccaggacactgctgggtcacacgaatgctccaggacagacagggacctggagtgcatcaggatctgaccagataggagtttttgcctcgtatctgggtgctacgattttgtgccgttctctgaggtccaccacctgcccttcctggcatggtttccttcgtgaccatccctgctgcccctgggggtggaccccactggcccttctgcagacagctccctgccttctgccctccagggggttctggccagagtccatgcttggagacaggatcatctgccttcagccctcacagtgctttaaattaaagcaagtttgcccataggacaaaagagcatttgattcccttttttctgtcacatatcccttgaggctggacttcaggaatcctggaaaattaatatgagtgcagcatgtgaggggtcagagacaggccagcagggcgtctgcattcctccctgccacaggtctctccccagaggctggtttagtgtagggtattgccaggaaacggactgaggctgctttgctaagagctcctg

SEQ ID NO: 452650 - DNA, 2108 bp, Homo sapiens
tagcgcggcgctcggaactgacctactaacacacatctctccgcgcggccacggcgcccgcggacccggcgcgcccgcccgcctcccgcgccgcgccctcgccgccgcccgcctcccgccgcggccccggaggcccggcccggcccgagccccgagcgccggcggcccgactcccggccgcccctttctttctcctcgccggcccgagagcaggaacacgataacgaaggaggcccaacttcattcaataaggagcctgacggatttatcccagacggtagaacaaaaggaagaatattgatggattttaaaccagagtttttaaagagcttgagaatacggggaaattaatttgttctcctacacacatagatagggtaaggttgtttctgatgcagctgagaaaaatgcagaccgtcaaaaaggagcaggcgtctcttgatgccagtagcaatgtggacaagatgatggtccttaattctgctttaacggaagtgtcagaagactccacaacaggtgaggagctgcttctcagtgaaggaagtgtggggaagaacaaatcttctgcatgtcggaggaaacgggaattcattcctgatgaaaagaaagatgctatgtattgggaaaaaaggcggaaaaataatgaagctgccaaaagatctcgtgagaagcgtcgactgaatgacctggttttagagaacaaactaattgcactgggagaagaaaacgccactttaaaagctgagctgctttcactaaaattaaagtttggtttaattagctccacagcatatgctcaagagattcagaaactcagtaattctacagctgtgtactttcaagattaccagacttccaaatccaatgtgagttcatttgtggacgagcacgaaccctcgatggtgtcaagtagttgtatttctgtcattaaacactctccacaaagctcgctgtccgatgtttcagaagtgtcctcagtagaacacacgcaggagagctctgtgcagggaagctgcagaagtcctgaaaacaagttccagattatcaagcaagagccgatggaattagagagctacacaagggagccaagagatgaccgaggctcttacacagcgtccatctatcaaaactatatggggaattctttctctgggtactcacactctcccccactactgcaagtcaaccgatcctccagcaactccccgagaacgtcggaaactgatgatggtgtggtaggaaagtcatctgatggagaagacgagcaacaggtccccaagggccccatccattctccagttgaactcaagcatgtgcatgcaactgtggttaaagttccagaagtgaattcctctgccttgccacacaagctccggatcaaagccaaagccatgcagatcaaagtagaagcctttgataatgaatttgaggccacgcaaaaactttcctcacctattgacatgacatctaaaagacatttcgaactcgaaaagcatagtgccccaagtatggtacattcttctcttactcctttctcagtgcaagtgactaacattcaagattggtctctcaaatcggagcactggcatcaaaaagaactgagtggcaaaactcagaatagtttcaaaactggagttgttgaaatgaaagacagtggctacaaagtttctgacccagagaacttgtatttgaagcaggggatagcaaacttatctgcagaggttgtctcactcaagagacttatagccacacaaccaatctctgcttcagactctgggtaaattactactgagtaagagctgggcatttagaaagatgtcatttgcaatagagcagtccattttgtattatgctgaattttcactggacctgtgatgtcatttcactgtgatgtgcacatgttgtctgtttggtgtctttttgtgcacagattatgatgaagattagattgtgttatcactctgcctgtgtatagtcagatagtccatgcgaaggctgtatatattgaacattatttttgttgttctattataaagtgtgtaagttaccagtttcaataaaggattggtgacaaacacaactcctgctccattgcatttgatttgatg

SEQ ID NO: 452651 - DNA, 2149 bp, Homo sapiens
tagcgcggcgctcggaactgacctactaacacacatctctccgcgcggccacggcgcccgcggacccggcgcgcccgcccgcctcccgcgccgcgccctcgccgccgcccgcctcccgccgcggccccggaggcccggcccggcccgagccccgagcgccggcggcccgactcccggccgcccctttctttctcctcgccggcccgagagcaggaacacgataacgaaggaggcccaacttcattcaataaggagcctgacggatttatcccagacggtagaacaaaaggaagaatattgatggattttaaaccagagtttttaaagagcttgagaatacggggaaattaatttgttctcctacacacatagatagggtaaggttgtttctgatgcagctgagaaaaatgcagaccgtcaaaaaggagcaggcgtctcttgatgccagtagcaatgtggacaagatgatggtccttaattctgctttaacggaagtgtcagaagactccacaacaggtgaggagctgcttctcagtgaaggaagtgtggggaagaacaaatcttctgcatgtcggaggaaacgggaattcattcctgatgaaaagaaagatgctatgtattgggaaaaaaggcggaaaaataatgaagctgccaaaagatctcgtgagaagcgtcgactgaatgacctggttttagagaacaaactaattgcactgggagaagaaaacgccactttaaaagctgagctgctttcactaaaattaaagtttggtttaattagctccacagcatatgctcaagagattcagaaactcagtaattctacagctgtgtactttcaagattaccagacttccaaatccaatgtgagttcatttgtggacgagcacgaaccctcgatggtgtcaagtagttgtatttctgtcattaaacactctccacaaagctcgctgtccgatgtttcagaagtgtcctcagtagaacacacgcaggagagctctgtgcagggaagctgcagaagtcctgaaaacaagttccagattatcaagcaagagccgatggaattagagagctacacaagggagccaagagatgaccgaggctcttacacagcgtccatctatcaaaactatatggggaattctttctctgggtactcacactctcccccactactgcaagtcaaccgatcctccagcaactccccgagaacgtcggaaactgatgatggtgtggtaggaaagtcatctgatggagaagacgagcaacaggtccccaagggccccatccattctccagttgaactcaagcatgtgcatgcaactgtggttaaagttccagaagtgaattcctctgccttgccacacaagctccggatcaaagccaaagccatgcagatcaaagtagaagcctttgataatgaatttgaggccacgcaaaaactttcctcacctattgacatgacatctaaaagacatttcgaactcgaaaagcatagtgccccaagtatggtacattcttctcttactcctttctcagtgcaagtgactaacattcaagattggtctctcaaatcggagcactggcatcaaaaagaactgagtggcaaaactcagaatagtttcaacttgtatttgaagcaggggatagcaaacttatctgcagaggttgtctcactcaagagacttatagccacacaaccaatctctgcttcagactctgggtaaattactactgagtaagagctgggcatttagaaagatgtcatttgcaatagagcagtccattttgtattatgctgaattttcactggacctgtgatgtcatttcactgtgatgtgcacatgttgtctgtttggtgtctttttgtgcacagattatgatgaagattagattgtgttatcactctgcctgtgtatagtcagatagtccatgcgaaggctgtatatattgaacattatttttgttgttctattataaagtgtgtaagttaccagtttcaataaaggattggtgacaaacacaataaataaattccctcttcccatttctttgtaatgtatactccattctgactttgtccttctcgatctcctttacctttaataacatggggcccgccttgcccacggctcttttatctcggacc

SEQ ID NO: 452652 - DNA, 2079 bp, Homo sapiens
tagcgcggcgctcggaactgacctactaacacacatctctccgcgcggccacggcgcccgcggacccggcgcgcccgcccgcctcccgcgccgcgccctcgccgccgcccgcctcccgccgcggccccggaggcccggcccggcccgagccccgagcgccggcggcccgactcccggccgcccctttctttctcctcgccggcccgagagcaggaacacgataacgaaggaggcccaacttcattcaataaggagcctgacggatttatcccagacggtagaacaaaaggaagaatattgatggattttaaaccagagtttttaaagagcttgagaatacggggaaattaatttgttctcctacacacatagatagggtaaggttgtttctgatgcagctgagaaaaatgcagaccgtcaaaaaggagcaggcgtctcttgatgccagtagcaatgtggacaagatgatggtccttaattctgctttaacggaagtgtcagaagactccacaacaggtgaggagctgcttctcagtgaaggaagtgtggggaagaacaaatcttctgcatgtcggaggaaacgggaattcattcctgatgaaaagaaagatgctatgtattgggaaaaaaggcggaaaaataatgaagctgccaaaagatctcgtgagaagcgtcgactgaatgacctggttttagagaacaaactaattgcactgggagaagaaaacgccactttaaaagctgagctgctttcactaaaattaaagtttggtttaattagctccacagcatatgctcaagagattcagaaactcagtaattctacagctgtgtactttcaagattaccagacttccaaatccaatgtgagttcatttgtggacgagcacgaaccctcgatggtgtcaagtagttgtatttctgtcattaaacactctccacaaagctcgctgtccgatgtttcagaagtgtcctcagtagaacacacgcaggagagctctgtgcagggaagctgcagaagtcctgaaaacaagttccagattatcaagcaagagccgatggaattagagagctacacaagggagccaagagatgaccgaggctcttacacagcgtccatctatcaaaactatatggggaattctttctctgggtactcacactctcccccactactgcaagtcaaccgatcctccagcaactccccgagaacgtcggaaactgatgatggtgtggtaggaaagtcatctgatggagaagacgagcaacaggtccccaagggccccatccattctccagttgaactcaagcatgtgcatgcaactgtggttaaagttccagaagtgaattcctctgccttgccacacaagctccggatcaaagccaaagccatgcagatcaaagtagaagcctttgataatgaatttgaggccacgcaaaaactttcctcacctattgacatgacatctaaaagacatttcgaactcgaaaagcatagtgccccaagtatggtacattcttctcttactcctttctcagtgcaagtgactaacattcaagattggtctctcaaatcggagcactggcatcaaaaagaactgagtggcaaaactcagaatagtttcaaaactggagttgttgaaatgaaagacagtggctacaaagtttctgacccagagaacttgtatttgaagcaggggatagcaaacttatctgcagaggttgtctcactcaagagacttatagccacacaaccaatctctgcttcagactctgggtaaattactactgagtaagagctgggcatttagaaagatgtcatttgcaatagagcagtccattttgtattatgctgaattttcactggacctgtgatgtcatttcactgtgatgtgcacatgttgtctgtttggtgtctttttgtgcacagattatgatgaagattagattgtgttatcactctgcctgtgtatagtcagatagtccatgcgaaggctgtatatattgaacattatttttgttgttctattataaagtgtgtaagttaccagtttcaataaaggattggtgacaaacaca

SEQ ID NO: 452653 - DNA, 2025 bp, Homo sapiens
tagcgcggcgctcggaactgacctactaacacacatctctccgcgcggccacggcgcccgcggacccggcgcgcccgcccgcctcccgcgccgcgccctcgccgccgcccgcctcccgccgcggccccggaggcccggcccggcccgagccccgagcgccggcggcccgactcccggccgcccctttctttctcctcgccggcccgagagcaggaacacgataacgaaggaggcccaacttcattcaataaggagcctgacggatttatcccagacggtagaacaaaaggaagaatattgatggattttaaaccagagtttttaaagagcttgagaatacggggaaattaatttgttctcctacacacatagatagggtaaggttgtttctgatgcagctgagaaaaatgcagaccgtcaaaaaggagcaggcgtctcttgatgccagtagcaatgtggacaagatgatggtccttaattctgctttaacggaagtgtcagaagactccacaacaggtgaggagctgcttctcagtgaaggaagtgtggggaagaacaaatcttctgcatgtcggaggaaacgggaattcattcctgatgaaaagaaagatgctatgtattgggaaaaaaggcggaaaaataatgaagctgccaaaagatctcgtgagaagcgtcgactgaatgacctggttttagagaacaaactaattgcactgggagaagaaaacgccactttaaaagctgagctgctttcactaaaattaaagtttggtttaattagctccacagcatatgctcaagagattcagaaactcagtaattctacagctgtgtactttcaagattaccagacttccaaatccaatgtgagttcatttgtggacgagcacgaaccctcgatggtgtcaagtagttgtatttctgtcattaaacactctccacaaagctcgctgtccgatgtttcagaagtgtcctcagtagaacacacgcaggagagctctgtgcagggaagctgcagaagtcctgaaaacaagttccagattatcaagcaagagccgatggaattagagagctacacaagggagccaagagatgaccgaggctcttacacagcgtccatctatcaaaactatatggggaattctttctctgggtactcacactctcccccactactgcaagtcaaccgatcctccagcaactccccgagaacgtcggaaactgatgatggtgtggtaggaaagtcatctgatggagaagacgagcaacaggtccccaagggccccatccattctccagttgaactcaagcatgtgcatgcaactgtggttaaagttccagaagtgaattcctctgccttgccacacaagctccggatcaaagccaaagccatgcagatcaaagtagaagcctttgataatgaatttgaggccacgcaaaaactttcctcacctattgacatgacatctaaaagacatttcgaactcgaaaagcatagtgccccaagtatggtacattcttctcttactcctttctcagtgcaagtgactaacattcaagattggtctctcaaatcggagcactggcatcaaaaagaactgagtggcaaaactcagaatagtttcaacttgtatttgaagcaggggatagcaaacttatctgcagaggttgtctcactcaagagacttatagccacacaaccaatctctgcttcagactctgggtaaattactactgagtaagagctgggcatttagaaagatgtcatttgcaatagagcagtccattttgtattatgctgaattttcactggacctgtgatgtcatttcactgtgatgtgcacatgttgtctgtttggtgtctttttgtgcacagattatgatgaagattagattgtgttatcactctgcctgtgtatagtcagatagtccatgcgaaggctgtatatattgaacattatttttgttgttctattataaagtgtgtaagttaccagtttcaataaaggattggtgacaaacaca

SEQ ID NO: 452654 - DNA, 5262 bp, Homo sapiens
ctctttccttaaacctgaattcggcacgaggtgggctctctcttttcccctcttgctcctttcttttctttttttctgtttttttaaaccttccaaggcaagttcatggatactaagctgatgtgtttgttgttctttttctccctgcctccgctcctagtgagtaaccacactggccgcatcaaggtggtctttactccgagcatctgtaaagtgacctgcaccaagggcagctgtcagaacagctgtgagaaggggaacaccaccactctcattagtgagaatggtcatgctgccgacaccctgacggccacgaacttccgagtggtaatttgccatcttccatgtatgaatggtggccagtgcagttcaagggacaaatgtcagtgccctccaaatttcacaggaaaactttgtcagatcccagtccatggtgccagcgtgcctaaactttatcagcattcccagcagccaggcaaggcgttggggacgcatgtcatccattcaacacataccttgcctctgaccgtgactagccagcaaggagtcaaagtgaaatttcctcctaacatagtcaatatccatgtgaaacatcctcctgaagcttccgtccagatacatcaggtttcaagaattgatggcccaacaggccagaagacaaaagaagctcaaccaggccaatcccaagtctcgtaccaagggcttcctgtccagaagacccagaccatacattccacatactcccaccagcaggtcattcctcacgtctaccccgtggctgctaagacacagcttggccggtgcttccaggaaaccattgggtcacagtgtggcaaagcgctccctggcctttcaaagcaagaggactgctgtggaactgtgggtacctcctggggctttaacaaatgccagaaatgccccaagaaaccatcttatcatggatacaaccaaatgatggaatgcctaccgggttataagcgggttaacaacaccttttgccaagatattaatgaatgtcagctacaaggtgtatgccctaatggtgagtgtttgaataccatgggcagctatcgatgtacctgcaaaataggatttgggccggatcctaccttttcaagttgtgttcctgatccccctgtgatctcggaagagaaagggccctgttaccgacttgtcagttctggaagacagtgtatgtaccctctgtctgttcacctcaccaagcagctctgctgttgtagtgtgggcaaggctggggcccacactgtgagaaatgtccccttccaggcacagctgcttttaaggaaatctgtcctggtggaatgggttatacggtttctggcgttcatagacgcaggccaatccatcaccatgtaggtaaaggacctgtatttgtcaagccaaagaacactcaacctgttgctaaaagtactcatcctccacctctcccagccaaggaagagccagtggaggccctgaccttctcccgggaacacgggccaggagtggcggagccagaagtggcaactgcaccccctgaaaaggaaataccttcattggatcaagagaaaaccaaacttgagcctggtcaaccccagctgtctccaggcatttccgctattcatctgcatccacagtttccagtagtgattgaaaaaacatcacctcctgtgcctgttgaagtagctcctgaagcttctacgtctagtgccagccaagtgattgctcctactcaagtgacagaaatcaatgaatgtactgtgaaccctgatatctgtggagcaggacactgcattaacctaccagtgagatatacctgtatatgctacgagggctacaggttcagtgaacaacagaggaaatgtgtggatattgatgagtgtactcaggtccaacacctctgctcccagggccgctgtgaaaacaccgagggaagtttcttgtgcatttgcccagcaggatttatggccagtgaggagggtactaactgcatagatgttgacgaatgcctgaggccggacgtctgtggggaggggcactgtgtcaatactgtgggggccttccggtgtgaatactgtgacagcgggtaccgcatgactcagagaggccgttgtgaggatattgatgaatgtttgaatccaagcacttgtccagatgagcagtgtgtgaattctcctggatcttaccagtgcgttccctgcacagaaggattccgaggctggaatggacagtgccttgatgtggacgagtgcctggaaccaaacgtctgcgcaaatggtgattgttccaaccttgaaggctcctacatgtgttcatgccacaaaggctatacccggactccggaccacaagcactgtagagatattgatgaatgtcagcaagggaatctatgtgtaaacgggcagtgcaaaaataccgagggctccttcaggtgcacctgtggacaggggtaccagctgtcggcagctaaagaccagtgtgaagacattgatgaatgccagcaccgtcatctctgtgctcatgggcagtgcaggaacactgagggctcttttcaatgtgtgtgtgaccagggttacagagcatctgggcttggagaccactgtgaagatatcaatgaatgcttggaggacaagagtgtttgccagagaggagactgcattaatactgcagggtcctatgattgtacttgtccggatggatttcagctagatgacaataaaacatgtcaagatattaatgaatgtgaacatccagggctctgtggtccgcaaggggagtgcctaaacacagagggttctttccattgtgtctgccagcagggtttctcaatctctgcagatggccgtacgtgtgaagatattgatgaatgtgtaaacaacactgtttgtgacagtcacgggttttgtgacaatacagctggctccttccgctgcctctgttatcagggctttcaagccccacaggatgggcaagggtgtgtggatgtgaatgaatgtgaactgctcagtggggtgtgtggtgaagccttctgtgaaaacgtggaagggtccttcctgtgcgtgtgtgctgatgaaaaccaagagtacagccccatgactgggcagtgccgctcccggacctccacagatttagatgtagatgtagatcaacccaaagaagaaaagaaagaatgctactataatctcaatgacgccagtctctgtgataatgtgttggcccccaatgtcacgaaacaagaatgctgctgtacatcaggcgcgggatggggagataactgcgaaatcttcccctgcccggtcttgggaactgctgagttcactgaaatgtgtcccaaagggaaaggttttgtgcctgctggagaatcatcttctgaagctggtggtgagaactataaagatgcagatgaatgcctactttttggacaagaaatctgcaaaaatggtttctgtttgaacactcggcctgggtatgaatgctactgtaagcaagggacgtactatgatcctgtgaaactgcagtgctttgatatggatgaatgtcaagaccccagtagttgtattgatggccagtgtgttaatacagagggctcttacaactgcttctgtactcaccccatggtcctggatgcgtcagaaaaaagatgtatacgaccggctgagtcaaacgaacaaatagaagaaactgatgtctaccaagatttgtgctgggaacatctgagtgatgaatacgtgtgtagccggcctcttgtgggcaagcagacaacgtacactgagtgctgctgtctgtatggagaggcctggggcatgcagtgtgccctctgccccctgaaggattcagatgactatgctcagctgtgtaacatccccgtgacgggacgccggcagccatatggacgggacgccttggttgacttcagtgaacagtatactccagaagccgatccctacttcatccaagaccgttttctaaatagctttgaggagttacaggctgaggaatgcggcatcctcaatggatgtgaaaatggtcgctgtgtgagggtccaggaaggttacacctgcgattgctttgatgggtatcacttggatacggccaagatgacctgtgtcgatgtaaatgaatgcgatgagttgaacaaccggatgtctctctgcaagaatgccaagtgcattaacaccgatggttcctacaagtgtttgtgtctgccaggctacgtgccttctgacaagccaaactactgcactccgttgaataccgccttgaatttagagaaagacagtgacctggagtgaaacagaatctacataacctaagcccatatactctgcactgtgtaaaggaaaagggagaaatgtattatacttgagacattgcacctaccccggaaggctggaaatacagaaacagcatggagttgcaagtcctctgaagacaatgagaggatttaggatgagcccgataggtgtggcagaccaaatggacatttctctaaaaaaccagtatatatagtctgttcatatgtaaaattcaatggaagagaggtggaacagtgctgttattttaaacagaaggttgtattattatgttgttttgtttttttactattgcttgattaaatttggcatttaaatagtggtggaaatattttatataattttcattttttggttgtgcagttccttggctactgtttttcttttacttcagttttttaaaaatctcaaatgaaaaagtcttcgatacaatattgttaagctgtattataagtattgttacacagggttatgcaattcccggcctggagcatttttgaaattcaaattgtctgtcctgtggagcaggcagtgattttgttccaaaactttgtatacacatttggagaaaagtactttatattttcagtgttttgtctgattttaatgtccgttcttagccaagctgctagcaggtgttaattggatccctttccttcactgaaatggaagagtttataagcttacgttagtattgtaatatgtaaagtaagcccaacaaaaatttttaaaaatttgatgatccccaatatatctaccattgtatgttaaataaatcaccatttttgtagaaaaaattctacctgagagtaattgtcaatgagtacatgtgtataagttgtatcccactctccccacttttatcttttccagtggtcttctgttaatgtagtgtcttttacaagttaatcattaaatttgttagatcttgttatgggctaaattgttt

SEQ ID NO: 452655 - DNA, 2942 bp, Homo sapiens
gtctagaggatcccgaatgcggcaggacaagcactgtagagatattgatgaatgtcagcaagggaatctatgtgtaaacgggcagtgcaaaaataccgagggctccttcaggtgcacctgtggacaggggtaccagctgtcggcagctaaagaccagtgtgaagacattgatgaatgccagcaccgtcatctctgtgctcatgggcagtgcaggaacactgagggctcttttcaatgtgtgtgtgaccagggttacagagcatctgggcttggagaccactgtgaagatatcaatgaatgcttggaggacaagagtgtttgccagagaggagactgcattaatactgcagggtcctatgattgtacttgtccggatggatttcagctagatgacaataaaacatgtcaagatattaatgaatgtgaacatccagggctctgtggtccgcaaggggagtgcctaaacacagagggttctttccattgtgtctgccagcagggtttctcaatctctgcagatggccgtacgtgtgaagatattgatgaatgtgtaaacaacactgtttgtgacagtcacgggttttgtgacaatacagctggctccttccgctgcctctgttatcagggctttcaagccccacaggatgggcaagggtgtgtggatgtgaatgaatgtgaactgctcagtggggtgtgtggtgaagccttctgtgaaaacgtggaagggtccttcctgtgcgtgtgtgctgatgaaaaccaagagtacagccccatgactgggcagtgccgctcccggacctccacagatttagatgtagatgtagatcaacccaaagaagaaaagaaagaatgctactataatctcaatgacgccagtctctgtgataatgtgttggcccccaatgtcacgaaacaagaatgctgctgtacatcaggcgcgggatggggagataactgcgaaatcttcccctgcccggtcttgggaactgctgagttcactgaaatgtgtcccaaagggaaaggttttgtgcctgctggagaatcatcttctgaagctggtggtgagaactataaagatgcagatgaatgcctactttttggacaagaaatctgcaaaaatggtttctgtttgaacactcggcctgggtatgaatgctactgtaagcaagggacgtactatgatcctgtgaaactgcagtgctttgatatggatgaatgtcaagaccccagtagttgtattgatggccagtgtgttaatacagagggctcttacaactgcttctgtactcaccccatggtcctggatgcgtcagaaaaaagatgtatacgaccggctgagtcaaacgaacaaatagaagaaactgatgtctaccaagatttgtgctgggaacatctgagtgatgaatacgtgtgtagccggcctcttgtgggcaagcagacaacgtacactgagtgctgctgtctgtatggagaggcctggggcatgcagtgtgccctctgccccctgaaggattcagatgactatgctcagctgtgtaacatccccgtgacgggacgccggcagccatatggacgggacgccttggttgacttcagtgaacagtatactccagaagccgatccctacttcatccaagaccgttttctaaatagctttgaggagttacaggctgaggaatgcggcatcctcaatggatgtgaaaatggtcgctgtgtgagggtccaggaaggttacacctgcgattgctttgatgggtatcacttggatacggccaagatgacctgtgtcgatgtaaatgaatgcgatgagttgaacaaccggatgtctctctgcaagaatgccaagtgcattaacaccgatggttcctacaagtgtttgtgtctgccaggctacgtgccttctgacaagccaaactactgcactccgttgaataccgccttgaatttagagaaagacagtgacctggagtgaaacagaatctacataacctaagcccatatactctgcactgtgtaaaggaaaagggagaaatgtattatacttgagacattgcacctaccccggaaggctggaaatacagaaacagcatggagttgcaagtcctctgaagacaatgagaggatttaggatgagcccgataggtgtggcagaccaaatggacatttctctaaaaaaccagtatatatagtctgttcatatgtaaaattcaatggaagagaggtggaacagtgctgttattttaaacagaaggttgtattattatgttgttttgtttttttactattgcttgattaaatttggcatttaaatagtggtggaaatattttatataattttcattttttggttgtgcagttccttggctactgtttttcttttacttcagttttttaaaaatctcaaatgaaaaagtcttcgatacaatattgttaagctgtattataagtattgttacacagggttatgcaattcccggcctggagcatttttgaaattcaaattgtctgtcctgtggagcaggcagtgattttgttccaaaactttgtatacacatttggagaaaagtactttatattttcagtgttttgtctgattttaatgtccgttcttagccaagctgctagcaggtgttaattggatccctttccttcactgaaatggaagagtttataagcttacgttagtattgtaatatgtaaagtaagcccaacaaaaatttttaaaaatttgatgatccccaatatatctaccattgtatgttaaataaatcaccatttttgtagaaaaaattctacctgagagtaattgtcaatgagtacatgtgtataagttgtatcccactctccccacttttatcttttccagtggtcttctgttaatgtagtgtcttttacaagttaatcattaaatttgttagatcttgttatgggctaaattgttt

SEQ ID NO: 452656 - DNA, 5136 bp, Homo sapiens
ctctttccttaaacctgaattcggcacgaggtgggctctctcttttcccctcttgctcctttcttttctttttttctgtttttttaaaccttccaaggcaagttcatggatactaagctgatgtgtttgttgttctttttctccctgcctccgctcctagtgagtaaccacactggccgcatcaaggtggtctttactccgagcatctgtaaagtgacctgcaccaagggcagctgtcagaacagctgtgagaaggggaacaccaccactctcattagtgagaatggtcatgctgccgacaccctgacggccacgaacttccgagtggtaatttgccatcttccatgtatgaatggtggccagtgcagttcaagggacaaatgtcagtgccctccaaatttcacaggaaaactttgtcagatcccagtccatggtgccagcgtgcctaaactttatcagcattcccagcagccaggcaaggcgttggggacgcatgtcatccattcaacacataccttgcctctgaccgtgactagccagcaaggagtcaaagtgaaatttcctcctaacatagtcaatatccatgtgaaacatcctcctgaagcttccgtccagatacatcaggtttcaagaattgatggcccaacaggccagaagacaaaagaagctcaaccaggccaatcccaagtctcgtaccaagggcttcctgtccagaagacccagaccatacattccacatactcccaccagcaggtcattcctcacgtctaccccgtggctgctaagacacagcttggccggtgcttccaggaaaccattgggtcacagtgtggcaaagcgctccctggcctttcaaagcaagaggactgctgtggaactgtgggtacctcctggggctttaacaaatgccagaaatgccccaagaaaccatcttatcatggatacaaccaaatgatggaatgcctaccgggttataagcgggttaacaacaccttttgccaagatattaatgaatgtcagctacaaggtgtatgccctaatggtgagtgtttgaataccatgggcagctatcgatgtacctgcaaaataggatttgggccggatcctaccttttcaagttgtgttcctgatccccctgtgatctcggaagagaaagggccctgttaccgacttgtcagttctggaagacagtgtatgtaccctctgtctgttcacctcaccaagcagctctgctgttgtagtgtgggcaaggctggggcccacactgtgagaaatgtccccttccaggcacagctgcttttaaggaaatctgtcctggtggaatgggttatacggtttctggcgttcatagacgcaggccaatccatcaccatgtaggtaaaggacctgtatttgtcaagccaaagaacactcaacctgttgctaaaagtactcatcctccacctctcccagccaaggaagagccagtggaggccctgaccttctcccgggaacacgggccaggagtggcggagccagaagtggcaactgcaccccctgaaaaggaaataccttcattggatcaagagaaaaccaaacttgagcctggtcaaccccagctgtctccaggcatttccgctattcatctgcatccacagtttccagtagtgattgaaaaaacatcacctcctgtgcctgttgaagtagctcctgaagcttctacgtctagtgccagccaagtgattgctcctactcaagtgacagaaatcaatgaatgtactgtgaaccctgatatctgtggagcaggacactgcattaacctaccagtgagatatacctgtatatgctacgagggctacaggttcagtgaacaacagaggaaatgtgtggatattgatgagtgtactcaggtccaacacctctgctcccagggccgctgtgaaaacaccgagggaagtttcttgtgcatttgcccagcaggatttatggccagtgaggagggtactaactgcatagatgttgacgaatgcctgaggccggacgtctgtggggaggggcactgtgtcaatactgtgggggccttccggtgtgaatactgtgacagcgggtaccgcatgactcagagaggccgttgtgaggatattgatgaatgtttgaatccaagcacttgtccagatgagcagtgtgtgaattctcctggatcttaccagtgcgttccctgcacagaaggattccgaggctggaatggacagtgccttgatgtggacgagtgcctggaaccaaacgtctgcgcaaatggtgattgttccaaccttgaaggctcctacatgtgttcatgccacaaaggctatacccggactccggaccacaagcactgtagagatattgatgaatgtcagcaagggaatctatgtgtaaacgggcagtgcaaaaataccgagggctccttcaggtgcacctgtggacaggggtaccagctgtcggcagctaaagaccagtgtgaagacattgatgaatgccagcaccgtcatctctgtgctcatgggcagtgcaggaacactgagggctcttttcaatgtgtgtgtgaccagggttacagagcatctgggcttggagaccactgtgaagatatcaatgaatgcttggaggacaagagtgtttgccagagaggagactgcattaatactgcagggtcctatgattgtacttgtccggatggatttcagctagatgacaataaaacatgtcaagatattaatgaatgtgaacatccagggctctgtggtccgcaaggggagtgcctaaacacagagggttctttccattgtgtctgccagcagggtttctcaatctctgcagatggccgtacgtgtgaagatgtgaatgaatgtgaactgctcagtggggtgtgtggtgaagccttctgtgaaaacgtggaagggtccttcctgtgcgtgtgtgctgatgaaaaccaagagtacagccccatgactgggcagtgccgctcccggacctccacagatttagatgtagatgtagatcaacccaaagaagaaaagaaagaatgctactataatctcaatgacgccagtctctgtgataatgtgttggcccccaatgtcacgaaacaagaatgctgctgtacatcaggcgcgggatggggagataactgcgaaatcttcccctgcccggtcttgggaactgctgagttcactgaaatgtgtcccaaagggaaaggttttgtgcctgctggagaatcatcttctgaagctggtggtgagaactataaagatgcagatgaatgcctactttttggacaagaaatctgcaaaaatggtttctgtttgaacactcggcctgggtatgaatgctactgtaagcaagggacgtactatgatcctgtgaaactgcagtgctttgatatggatgaatgtcaagaccccagtagttgtattgatggccagtgtgttaatacagagggctcttacaactgcttctgtactcaccccatggtcctggatgcgtcagaaaaaagatgtatacgaccggctgagtcaaacgaacaaatagaagaaactgatgtctaccaagatttgtgctgggaacatctgagtgatgaatacgtgtgtagccggcctcttgtgggcaagcagacaacgtacactgagtgctgctgtctgtatggagaggcctggggcatgcagtgtgccctctgccccctgaaggattcagatgactatgctcagctgtgtaacatccccgtgacgggacgccggcagccatatggacgggacgccttggttgacttcagtgaacagtatactccagaagccgatccctacttcatccaagaccgttttctaaatagctttgaggagttacaggctgaggaatgcggcatcctcaatggatgtgaaaatggtcgctgtgtgagggtccaggaaggttacacctgcgattgctttgatgggtatcacttggatacggccaagatgacctgtgtcgatgtaaatgaatgcgatgagttgaacaaccggatgtctctctgcaagaatgccaagtgcattaacaccgatggttcctacaagtgtttgtgtctgccaggctacgtgccttctgacaagccaaactactgcactccgttgaataccgccttgaatttagagaaagacagtgacctggagtgaaacagaatctacataacctaagcccatatactctgcactgtgtaaaggaaaagggagaaatgtattatacttgagacattgcacctaccccggaaggctggaaatacagaaacagcatggagttgcaagtcctctgaagacaatgagaggatttaggatgagcccgataggtgtggcagaccaaatggacatttctctaaaaaaccagtatatatagtctgttcatatgtaaaattcaatggaagagaggtggaacagtgctgttattttaaacagaaggttgtattattatgttgttttgtttttttactattgcttgattaaatttggcatttaaatagtggtggaaatattttatataattttcattttttggttgtgcagttccttggctactgtttttcttttacttcagttttttaaaaatctcaaatgaaaaagtcttcgatacaatattgttaagctgtattataagtattgttacacagggttatgcaattcccggcctggagcatttttgaaattcaaattgtctgtcctgtggagcaggcagtgattttgttccaaaactttgtatacacatttggagaaaagtactttatattttcagtgttttgtctgattttaatgtccgttcttagccaagctgctagcaggtgttaattggatccctttccttcactgaaatggaagagtttataagcttacgttagtattgtaatatgtaaagtaagcccaacaaaaatttttaaaaatttgatgatccccaatatatctaccattgtatgttaaataaatcaccatttttgtagaaaaaattctacctgagagtaattgtcaatgagtacatgtgtataagttgtatcccactctccccacttttatcttttccagtggtcttctgttaatgtagtgtcttttacaagttaatcattaaatttgttagatcttgttatgggctaaattgttt

SEQ ID NO: 452657 - DNA, 4628 bp, Homo sapiens
ctctttccttaaacctgaattcggcacgaggtgggctctctcttttcccctcttgctcctttcttttctttttttctgtttttttaaaccttccaaggcaagttcatggatactaagctgatgtgtttgttgttctttttctccctgcctccgctcctagtgagtaaccacactggccgcatcaaggtggtctttactccgagcatctgtaaagtgacctgcaccaagggcagctgtcagaacagctgtgagaaggggaacaccaccactctcattagtgagaatggtcatgctgccgacaccctgacggccacgaacttccgagtggtaatttgccatcttccatgtatgaatggtggccagtgcagttcaagggacaaatgtcagtgccctccaaatttcacaggaaaactttgtcagatcccagtccatggtgccagcgtgcctaaactttatcagcattcccagcagccaggcaaggcgttggggacgcatgtcatccattcaacacataccttgcctctgaccgtgactagccagcaaggagtcaaagtgaaatttcctcctaacatagtcaatatccatgtgaaacatcctcctgaagcttccgtccagatacatcaggtttcaagaattgatggcccaacaggccagaagacaaaagaagctcaaccaggccaatcccaagtctcgtaccaagggcttcctgtccagaagacccagaccatacattccacatactcccaccagcaggtcattcctcacgtctaccccgtggctgctaagacacagcttggccggtgcttccaggaaaccattgggtcacagtgtggcaaagcgctccctggcctttcaaagcaagaggactgctgtggaactgtgggtacctcctggggctttaacaaatgccagaaatgccccaagaaaccatcttatcatggatacaaccaaatgatggaatgcctaccgggttataagcgggttaacaacaccttttgccaagatattaatgaatgtcagctacaaggtgtatgccctaatggtgagtgtttgaataccatgggcagctatcgatgtacctgcaaaataggatttgggccggatcctaccttttcaagttgtgttcctgatccccctgtgatctcggaagagaaagggccctgttaccgacttgtcagttctggaagacagtgtatgtaccctctgtctgttcacctcaccaagcagctctgctgttgtagtgtgggcaaggctggggcccacactgtgagaaatgtccccttccaggcacagctgcttttaaggaaatctgtcctggtggaatgggttatacggtttctggcgttcatagacgcaggccaatccatcaccatgtaggtaaaggacctgtatttgtcaagccaaagaacactcaacctgttgctaaaagtactcatcctccacctctcccagccaaggaagagccagtggaggccctgaccttctcccgggaacacgggccaggagtggcggagccagaagtggcaactgcaccccctgaaaaggaaataccttcattggatcaagagaaaaccaaacttgagcctggtcaaccccagctgtctccaggcatttccgctattcatctgcatccacagtttccagtagtgattgaaaaaacatcacctcctgtgcctgttgaagtagctcctgaagcttctacgtctagtgccagccaagtgattgctcctactcaagtgacagaaatcaatgaatgtactgtgaaccctgatatctgtggagcaggacactgcattaacctaccagtgagatatacctgtatatgctacgagggctacaggttcagtgaacaacagaggaaatgtgtggatattgatgagtgtactcaggtccaacacctctgctcccagggccgctgtgaaaacaccgagggaagtttcttgtgcatttgcccagcaggatttatggccagtgaggagggtactaactgcatagatgttgacgaatgcctgaggccggacgtctgtggggaggggcactgtgtcaatactgtgggggccttccggtgtgaatactgtgacagcgggtaccgcatgactcagagaggccgttgtgaggatattgatgaatgtttgaatccaagcacttgtccagatgagcagtgtgtgaattctcctggatcttaccagtgcgttccctgcacagaaggattccgaggctggaatggacagtgccttgatgtggacgagtgcctggaaccaaacgtctgcgcaaatggtgattgttccaaccttgaaggctcctacatgtgttcatgccacaaaggctatacccggactccggaccacaagcactgtagagatattgatgaatgtcagcaagggaatctatgtgtaaacgggcagtgcaaaaataccgagggctccttcaggtgcacctgtggacaggggtaccagctgtcggcagctaaagaccagtgtgaagacattgatgaatgccagcaccgtcatctctgtgctcatgggcagtgcaggaacactgagggctcttttcaatgtgtgtgtgaccagggttacagagcatctgggcttggagaccactgtgaagatatcaatgaatgcttggaggacaagagtgtttgccagagaggagactgcattaatactgcagggtcctatgattgtacttgtccggatggatttcagctagatgacaataaaacatgtcaagatattaatgaatgtgaacatccagggctctgtggtccgcaaggggagtgcctaaacacagagggttctttccattgtgtctgccagcagggtttctcaatctctgcagatggccgtacgtgtgaagatattgatgaatgtgtaaacaacactgtttgtgacagtcacgggttttgtgacaatacagctggctccttccgctgcctctgttatcagggctttcaagccccacaggatgggcaagggtgtgtggatgtgaatgaatgtgaactgctcagtggggtgtgtggtgaagccttctgtgaaaacgtggaagggtccttcctgtgcgtgtgtgctgatgaaaaccaagagtacagccccatgactgggcagtgccgctcccggacctccacagatttagatgtagatgtagatcaacccaaagaagaaaagaaagaatgctactataatctcaatgacgccagtctctgtgataatgtgttggcccccaatgtcacgaaacaagaatgctgctgtacatcaggcgcgggatggggagataactgcgaaatcttcccctgcccggtcttgggaactgctgagttcactgaaatgtgtcccaaagggaaaggttttgtgcctgctggagaatcatcttctgaagctggtggtgagaactataaagatgcagatgaatgcctactttttggacaagaaatctgcaaaaatggtttctgtttgaacactcggcctgggtatgaatgctactgtaagcaagggacgtactatgatcctgtgaaactgcagtgctttgatatggatgaatgtcaagaccccagtagttgtattgatggccagtgtgttaatacagagggctcttacaactgcttctgtactcaccccatggtcctggatgcgtcagaaaaaagatgtatacgaccggctgagtcaaacgaacaaatagaagaaactgatgtctaccaagatttgtgctgggaacatctgagtgatgaatacgtgtgtagccggcctcttgtgggcaagcagacaacgtacactgagtgctgctgtctgtatggagaggcctggggcatgcagtgtgccctctgccccctgaaggattcagatgactatgctcagctgtgtaacatccccgtgacgggacgccggcagccatatggacgggacgccttggttgacttcagtgaacagtatactccagaagccgatccctacttcatccaagaccgttttctaaatagctttgaggagttacaggctgaggaatgcggcatcctcaatggatgtgaaaatggtcgctgtgtgagggtccaggaaggttacacctgcgattgctttgatgggtatcacttggatacggccaagatgacctgtgtcgatgtaaatgaatgcgatgagttgaacaaccggatgtctctctgcaagaatgccaagtgcattaacaccgatggttcctacaagtgtttgtgtctgccaggctacgtgccttctgacaagccaaactactgcactccgttgaataccgccttgaatttagagaaagacagtgacctggagtgaaacagaatctacataacctaagcccatatactctgcactgtgtaaaggaaaagggagaaatgtattatacttgagacattgcacctaccccggaaggctggaaatacagaaacagcatggagttgcaagtcctctgaagacaatgagaggatttaggatgagcccgataggtgtggcagaccaaatggacatttctctaaaaaaccagtatatatagtctgttcatatgtaaaattcaatggaagagaggtggaacagtgctgttattttaaacagaaggttgtattattatgttgttttgtttttttactattgcttgattaaatttggcattta

SEQ ID NO: 452658 - DNA, 2266 bp, Homo sapiens
ttttttgggttgatctacatctacatctaaatctgtgaaaacgtggaagggtccttcctgtgcgtgtgtgctgatgaaaaccaagagtacagccccatgactgggcagtgccgctcccggacctccacagatttagatgtagatgtagatcaacccaaagaagaaaagaaagaatgctactataatctcaatgacgccagtctctgtgataatgtgttggcccccaatgtcacgaaacaagaatgctgctgtacatcaggcgcgggatggggagataactgcgaaatcttcccctgcccggtcttgggaactgctgagttcactgaaatgtgtcccaaagggaaaggttttgtgcctgctggagaatcatcttctgaagctggtggtgagaactataaagatgcagatgaatgcctactttttggacaagaaatctgcaaaaatggtttctgtttgaacactcggcctgggtatgaatgctactgtaagcaagggacgtactatgatcctgtgaaactgcagtgctttgatatggatgaatgtcaagaccccagtagttgtattgatggccagtgtgttaatacagagggctcttacaactgcttctgtactcaccccatggtcctggatgcgtcagaaaaaagatgtatacgaccggctgagtcaaacgaacaaatagaagaaactgatgtctaccaagatttgtgctgggaacatctgagtgatgaatacgtgtgtagccggcctcttgtgggcaagcagacaacgtacactgagtgctgctgtctgtatggagaggcctggggcatgcagtgtgccctctgccccctgaaggattcagatgactatgctcagctgtgtaacatccccgtgacgggacgccggcagccatatggacgggacgccttggttgacttcagtgaacagtatactccagaagccgatccctacttcatccaagaccgttttctaaatagctttgaggagttacaggctgaggaatgcggcatcctcaatggatgtgaaaatggtcgctgtgtgagggtccaggaaggttacacctgcgattgctttgatgggtatcacttggatacggccaagatgacctgtgtcgatgtaaatgaatgcgatgagttgaacaaccggatgtctctctgcaagaatgccaagtgcattaacaccgatggttcctacaagtgtttgtgtctgccaggctacgtgccttctgacaagccaaactactgcactccgttgaataccgccttgaatttagagaaagacagtgacctggagtgaaacagaatctacataacctaagcccatatactctgcactgtgtaaaggaaaagggagaaatgtattatacttgagacattgcacctaccccggaaggctggaaatacagaaacagcatggagttgcaagtcctctgaagacaatgagaggatttaggatgagcccgataggtgtggcagaccaaatggacatttctctaaaaaaccagtatatatagtctgttcatatgtaaaattcaatggaagagaggtggaacagtgctgttattttaaacagaaggttgtattattatgttgttttgtttttttactattgcttgattaaatttggcatttaaatagtggtggaaatattttatataattttcattttttggttgtgcagttccttggctactgtttttcttttacttcagttttttaaaaatctcaaatgaaaaagtcttcgatacaatattgttaagctgtattataagtattgttacacagggttatgcaattcccggcctggagcatttttgaaattcaaattgtctgtcctgtggagcaggcagtgattttgttccaaaactttgtatacacatttggagaaaagtactttatattttcagtgttttgtctgattttaatgtccgttcttagccaagctgctagcaggtgttaattggatccctttccttcactgaaatggaagagtttataagcttacgttagtattgtaatatgtaaagtaagcccaacaaaaatttttaaaaatttgatgatccccaatatatctaccattgtatgttaaataaatcaccatttttgtagaaaaaattctacctgagagtaattgtcaatgagtacatgtgtataagttgtatcccactctccccacttttatcttttccagtggtcttctgttaatgtagtgtcttttacaagttaatcattaaatttgttagatcttgttatgggctaaattgttt

SEQ ID NO: 452659 - DNA, 3933 bp, Homo sapiens
ctctttccttaaacctgaattcggcacgaggtgggctctctcttttcccctcttgctcctttcttttctttttttctgtttttttaaaccttccaaggcaagttcatggatactaagctgatgtgtttgttgttctttttctccctgcctccgctcctagtgagtaaccacactggccgcatcaaggtggtctttactccgagcatctgtaaagtgacctgcaccaagggcagctgtcagaacagctgtgagaaggggaacaccaccactctcattagtgagaatggtcatgctgccgacaccctgacggccacgaacttccgagtggtaatttgccatcttccatgtatgaatggtggccagtgcagttcaagggacaaatgtcagtgccctccaaatttcacaggaaaactttgtcagatcccagtccatggtgccagcgtgcctaaactttatcagcattcccagcagccaggcaaggcgttggggacgcatgtcatccattcaacacataccttgcctctgaccgtgactagccagcaaggagtcaaagtgaaatttcctcctaacatagtcaatatccatgtgaaacatcctcctgaagcttccgtccagatacatcaggtttcaagaattgatggcccaacaggccagaagacaaaagaagctcaaccaggccaatcccaagtctcgtaccaagggcttcctgtccagaagacccagaccatacattccacatactcccaccagcaggtcattcctcacgtctaccccgtggctgctaagacacagcttggccggtgcttccaggaaaccattgggtcacagtgtggcaaagcgctccctggcctttcaaagcaagaggactgctgtggaactgtgggtacctcctggggctttaacaaatgccagaaatgccccaagaaaccatcttatcatggatacaaccaaatgatggaatgcctaccgggttataagcgggttaacaacaccttttgccaagatattaatgaatgtcagctacaaggtgtatgccctaatggtgagtgtttgaataccatgggcagctatcgatgtacctgcaaaataggatttgggccggatcctaccttttcaagttgtgttcctgatccccctgtgatctcggaagagaaagggccctgttaccgacttgtcagttctggaagacagtgtatgtaccctctgtctgttcacctcaccaagcagctctgctgttgtagtgtgggcaaggctggggcccacactgtgagaaatgtccccttccaggcacagctgcttttaaggaaatctgtcctggtggaatgggttatacggtttctggcgttcatagacgcaggccaatccatcaccatgtaggtaaaggacctgtatttgtcaagccaaagaacactcaacctgttgctaaaagtactcatcctccacctctcccagccaaggaagagccagtggaggccctgaccttctcccgggaacacgggccaggagtggcggagccagaagtggcaactgcaccccctgaaaaggaaataccttcattggatcaagagaaaaccaaacttgagcctggtcaaccccagctgtctccaggcatttccgctattcatctgcatccacagtttccagtagtgattgaaaaaacatcacctcctgtgcctgttgaagtagctcctgaagcttctacgtctagtgccagccaagtgattgctcctactcaagtgacagaaatcaatgaatgtactgtgaaccctgatatctgtggagcaggacactgcattaacctaccagtgagatatacctgtatatgctacgagggctacaggttcagtgaacaacagaggaaatgtgtggatattgatgagtgtactcaggtccaacacctctgctcccagggccgctgtgaaaacaccgagggaagtttcttgtgcatttgcccagcaggatttatggccagtgaggagggtactaactgcatagatgttgacgaatgcctgaggccggacgtctgtggggaggggcactgtgtcaatactgtgggggccttccggtgtgaatactgtgacagcgggtaccgcatgactcagagaggccgttgtgaggatattgatgaatgtttgaatccaagcacttgtccagatgagcagtgtgtgaattctcctggatcttaccagtgcgttccctgcacagaaggattccgaggctggaatggacagtgccttgatgtggacgagtgcctggaaccaaacgtctgcgcaaatggtgattgttccaaccttgaaggctcctacatgtgttcatgccacaaaggctatacccggactccggaccacaagcactgtagagatattgatgaatgtcagcaagggaatctatgtgtaaacgggcagtgcaaaaataccgagggctccttcaggtgcacctgtggacaggggtaccagctgtcggcagctaaagaccagtgtgaagacattgatgaatgccagcaccgtcatctctgtgctcatgggcagtgcaggaacactgagggctcttttcaatgtgtgtgtgaccagggttacagagcatctgggcttggagaccactgtgaagatatcaatgaatgcttggaggacaagagtgtttgccagagaggagactgcattaatactgcagggtcctatgattgtacttgtccggatggatttcagctagatgacaataaaacatgtcaagatattaatgaatgtgaacatccagggctctgtggtccgcaaggggagtgcctaaacacagagggttctttccattgtgtctgccagcagggtttctcaatctctgcagatggccgtacgtgtgaagatattgatgaatgtgtaaacaacactgtttgtgacagtcacgggttttgtgacaatacagctggctccttccgctgcctctgttatcagggctttcaagccccacaggatgggcaagggtgtgtggatgtgaatgaatgtgaactgctcagtggggtgtgtggtgaagccttctgtgaaaacgtggaagggtccttcctgtgcgtgtgtgctgatgaaaaccaagagtacagccccatgactgggcagtgccgctcccggacctccacagatttagatgtagatgtagatcaacccaaagaagaaaagaaagaatgctactataatctcaatgacgccagtctctgtgataatgtgttggcccccaatgtcacgaaacaagaatgctgctgtacatcaggcgcgggatggggagataactgcgaaatcttcccctgcccggtcttgggaactgctgagttcactgaaatgtgtcccaaagggaaaggttttgtgcctgctggagaatcatcttctgaagctggtggtgagaactataaagatgcagatgaatgcctactttttggacaagaaatctgcaaaaatggtttctgtttgaacactcggcctgggtatgaatgctactgtaagcaagggacgtactatgatcctgtgaaactgcagtgctttgatatggatgaatgtcaagaccccagtagttgtattgatggccagtgtgttaatacagagggctcttacaactgcttctgtactcaccccatggtcctggatgcgtcagaaaaaagatgtatacgaccggctgagtcaaacgaacaaatagaagaaactgatgtctaccaagatttgtgctgggaacatctgagtgatgaatacgtgtgtagccggcctcttgtgggcaagcagacaacgtacactgagtgctgctgtctgtatggagaggcctggggcatgcagtgtgccctctgccccctgaaggattcagatgactatgctcagctgtgtaacatccccgtgacgggacaatccagcagcccaggaggtcgacgcggccgcgaatttagtagtagtaggcggccgc

SEQ ID NO: 452660 - DNA, 3381 bp, Homo sapiens
ctctttccttaaacctgaattcggcacgaggtgggctctctcttttcccctcttgctcctttcttttctttttttctgtttttttaaaccttccaaggcaagttcatggatactaagctgatgtgtttgttgttctttttctccctgcctccgctcctagtgagtaaccacactggccgcatcaaggtggtctttactccgagcatctgtaaagtgacctgcaccaagggcagctgtcagaacagctgtgagaaggggaacaccaccactctcattagtgagaatggtcatgctgccgacaccctgacggccacgaacttccgagtggtaatttgccatcttccatgtatgaatggtggccagtgcagttcaagggacaaatgtcagtgccctccaaatttcacaggaaaactttgtcagatcccagtccatggtgccagcgtgcctaaactttatcagcattcccagcagccaggcaaggcgttggggacgcatgtcatccattcaacacataccttgcctctgaccgtgactagccagcaaggagtcaaagtgaaatttcctcctaacatagtcaatatccatgtgaaacatcctcctgaagcttccgtccagatacatcaggtttcaagaattgatggcccaacaggccagaagacaaaagaagctcaaccaggccaatcccaagtctcgtaccaagggcttcctgtccagaagacccagaccatacattccacatactcccaccagcaggtcattcctcacgtctaccccgtggctgctaagacacagcttggccggtgcttccaggaaaccattgggtcacagtgtggcaaagcgctccctggcctttcaaagcaagaggactgctgtggaactgtgggtacctcctggggctttaacaaatgccagaaatgccccaagaaaccatcttatcatggatacaaccaaatgatggaatgcctaccgggttataagcgggttaacaacaccttttgccaagatattaatgaatgtcagctacaaggtgtatgccctaatggtgagtgtttgaataccatgggcagctatcgatgtacctgcaaaataggatttgggccggatcctaccttttcaagttgtgttcctgatccccctgtgatctcggaagagaaagggccctgttaccgacttgtcagttctggaagacagtgtatgtaccctctgtctgttcacctcaccaagcagctctgctgttgtagtgtgggcaaggctggggcccacactgtgagaaatgtccccttccaggcacagctgcttttaaggaaatctgtcctggtggaatgggttatacggtttctggcgttcatagacgcaggccaatccatcaccatgtaggtaaaggacctgtatttgtcaagccaaagaacactcaacctgttgctaaaagtactcatcctccacctctcccagccaaggaagagccagtggaggccctgaccttctcccgggaacacgggccaggagtggcggagccagaagtggcaactgcaccccctgaaaaggaaataccttcattggatcaagagaaaaccaaacttgagcctggtcaaccccagctgtctccaggcatttccgctattcatctgcatccacagtttccagtagtgattgaaaaaacatcacctcctgtgcctgttgaagtagctcctgaagcttctacgtctagtgccagccaagtgattgctcctactcaagtgacagaaatcaatgaatgtactgtgaaccctgatatctgtggagcaggacactgcattaacctaccagtgagatatacctgtatatgctacgagggctacaggttcagtgaacaacagaggaaatgtgtggatattgatgagtgtactcaggtccaacacctctgctcccagggccgctgtgaaaacaccgagggaagtttcttgtgcatttgcccagcaggatttatggccagtgaggagggtactaactgcatagatgttgacgaatgcctgaggccggacgtctgtggggaggggcactgtgtcaatactgtgggggccttccggtgtgaatactgtgacagcgggtaccgcatgactcagagaggccgttgtgaggatattgatgaatgtttgaatccaagcacttgtccagatgagcagtgtgtgaattctcctggatcttaccagtgcgttccctgcacagaaggattccgaggctggaatggacagtgccttgatgtggacgagtgcctggaaccaaacgtctgcgcaaatggtgattgttccaaccttgaaggctcctacatgtgttcatgccacaaaggctatacccggactccggaccacaagcactgtagagatattgatgaatgtcagcaagggaatctatgtgtaaacgggcagtgcaaaaataccgagggctccttcaggtgcacctgtggacaggggtaccagctgtcggcagctaaagaccagtgtgaagacattgatgaatgccagcaccgtcatctctgtgctcatgggcagtgcaggaacactgagggctcttttcaatgtgtgtgtgaccagggttacagagcatctgggcttggagaccactgtgaagatatcaatgaatgcttggaggacaagagtgtttgccagagaggagactgcattaatactgcagggtcctatgattgtacttgtccggatggatttcagctagatgacaataaaacatgtcaagatattaatgaatgtgaacatccagggctctgtggtccgcaaggggagtgcctaaacacagagggttctttccattgtgtctgccagcagggtttctcaatctctgcagatggccgtacgtgtgaagatattgatgaatgtgtaaacaacactgtttgtgacagtcacgggttttgtgacaatacagctggctccttccgctgcctctgttatcagggctttcaagccccacaggatgggcaagggtgtgtggatgtgaatgaatgtgaactgctcagtggggtgtgtggtgaagccttctgtgaaaacgtggaagggtccttcctgtgcgtgtgtgctgatgaaaaccaagagtacagccccatgactgggcagtgccgctcccggacctccacagatttagatgtagatgtagatcaacccaaagaagaaaagaaagaatgctactataatctcaatgacgccagtctctgtgataatgtgttggcccccaatgtcacgaaacaagaatgctgctgtacatcaggcgcgggatggggagataactgcgaaatcttcccctgcccggtcttgggaactgctgagttcactgaaatgtgtcccaaagggaaaggttttgtgcctgctttcgatgtgccaagtgtggcaaagg

SEQ ID NO: 452661 - DNA, 1182 bp, Homo sapiens
ctctttccttaaacctgaattcggcacgaggtgggctctctcttttcccctcttgctcctttcttttctttttttctgtttttttaaaccttccaaggcaagttcatggatactaagctgatgtgtttgttgttctttttctccctgcctccgctcctagtgagtaaccacactggccgcatcaaggtggtctttactccgagcatctgtaaagtgacctgcaccaagggcagctgtcagaacagctgtgagaaggggaacaccaccactctcattagtgagaatggtcatgctgccgacaccctgacggccacgaacttccgagtggtaatttgccatcttccatgtatgaatggtggccagtgcagttcaagggacaaatgtcagtgccctccaaatttcacaggaaaactttgtcagatcccagtccatggtgccagcgtgcctaaactttatcagcattcccagcagccaggcaaggcgttggggacgcatgtcatccattcaacacataccttgcctctgaccgtgactagccagcaaggagtcaaagtgaaatttcctcctaacatagtcaatatccatgtgaaacatcctcctgaagcttccgtccagatacatcaggtttcaagaattgatggcccaacaggccagaagacaaaagaagctcaaccaggccaatcccaagtctcgtaccaagggcttcctgtccagaagacccagaccatacattccacatactcccaccagcaggtcattcctcacgtctaccccgtggctgctaagacacagcttggccggtgcttccaggaaaccattgggtcacagtgtggcaaagcgctccctggcctttcaaagcaagaggactgctgtggaactgtgggtacaagccatccttttgcctcagtatcccaactagctgggtctacaggcatgagccaccatgcccgggtaattaacaaatttttttttgtagagatgggggtctcactatgttgctctggctgatctcaaattcctggcctcaagtgatctttctgccacagctttttaaagtgctaggattacaggcatgagccaccatgcctaatatagagtgtaatatcactttcaagtcttattcctagacccatttattgacctgtggcctaaataactcatatgagatctctgaagcttcct

SEQ ID NO: 452662 - DNA, 225 bp, Homo sapiens
cgctgtgaaaacaccgagggaagtttcttgtgcatttgcccagcaggatttatggccagtgaggagggtactaactgcataggtaatggcagcattcttcctgcttacaaattcttagatctgagtttttagatcccctaagactatcatcagttcagtgcttatccagacaacccagaattttttattaaacaattatcatgacagcagtctgctagatcccag

SEQ ID NO: 452663 - DNA, 428 bp, Homo sapiens
caacaggccagaagacaaaagaagctcaaccaggccaatcccaagtctcgtaccaagggcttcctgtccagaagacccagaccatacattccacatactcccaccagcaggtcattcctcacgtctaccccgtggctgctaagacacagcttggccggtgcttccaggaaaccattgggtcacaggtaaacatcatcaccgagcctgctttagcagtgtcttacagatatggtatcattttaacaagaaagccagacttgataaaaatgcttttttaaaaaaaaggctttgacaaactatgacttgtggccatatttttgtaaataaagttttattgccacactcatagccacacttattcatttacatactgtctatgcccattttcatgcgatgactgcagaattaaatagtccagtgagatcata

SEQ ID NO: 452664 - DNA, 5105 bp, Homo sapiens
ctctttccttaaacctgaattcggcacgaggtgggctctctcttttcccctcttgctcctttcttttctttttttctgtttttttaaaccttccaaggcaagttcatggatactaagctgatgtgtttgttgttctttttctccctgcctccgctcctagtgagtaaccacactggccgcatcaaggtggtctttactccgagcatctgtaaagtgacctgcaccaagggcagctgtcagaacagctgtgagaaggggaacaccaccactctcattagtgagaatggtcatgctgccgacaccctgacggccacgaacttccgagtggtaatttgccatcttccatgtatgaatggtggccagtgcagttcaagggacaaatgtcagtgccctccaaatttcacaggaaaactttgtcagatcccagtccatggtgccagcgtgcctaaactttatcagcattcccagcagccaggcaaggcgttggggacgcatgtcatccattcaacacataccttgcctctgaccgtgactagccagcaaggagtcaaagtgaaatttcctcctaacatagtcaatatccatgtgaaacatcctcctgaagcttccgtccagatacatcaggtttcaagaattgatggcccaacaggccagaagacaaaagaagctcaaccaggccaatcccaagtctcgtaccaagggcttcctgtccagaagacccagaccatacattccacatactcccaccagcaggtcattcctcacgtctaccccgtggctgctaagacacagcttggccggtgcttccaggaaaccattgggtcacagtgtggcaaagcgctccctggcctttcaaagcaagaggactgctgtggaactgtgggtacctcctggggctttaacaaatgccagaaatgccccaagaaaccatcttatcatggatacaaccaaatgatggaatgcctaccgggttataagcgggttaacaacaccttttgccaagatattaatgaatgtcagctacaaggtgtatgccctaatggtgagtgtttgaataccatgggcagctatcgatgtacctgcaaaataggatttgggccggatcctaccttttcaagttgtgttcctgatccccctgtgatctcggaagagaaagggccctgttaccgacttgtcagttctggaagacagtgtatgtaccctctgtctgttcacctcaccaagcagctctgctgttgtagtgtgggcaaggctggggcccacactgtgagaaatgtccccttccaggcacagctgcttttaaggaaatctgtcctggtggaatgggttatacggtttctggcgttcatagacgcaggccaatccatcaccatgtaggtaaaggacctgtatttgtcaagccaaagaacactcaacctgttgctaaaagtactcatcctccacctctcccagccaaggaagagccagtggaggccctgaccttctcccgggaacacgggccaggagtggcggagccagaagtggcaactgcaccccctgaaaaggaaataccttcattggatcaagagaaaaccaaacttgagcctggtcaaccccagctgtctccaggcatttccgctattcatctgcatccacagtttccagtagtgattgaaaaaacatcacctcctgtgcctgttgaagtagctcctgaagcttctacgtctagtgccagccaagtgattgctcctactcaagtgacagaaatcaatgaatgtactgtgaaccctgatatctgtggagcaggacactgcattaacctaccagtgagatatacctgtatatgctacgagggctacaggttcagtgaacaacagaggaaatgtgtggatattgatgagtgtactcaggtccaacacctctgctcccagggccgctgtgaaaacaccgagggaagtttcttgtgcatttgcccagcaggatttatggccagtgaggagggtactaactgcatagatgttgacgaatgcctgaggccggacgtctgtggggaggggcactgtgtcaatactgtgggggccttccggtgtgaatactgtgacagcgggtaccgcatgactcagagaggccgttgtgaggatattgatgaatgtttgaatccaagcacttgtccagatgagcagtgtgtgaattctcctggatcttaccagtgcgttccctgcacagaaggattccgaggctggaatggacagtgccttgatgtggacgagtgcctggaaccaaacgtctgcgcaaatggtgattgttccaaccttgaaggctcctacatgtgttcatgccacaaaggctatacccggactccggaccacaagcactgtagagatattgatgaatgtcagcaagggaatctatgtgtaaacgggcagtgcaaaaataccgagggctccttcaggtgcacctgtggacaggggtaccagctgtcggcagctaaagaccagtgtgaagacattgatgaatgccagcaccgtcatctctgtgctcatgggcagtgcaggaacactgagggctcttttcaatgtgtgtgtgaccagggttacagagcatctgggcttggagaccactgtgaagatatcaatgaatgcttggaggacaagagtgtttgccagagaggagactgcattaatactgcagggtcctatgattgtacttgtccggatggatttcagctagatgacaataaaacatgtcaagatattaatgaatgtgaacatccagggctctgtggtccgcaaggggagtgcctaaacacagagggttctttccattgtgtctgccagcagggtttctcaatctctgcagatggccgtacgtgtgaagatattgatgaatgtgtaaacaacactgtttgtgacagtcacgggttttgtgacaatacagctggctccttccgctgcctctgttatcagggctttcaagccccacaggatgggcaagggtgtgtggatgtgaatgaatgtgaactgctcagtggggtgtgtggtgaagccttctgtgaaaacgtggaagggtccttcctgtgcgtgtgtgctgatgaaaaccaagagtacagccccatgactgggcagtgccgctcccggacctccacagatttagatgtagatgtagatcaacccaaagaagaaaagaaagaatgctactataatctcaatgacgccagtctctgtgataatgtgttggcccccaatgtcacgaaacaagaatgctgctgtacatcaggcgcgggatggggagataactgcgaaatcttcccctgcccggtcttgggaactgctgagttcactgaaatgtgtcccaaagggaaaggttttgtgcctgctggagaatcatcttctgaagctggtggtgagaactataaagatgcagatgaatgcctactttttggacaagaaatctgcaaaaatggtttctgtttgaacactcggcctgggtatgaatgctactgtaagcaagggacgtactatgatcctgtgaaactgcagtgctttgatatggatgaatgtcaagaccccagtagttgtattgatggccagtgtgttaatacagagggctcttacaactgcttctgtactcaccccatggtcctggatgcgtcagaaaaaagatgtatacgaccggctgagtcaaacgaacaaatagaagaaactgatgtctaccaagatttgtgctgggaacatctgagtgatgaatacgtgtgtagccggcctcttgtgggcaagcagacaacgtacactgagtgctgctgtctgtatggagaggcctggggcatgcagtgtgccctctgccccctgaaggattcagatgactatgctcagctgtgtaacatccccgtgacgggacgccggcagccatatggacgggacgccttggttgacttcagtgaacagtatactccagaagccgatccctacttcatccaagaccgttttctaaatagctttgaggagttacaggctgaggaatgcggcatcctcaatggatgtgaaaatggtcgctgtgtgagggtccaggaaggttacacctgcgattgctttgatgggtatcacttggatacggccaagatgacctgtgtcgatgtaaatgaatgcgatgagttgaacaaccggatgtctctctgcaagaatgccaagtgcattaacaccgatggttcctacaagtgtttgtgtctgccaggctacgtgccttctgacaagccaaactactgcactccgttgaataccgccttgaatttagagaaagacagtgacctggagtgaaacagaatctacataacctaagcccatatactctgcactgtgtaaaggaaaagggagaaatgtattatacttgagacattgcacctaccccggaaggctggaaatacagaaacagcatggagttgcaagtcctctgaagacaatgagaggatttaggatgagcccgataggtgtggcagaccaaatggacatttctctaaaaaaccagtatatatagtctgttcatatgtaaaattcaatggaagagaggtggaacagtgctgttattttaaacagaaggttgtattattatgttgttttgtttttttactattgcttgattaaatttggcatttaaatagtggtggaaatattttatataattttcattttttggttgtgcagttccttggctactgtttttcttttacttcagttttttaaaaatctcaaatgaaaaagtcttcgatacaatattgttaagctgtattataagtattgttacacagggttatgcaattcccggcctggagcatttttgaaattcaaattgtctgtcctgtggagcaggcagtgattttgttccaaaactttgtatacacatttggagaaaagtactttatattttcagtgttttgtctgattttaatgtccgttcttagccaagctgctagcaggtgttaattggatccctttccttcactgaaatggaagagtttataagcttacgttagtattgtaatatgtaaagtaagcccaacaaaaatttttaaaaatttgatgatccccaatatatctaccattgtatgttaaataaatcaccatttttgtaga

SEQ ID NO: 452665 - DNA, 5174 bp, Homo sapiens
caggagagcagtccactgaaggttctttccctttaagatatgtgcaggatcaagttgcggcaccttttcagctgagtaaccacactggccgcatcaaggtggtctttactccgagcatctgtaaagtgacctgcaccaagggcagctgtcagaacagctgtgagaaggggaacaccaccactctcattagtgagaatggtcatgctgccgacaccctgacggccacgaacttccgagtggtaatttgccatcttccatgtatgaatggtggccagtgcagttcaagggacaaatgtcagtgccctccaaatttcacaggaaaactttgtcagatcccagtccatggtgccagcgtgcctaaactttatcagcattcccagcagccaggcaaggcgttggggacgcatgtcatccattcaacacataccttgcctctgaccgtgactagccagcaaggagtcaaagtgaaatttcctcctaacatagtcaatatccatgtgaaacatcctcctgaagcttccgtccagatacatcaggtttcaagaattgatggcccaacaggccagaagacaaaagaagctcaaccaggccaatcccaagtctcgtaccaagggcttcctgtccagaagacccagaccatacattccacatactcccaccagcaggtcattcctcacgtctaccccgtggctgctaagacacagcttggccggtgcttccaggaaaccattgggtcacagtgtggcaaagcgctccctggcctttcaaagcaagaggactgctgtggaactgtgggtacctcctggggctttaacaaatgccagaaatgccccaagaaaccatcttatcatggatacaaccaaatgatggaatgcctaccgggttataagcgggttaacaacaccttttgccaagatattaatgaatgtcagctacaaggtgtatgccctaatggtgagtgtttgaataccatgggcagctatcgatgtacctgcaaaataggatttgggccggatcctaccttttcaagttgtgttcctgatccccctgtgatctcggaagagaaagggccctgttaccgacttgtcagttctggaagacagtgtatgtaccctctgtctgttcacctcaccaagcagctctgctgttgtagtgtgggcaaggctggggcccacactgtgagaaatgtccccttccaggcacagctgcttttaaggaaatctgtcctggtggaatgggttatacggtttctggcgttcatagacgcaggccaatccatcaccatgtaggtaaaggacctgtatttgtcaagccaaagaacactcaacctgttgctaaaagtactcatcctccacctctcccagccaaggaagagccagtggaggccctgaccttctcccgggaacacgggccaggagtggcggagccagaagtggcaactgcaccccctgaaaaggaaataccttcattggatcaagagaaaaccaaacttgagcctggtcaaccccagctgtctccaggcatttccgctattcatctgcatccacagtttccagtagtgattgaaaaaacatcacctcctgtgcctgttgaagtagctcctgaagcttctacgtctagtgccagccaagtgattgctcctactcaagtgacagaaatcaatgaatgtactgtgaaccctgatatctgtggagcaggacactgcattaacctaccagtgagatatacctgtatatgctacgagggctacaggttcagtgaacaacagaggaaatgtgtggatattgatgagtgtactcaggtccaacacctctgctcccagggccgctgtgaaaacaccgagggaagtttcttgtgcatttgcccagcaggatttatggccagtgaggagggtactaactgcatagatgttgacgaatgcctgaggccggacgtctgtggggaggggcactgtgtcaatactgtgggggccttccggtgtgaatactgtgacagcgggtaccgcatgactcagagaggccgttgtgaggatattgatgaatgtttgaatccaagcacttgtccagatgagcagtgtgtgaattctcctggatcttaccagtgcgttccctgcacagaaggattccgaggctggaatggacagtgccttgatgtggacgagtgcctggaaccaaacgtctgcgcaaatggtgattgttccaaccttgaaggctcctacatgtgttcatgccacaaaggctatacccggactccggaccacaagcactgtagagatattgatgaatgtcagcaagggaatctatgtgtaaacgggcagtgcaaaaataccgagggctccttcaggtgcacctgtggacaggggtaccagctgtcggcagctaaagaccagtgtgaagacattgatgaatgccagcaccgtcatctctgtgctcatgggcagtgcaggaacactgagggctcttttcaatgtgtgtgtgaccagggttacagagcatctgggcttggagaccactgtgaagatatcaatgaatgcttggaggacaagagtgtttgccagagaggagactgcattaatactgcagggtcctatgattgtacttgtccggatggatttcagctagatgacaataaaacatgtcaagatattaatgaatgtgaacatccagggctctgtggtccgcaaggggagtgcctaaacacagagggttctttccattgtgtctgccagcagggtttctcaatctctgcagatggccgtacgtgtgaagatattgatgaatgtgtaaacaacactgtttgtgacagtcacgggttttgtgacaatacagctggctccttccgctgcctctgttatcagggctttcaagccccacaggatgggcaagggtgtgtggatgtgaatgaatgtgaactgctcagtggggtgtgtggtgaagccttctgtgaaaacgtggaagggtccttcctgtgcgtgtgtgctgatgaaaaccaagagtacagccccatgactgggcagtgccgctcccggacctccacagatttagatgtagatgtagatcaacccaaagaagaaaagaaagaatgctactataatctcaatgacgccagtctctgtgataatgtgttggcccccaatgtcacgaaacaagaatgctgctgtacatcaggcgcgggatggggagataactgcgaaatcttcccctgcccggtcttgggaactgctgagttcactgaaatgtgtcccaaagggaaaggttttgtgcctgctggagaatcatcttctgaagctggtggtgagaactataaagatgcagatgaatgcctactttttggacaagaaatctgcaaaaatggtttctgtttgaacactcggcctgggtatgaatgctactgtaagcaagggacgtactatgatcctgtgaaactgcagtgctttgatatggatgaatgtcaagaccccagtagttgtattgatggccagtgtgttaatacagagggctcttacaactgcttctgtactcaccccatggtcctggatgcgtcagaaaaaagatgtatacgaccggctgagtcaaacgaacaaatagaagaaactgatgtctaccaagatttgtgctgggaacatctgagtgatgaatacgtgtgtagccggcctcttgtgggcaagcagacaacgtacactgagtgctgctgtctgtatggagaggcctggggcatgcagtgtgccctctgccccctgaaggattcagatgactatgctcagctgtgtaacatccccgtgacgggacgccggcagccatatggacgggacgccttggttgacttcagtgaacagtatactccagaagccgatccctacttcatccaagaccgttttctaaatagctttgaggagttacaggctgaggaatgcggcatcctcaatggatgtgaaaatggtcgctgtgtgagggtccaggaaggttacacctgcgattgctttgatgggtatcacttggatacggccaagatgacctgtgtcgatgtaaatgaatgcgatgagttgaacaaccggatgtctctctgcaagaatgccaagtgcattaacaccgatggttcctacaagtgtttgtgtctgccaggctacgtgccttctgacaagccaaactactgcactccgttgaataccgccttgaatttagagaaagacagtgacctggagtgaaacagaatctacataacctaagcccatatactctgcactgtgtaaaggaaaagggagaaatgtattatacttgagacattgcacctaccccggaaggctggaaatacagaaacagcatggagttgcaagtcctctgaagacaatgagaggatttaggatgagcccgataggtgtggcagaccaaatggacatttctctaaaaaaccagtatatatagtctgttcatatgtaaaattcaatggaagagaggtggaacagtgctgttattttaaacagaaggttgtattattatgttgttttgtttttttactattgcttgattaaatttggcatttaaatagtggtggaaatattttatataattttcattttttggttgtgcagttccttggctactgtttttcttttacttcagttttttaaaaatctcaaatgaaaaagtcttcgatacaatattgttaagctgtattataagtattgttacacagggttatgcaattcccggcctggagcatttttgaaattcaaattgtctgtcctgtggagcaggcagtgattttgttccaaaactttgtatacacatttggagaaaagtactttatattttcagtgttttgtctgattttaatgtccgttcttagccaagctgctagcaggtgttaattggatccctttccttcactgaaatggaagagtttataagcttacgttagtattgtaatatgtaaagtaagcccaacaaaaatttttaaaaatttgatgatccccaatatatctaccattgtatgttaaataaatcaccatttttgtagaaaaaattctacctgagagtaattgtcaatgagtacatgtgtataagttgtatcccactctccccacttttatcttttccagtggtcttctgttaatgtagtgtcttttacaagttaatcattaaatttgttagatcttgttatgggctaaattgttt

SEQ ID NO: 452666 - DNA, 2524 bp, Homo sapiens
actagaggatacccatatcatagtaagtcacaaggggagtgcctaaacacagagggttctttccattgtgtctgccagcagggtttctcaatctctgcagatggccgtacgtgtgaagatattgatgaatgtgtaaacaacactgtttgtgacagtcacgggttttgtgacaatacagctggctccttccgctgcctctgttatcagggctttcaagccccacaggatgggcaagggtgtgtggatgtgaatgaatgtgaactgctcagtggggtgtgtggtgaagccttctgtgaaaacgtggaagggtccttcctgtgcgtgtgtgctgatgaaaaccaagagtacagccccatgactgggcagtgccgctcccggacctccacagatttagatgtagatgtagatcaacccaaagaagaaaagaaagaatgctactataatctcaatgacgccagtctctgtgataatgtgttggcccccaatgtcacgaaacaagaatgctgctgtacatcaggcgcgggatggggagataactgcgaaatcttcccctgcccggtcttgggaactgctgagttcactgaaatgtgtcccaaagggaaaggttttgtgcctgctggagaatcatcttctgaagctggtggtgagaactataaagatgcagatgaatgcctactttttggacaagaaatctgcaaaaatggtttctgtttgaacactcggcctgggtatgaatgctactgtaagcaagggacgtactatgatcctgtgaaactgcagtgctttgatatggatgaatgtcaagaccccagtagttgtattgatggccagtgtgttaatacagagggctcttacaactgcttctgtactcaccccatggtcctggatgcgtcagaaaaaagatgtatacgaccggctgagtcaaacgaacaaatagaagaaactgatgtctaccaagatttgtgctgggaacatctgagtgatgaatacgtgtgtagccggcctcttgtgggcaagcagacaacgtacactgagtgctgctgtctgtatggagaggcctggggcatgcagtgtgccctctgccccctgaaggattcagatgactatgctcagctgtgtaacatccccgtgacgggacgccggcagccatatggacgggacgccttggttgacttcagtgaacagtatactccagaagccgatccctacttcatccaagaccgttttctaaatagctttgaggagttacaggctgaggaatgcggcatcctcaatggatgtgaaaatggtcgctgtgtgagggtccaggaaggttacacctgcgattgctttgatgggtatcacttggatacggccaagatgacctgtgtcgatgtaaatgaatgcgatgagttgaacaaccggatgtctctctgcaagaatgccaagtgcattaacaccgatggttcctacaagtgtttgtgtctgccaggctacgtgccttctgacaagccaaactactgcactccgttgaataccgccttgaatttagagaaagacagtgacctggagtgaaacagaatctacataacctaagcccatatactctgcactgtgtaaaggaaaagggagaaatgtattatacttgagacattgcacctaccccggaaggctggaaatacagaaacagcatggagttgcaagtcctctgaagacaatgagaggatttaggatgagcccgataggtgtggcagaccaaatggacatttctctaaaaaaccagtatatatagtctgttcatatgtaaaattcaatggaagagaggtggaacagtgctgttattttaaacagaaggttgtattattatgttgttttgtttttttactattgcttgattaaatttggcatttaaatagtggtggaaatattttatataattttcattttttggttgtgcagttccttggctactgtttttcttttacttcagttttttaaaaatctcaaatgaaaaagtcttcgatacaatattgttaagctgtattataagtattgttacacagggttatgcaattcccggcctggagcatttttgaaattcaaattgtctgtcctgtggagcaggcagtgattttgttccaaaactttgtatacacatttggagaaaagtactttatattttcagtgttttgtctgattttaatgtccgttcttagccaagctgctagcaggtgttaattggatccctttccttcactgaaatggaagagtttataagcttacgttagtattgtaatatgtaaagtaagcccaacaaaaatttttaaaaatttgatgatccccaatatatctaccattgtatgttaaataaatcaccatttttgtagaaaaaattctacctgagagtaattgtcaatgagtacatgtgtataagttgtatcccactctccccacttttatcttttccagtggtcttctgttaatgtagtgtcttttacaagttaatcattaaatttgttagatcttgttatgggctaaattgttt

SEQ ID NO: 452667 - DNA, 2126 bp, Homo sapiens
ctctttccttaaacctgaattcggcacgaggtgggctctctcttttcccctcttgctcctttcttttctttttttctgtttttttaaaccttccaaggcaagttcatggatactaagctgatgtgtttgttgttctttttctccctgcctccgctcctagtgagtaaccacactggccgcatcaaggtggtctttactccgagcatctgtaaagtgacctgcaccaagggcagctgtcagaacagctgtgagaaggggaaatgcagatgaatgcctactttttggacaagaaatctgcaaaaatggtttctgtttgaacactcggcctgggtatgaatgctactgtaagcaagggacgtactatgatcctgtgaaactgcagtgctttgatatggatgaatgtcaagaccccagtagttgtattgatggccagtgtgttaatacagagggctcttacaactgcttctgtactcaccccatggtcctggatgcgtcagaaaaaagatgtatacgaccggctgagtcaaacgaacaaatagaagaaactgatgtctaccaagatttgtgctgggaacatctgagtgatgaatacgtgtgtagccggcctcttgtgggcaagcagacaacgtacactgagtgctgctgtctgtatggagaggcctggggcatgcagtgtgccctctgccccctgaaggattcagatgactatgctcagctgtgtaacatccccgtgacgggacgccggcagccatatggacgggacgccttggttgacttcagtgaacagtatactccagaagccgatccctacttcatccaagaccgttttctaaatagctttgaggagttacaggctgaggaatgcggcatcctcaatggatgtgaaaatggtcgctgtgtgagggtccaggaaggttacacctgcgattgctttgatgggtatcacttggatacggccaagatgacctgtgtcgatgtaaatgaatgcgatgagttgaacaaccggatgtctctctgcaagaatgccaagtgcattaacaccgatggttcctacaagtgtttgtgtctgccaggctacgtgccttctgacaagccaaactactgcactccgttgaataccgccttgaatttagagaaagacagtgacctggagtgaaacagaatctacataacctaagcccatatactctgcactgtgtaaaggaaaagggagaaatgtattatacttgagacattgcacctaccccggaaggctggaaatacagaaacagcatggagttgcaagtcctctgaagacaatgagaggatttaggatgagcccgataggtgtggcagaccaaatggacatttctctaaaaaaccagtatatatagtctgttcatatgtaaaattcaatggaagagaggtggaacagtgctgttattttaaacagaaggttgtattattatgttgttttgtttttttactattgcttgattaaatttggcatttaaatagtggtggaaatattttatataattttcattttttggttgtgcagttccttggctactgtttttcttttacttcagttttttaaaaatctcaaatgaaaaagtcttcgatacaatattgttaagctgtattataagtattgttacacagggttatgcaattcccggcctggagcatttttgaaattcaaattgtctgtcctgtggagcaggcagtgattttgttccaaaactttgtatacacatttggagaaaagtactttatattttcagtgttttgtctgattttaatgtccgttcttagccaagctgctagcaggtgttaattggatccctttccttcactgaaatggaagagtttataagcttacgttagtattgtaatatgtaaagtaagcccaacaaaaatttttaaaaatttgatgatccccaatatatctaccattgtatgttaaataaatcaccatttttgtagaaaaaattctacctgagagtaattgtcaatgagtacatgtgtataagttgtatcccactctccccacttttatcttttccagtggtcttctgttaatgtagtgtcttttacaagttaatcattaaatttgttagatcttgttatgggctaaattgttt

SEQ ID NO: 452668 - DNA, 1330 bp, Homo sapiens
ccggtcctctccctaggtatccgtagacgttttctaaatagctttgaggagttacaggctgaggaatgcggcatcctcaatggatgtgaaaatggtcgctgtgtgagggtccaggaaggttacacctgcgattgctttgatgggtatcacttggatacggccaagatgacctgtgtcgatgtaaatgaatgcgatgagttgaacaaccggatgtctctctgcaagaatgccaagtgcattaacaccgatggttcctacaagtgtttgtgtctgccaggctacgtgccttctgacaagccaaactactgcactccgttgaataccgccttgaatttagagaaagacagtgacctggagtgaaacagaatctacataacctaagcccatatactctgcactgtgtaaaggaaaagggagaaatgtattatacttgagacattgcacctaccccggaaggctggaaatacagaaacagcatggagttgcaagtcctctgaagacaatgagaggatttaggatgagcccgataggtgtggcagaccaaatggacatttctctaaaaaaccagtatatatagtctgttcatatgtaaaattcaatggaagagaggtggaacagtgctgttattttaaacagaaggttgtattattatgttgttttgtttttttactattgcttgattaaatttggcatttaaatagtggtggaaatattttatataattttcattttttggttgtgcagttccttggctactgtttttcttttacttcagttttttaaaaatctcaaatgaaaaagtcttcgatacaatattgttaagctgtattataagtattgttacacagggttatgcaattcccggcctggagcatttttgaaattcaaattgtctgtcctgtggagcaggcagtgattttgttccaaaactttgtatacacatttggagaaaagtactttatattttcagtgttttgtctgattttaatgtccgttcttagccaagctgctagcaggtgttaattggatccctttccttcactgaaatggaagagtttataagcttacgttagtattgtaatatgtaaagtaagcccaacaaaaatttttaaaaatttgatgatccccaatatatctaccattgtatgttaaataaatcaccatttttgtagaaaaaattctacctgagagtaattgtcaatgagtacatgtgtataagttgtatcccactctccccacttttatcttttccagtggtcttctgttaatgtagtgtcttttacaagttaatcattaaatttgttagatcttgttatgggctaaattgttt

SEQ ID NO: 452669 - DNA, 3102 bp, Homo sapiens
ctctttccttaaacctgaattcggcacgaggtgggctctctcttttcccctcttgctcctttcttttctttttttctgtttttttaaaccttccaaggcaagttcatggatactaagctgatgtgtttgttgttctttttctccctgcctccgctcctagtgagtaaccacactggccgcatcaaggtggtctttactccgagcatctgtaaagtgacctgcaccaagggcagctgtcagaacagctgtgagaaggggaacaccaccactctcattagtgagaatggtcatgctgccgacaccctgacggccacgaacttccgagtggtaatttgccatcttccatgtatgaatggtggccagtgcagttcaagggacaaatgtcagtgccctccaaatttcacaggaaaactttgtcagatcccagtccatggtgccagcgtgcctaaactttatcagcattcccagcagccaggcaaggcgttggggacgcatgtcatccattcaacacataccttgcctctgaccgtgactagccagcaaggagtcaaagtgaaatttcctcctaacatagtcaatatccatgtgaaacatcctcctgaagcttccgtccagatacatcaggtttcaagaattgatggcccaacaggccagaagacaaaagaagctcaaccaggccaatcccaagtctcgtaccaagggcttcctgtccagaagacccagaccatacattccacatactcccaccagcaggtcattcctcacgtctaccccgtggctgctaagacacagcttggccggtgcttccaggaaaccattgggtcacagtgtggcaaagcgctccctggcctttcaaagcaagaggactgctgtggaactgtgggtacctcctggggctttaacaaatgccagaaatgccccaagaaaccatcttatcatggatacaaccaaatgatggaatgcctaccgggttataagcgggttaacaacaccttttgccaagatattaatgaatgtcagctacaaggtgtatgccctaatggtgagtgtttgaataccatgggcagctatcgatgtacctgcaaaataggatttgggccggatcctaccttttcaagttgtgttcctgatccccctgtgatctcggaagagaaagggccctgttaccgacttgtcagttctggaagacagtgtatgtaccctctgtctgttcacctcaccaagcagctctgctgttgtagtgtgggcaaggctggggcccacactgtgagaaatgtccccttccaggcacagctgcttttaaggaaatctgtcctggtggaatgggttatacggtttctggcgttcatagacgcaggccaatccatcaccatgtaggtaaaggacctgtatttgtcaagccaaagaacactcaacctgttgctaaaagtactcatcctccacctctcccagccaaggaagagccagtggaggccctgaccttctcccgggaacacgggccaggagtggcggagccagaagtggcaactgcaccccctgaaaaggaaataccttcattggatcaagagaaaaccaaacttgagcctggtcaaccccagctgtctccaggcatttccgctattcatctgcatccacagtttccagtagtgattgaaaaaacatcacctcctgtgcctgttgaagtagctcctgaagcttctacgtctagtgccagccaagtgattgctcctactcaagtgacagaaatcaatgaatgtactgtgaaccctgatatctgtggagcaggacactgcattaacctaccagtgagatatacctgtatatgctacgagggctacaggttcagtgaacaacagaggaaatgtgtggatattgatgagtgtactcaggtccaacacctctgctcccagggccgctgtgaaaacaccgagggaagtttcttgtgcatttgcccagcaggatttatggccagtgaggagggtactaactgcatagatgttgacgaatgcctgaggccggacgtctgtggggaggggcactgtgtcaatactgtgggggccttccggtgtgaatactgtgacagcgggtaccgcatgactcagagaggccgttgtgaggatattgatgaatgtttgaatccaagcacttgtccagatgagcagtgtgtgaattctcctggatcttaccagtgcgttccctgcacagaaggattccgaggctggaatggacagtgccttgatgtggacgagtgcctggaaccaaacgtctgcgcaaatggtgattgttccaaccttgaaggctcctacatgtgttcatgccacaaaggctatacccggactccggaccacaagcactgtagagatattgatgaatgtcagcaagggaatctatgtgtaaacgggcagtgcaaaaataccgagggctccttcaggtgcacctgtggacaggggtaccagctgtcggcagctaaagaccagtgtgaagacattgatgaatgccagcaccgtcatctctgtgctcatgggcagtgcaggaacactgagggctcttttcaatgtgtgtgtgaccagggttacagagcatctgggcttggagaccactgtgaagatatcaatgaatgcttggaggacaagagtgtttgccagagaggagactgcattaatactgcagggtcctatgattgtacttgtccggatggatttcagctagatgacaataaaacatgtcaagatattaatgaatgtgaacatccagggctctgtggtccgcaaggggagtgcctaaacacagagggttctttccattgtgtctgccagcagggtttctcaatctctgcagatggccgtacgtgtgaagcttctgtttgaggagctgaagcctcgttgacaccagggctgacctgcccggctctaagcagggctaaataactcccacatagctgaaggaaggagggcccttccctgatttcccgtgacttggagaagtgtcagcatctggtcgtagttaatgaaccacaatgaagaggcaaactctgtcaacatgaattgtctttaagtgtagcatggcagcttctatagcaataaaaatggcaccactggctcc

SEQ ID NO: 452670 - DNA, 515 bp, Homo sapiens
gaatggtggccagtgcagttcaagggacaaatgtcagtgccctccaaatttcacaggaaaactttgtcagatcccagtccatggtgccagcgtgcctaaactttatcagcattcccagcagccaggcaaggcgttggggacgcatgtcatccattcaacacataccttgcctctgaccgtgactagccagcaaggagtcaaaggtaagcttttttcattccgcccatttgccagacctctgttaacctgccaaacccacatagaagtcaaggatctgcgggtggccagggctggtattgaaacagaaaggagtacatgatttgtggcctgagaaatggcagtagagacagaatgtgggcccaggtatgtagctgcagtactttctaggccatagagagttagtgtctaggaaataagaaaataaaaaggagcccattcttctctagtgattctttaccaccaagagctaataaatgtgcatggtactgttctgacaaggcctgggaaatagaaag

SEQ ID NO: 452671 - DNA, 3743 bp, Homo sapiens
gagaggcgggggattggtatgcgagcgaatgtgcgaggggagggaggcgtcccggcggagcgtggtactacgaccagcgcgggccggagggggcggggggatgcgccgcggcggcggcggcgcgggagctggggttggtgtttggcggcgccagagcagcggatcccggtctcgccgcagcagcagcgcgggtgtcgtgcaccgcctgaagacgccgtacctttctaccctcccacctttttttttttttttttaaataaccggaaccaatgaacgcagccgggatcagagctccggaggccgccggtgccgatgggaccaggctggcgcccggcgggagcccgtgtctgaggcggcgggggcggccggaggagtcgccggcggcggtggtggcgcctcgcggagccggcgagctgcaggcggccggggcgccgctgcgctttcacccggcttctcctcggcgccttcatcccgcctcgactcctggcccagcgtggggctggctgctgcggcggcggcgctgggctgcgttgctggtgctcgggctgctggtagccggagcggcggacggatgcgagcttgtgccccggcacctccgcgggcggcgggcgactggctctgccgcaactgccgcctcctctcccgccgcggcggccggcgatagcccggcgctcatgacagatccctgcatgtcactgagtccaccatgctttacagaagaagacagatttagtctggaagctcttcaaacaatacataaacaaatggatgatgacaaagatggtggaattgaagtagaggaaagtgatgaattcatcagagaagatatgaaatataaagatgctactaataaacacagccatctgcacagagaagataaacatataacgattgaggatttatggaaacgatggaaaacatcagaagttcataattggacccttgaagacactcttcagtggttgatagagtttgttgaactaccccaatatgagaagaattttagagacaacaatgtcaaaggaacgacacttcccaggatagcagtgcacgaaccttcatttatgatctcccagttgaaaatcagtgaccggagtcacagacaaaaacttcagctcaaggcattggatgtggttttgtttggacctctaacacgcccacctcataactggatgaaagattttatcctcacagtttctatagtaattggtgttggaggctgctggtttgcttatacgcagaataagacatcaaaagaacatgttgcaaaaatgatgaaagatttagagagcttacaaactgcagagcaaagtctaatggacttacaagagaggcttgaaaaggcacaggaagaaaacagaaatgttgctgtagaaaagcaaaatttagagcgcaaaatgatggatgaaatcaattatgcaaaggaggaggcttgtcggctgagagagctaagggagggagctgaatgtgaattgagtagacgtcagtatgcagaacaggaattggaacaggttcgcatggctctgaaaaaggccgaaaaagaatttgaactgagaagcagttggtctgttccagatgcacttcagaaatggcttcagttaacacatgaagtagaagtgcaatactacaatattaaaagacaaaacgctgaaatgcagctagctattgctaaagatgaggcagaaaaaattaaaaagaagagaagcacagtctttgggactctgcacgttgcacacagctcctccctagatgaggtagaccacaaaattctggaagcaaagaaagctctctctgagttgacaacttgtttacgagaacgactttttcgctggcaacaaattgagaagatctgtggctttcagatagcccataactcaggactccccagcctgacctcttccctttattctgatcacagctgggtggtgatgcccagagtctccattccaccctatccaattgctggaggagttgatgacttagatgaagacacacccccaatagtgtcacaatttcccgggaccatggctaaacctcctggatcattagccagaagcagcagcctgtgccgttcacgccgcagcattgtgccgtcctcgcctcagcctcagcgagctcagcttgctccacacgccccccacccgtcacaccctcggcaccctcaccacccgcaacacacaccacactccttgccttcccctgatccagatatcctctcagtgtcaagttgccctgcgctttatcgaaatgaagaggaggaagaggccatttacttctctgctgaaaagcaatgggaagtgccagacacagcttcagaatgtgactccttaaattcttccattggaaggaaacagtctcctcctttaagcctcgagatataccaaacattatctccgcgaaagatatcaagagatgaggtgtccctagaggattcctcccgaggggattcgcctgtaactgtggatgtgtcttggggttctcccgactgtgtaggtctgacagaaactaagagtatgatcttcagtcctgcaagcaaagtgtacaatggcattttggagaaatcctgtagcatgaaccagctttccagtggcatcccggtgcctaaacctcgccacacatcatgttcctcagctggcaacgacagtaaaccagttcaggaagccccaagtgttgccagaataagcagcatcccacatgacctttgtcataatggagagaaaagcaaaaagccatcaaaaatcaaaagcctttttaagaagaaatctaagtgaactggctgacttgatggaatcatgttcaagtggcatctgtaaactattatcccccaccctccactccccaccttttttttggtttaattttaggaatgtaactccattggggctttccaggccggatgccatagtggaacatccagaagggcaactgtctactgtctgcttatttaagtgactatatataatcaattcatcaagccagttattactgaaaaatcattgaaatgagacagtttacagtcatttctgcctatttatttctgctttgttctcagtgatgtatatgcaacattttgttgaaagccacgatggacttacaagctttaatggactcgtaagccagcatgggcttgcaaaaatttcttgtttaccagagcatcttcttatctttccacagagctatttacatcctggactatataacttaaaagaagtaaaacgtaattgcactactgttttccagactggaaaaaaaaaaaatctctgcaagtgaaactgtatagagtttataaaatgactatggataggggactgttttcacttttagatcaaaatgggtttttaagtagaacctagggtttctaattgacttgatttctggaaatgaaaacccgcgcttttattatgggaagcttcttgaactgcatttactattgtgaagtttcaagtcccgctgtaaagatcatgttgttttgttttccccagggctttcactgtgatttactgcattgcaggctgtatgataaaacacacataatttaaagagagaaggctcttgattccttatgcaagtggaagagttgaaacttgattgaaggacttaaaacattcacaaccttaagccgaggtggggggatatggggattcaggcaattgtttacacactttgaataactgcaaaggatttacggtttgtgaaaaatgtgtactgtggaaaagataataaattgaagacattattgtgtg

SEQ ID NO: 452672 - DNA, 3956 bp, Homo sapiens
gagaggcgggggattggtatgcgagcgaatgtgcgaggggagggaggcgtcccggcggagcgtggtactacgaccagcgcgggccggagggggcggggggatgcgccgcggcggcggcggcgcgggagctggggttggtgtttggcggcgccagagcagcggatcccggtctcgccgcagcagcagcgcgggtgtcgtgcaccgcctgaagacgccgtacctttctaccctcccacctttttttttttttttttaaataaccggaaccaatgaacgcagccgggatcagagctccggaggccgccggtgccgatgggaccaggctggcgcccggcgggagcccgtgtctgaggcggcgggggcggccggaggagtcgccggcggcggtggtggcgcctcgcggagccggcgagctgcaggcggccggggcgccgctgcgctttcacccggcttctcctcggcgccttcatcccgcctcgactcctggcccagcgtggggctggctgctgcggcggcggcgctgggctgcgttgctggtgctcgggctgctggtagccggagcggcggacggatgcgagcttgtgccccggcacctccgcgggcggcgggcgactggctctgccgcaactgccgcctcctctcccgccgcggcggccggcgatagcccggcgctcatgacagatccctgcatgtcactgagtccaccatgctttacagaagaagacagatttagtctggaagctcttcaaacaatacataaacaaatggatgatgacaaagatggtggaattgaagtagaggaaagtgatgaattcatcagagaagatatgaaatataaagatgctactaataaacacagccatctgcacagagaagataaacatataacgattgaggatttatggaaacgatggaaaacatcagaagttcataattggacccttgaagacactcttcagtggttgatagagtttgttgaactaccccaatatgagaagaattttagagacaacaatgtcaaaggaacgacacttcccaggatagcagtgcacgaaccttcatttatgatctcccagttgaaaatcagtgaccggagtcacagacaaaaacttcagctcaaggcattggatgtggttttgtttggacctctaacacgcccacctcataactggatgaaagattttatcctcacagtttctatagtaattggtgttggaggctgctggtttgcttatacgcagaataagacatcaaaagaacatgttgcaaaaatgatgaaagatttagagagcttacaaactgcagagcaaagtctaatggacttacaagagaggcttgaaaaggcacaggaagaaaacagaaatgttgctgtagaaaagcaaaatttagagcgcaaaatgatggatgaaatcaattatgcaaaggaggaggcttgtcggctgagagagctaagggagggagctgaatgtgaattgagtagacgtcagtatgcagaacaggaattggaacaggttcgcatggctctgaaaaaggccgaaaaagaatttgaactgagaagcagttggtctgttccagatgcacttcagaaatggcttcagttaacacatgaagtagaagtgcaatactacaatattaaaagacaaaacgctgaaatgcagctagctattgctaaagatgaggcagaaaaaattaaaaagaagagaagcacagtctttgggactctgcacgttgcacacagctcctccctagatgaggtagaccacaaaattctggaagcaaagaaagctctctctgagttgacaacttgtttacgagaacgactttttcgctggcaacaaattgagaagatctgtggctttcagatagcccataactcaggactccccagcctgacctcttccctttattctgatcacagctgggtggtgatgcccagagtctccattccaccctatccaattgctggaggagttgatgacttagatgaagacacacccccaatagtgtcacaatttcccgggaccatggctaaacctcctggatcattagccagaagcagcagcctgtgccgttcacgccgcagcattgtgccgtcctcgcctcagcctcagcgagctcagcttgctccacacgccccccacccgtcacaccctcggcaccctcaccacccgcaacacacaccacactccttgccttcccctgatccagatatcctctcagtgtcaagttgccctgcgctttatcgaaatgaagaggaggaagaggccatttacttctctgctgaaaagcaatgggaagtgccagacacagcttcagaatgtgactccttaaattcttccattggaaggaaacagtctcctcctttaagcctcgagatataccaaacattatctccgcgaaagatatcaagagatgaggtgtccctagaggattcctcccgaggggattcgcctgtaactgtggatgtgtcttggggttctcccgactgtgtaggtctgacagaaactaagagtatgatcttcagtcctgcaagcaaagtgtacaatggcattttggagaaatcctgtagcatgaaccagctttccagtggcatcccggtgcctaaacctcgccacacatcatgttcctcagctggcaacgacagtaaaccagttcaggaagccccaagtgttgccagaataagcagcatcccacatgacctttgtcataatggagagaaaagcaaaaagccatcaaaaatcaaaagcctttttaagaagaaatctaagtgaactggctgacttgatggaatcatgttcaagtggcatctgtaaactattatcccccaccctccactccccaccttttttttggtttaattttaggaatgtaactccattggggctttccaggccggatgccatagtggaacatccagaagggcaactgtctactgtctgcttatttaagtgactatatataatcaattcatcaagccagttattactgaaaaatcattgaaatgagacagtttacagtcatttctgcctatttatttctgctttgttctcagtgatgtatatgcaacattttgttgaaagccacgatggacttacaagctttaatggactcgtaagccagcatgggcttgcaaaaatttcttgtttaccagagcatcttcttatctttccacagagctatttacatcctggactatataacttaaaagaagtaaaacgtaattgcactactgttttccagactggaaaaaaaaaaaatctctgcaagtgaaactgtatagagtttataaaatgactatggataggggactgttttcacttttagatcaaaatgggtttttaagtagaacctagggtttctaattgacttgatttctggaaatgaaaacccgcgcttttattatgggaagcttcttgaactgcatttactattgtgaagtttcaagtcccgctgtaaagatcatgttgttttgttttccccagggctttcactgtgatttactgcattgcaggctgtatgataaaacacacataatttaaagagagaaggctcttgattccttatgcaagtggaagagttgaaacttgattgaaggacttaaaacattcacaaccttaagccgaggtggggggatatggggattcaggcaattgtttacacactttgaataactgcaaaggatttacggtttgtgaaaaatgtgtactgtggaaaagataataaattgaagacattattgtgtgggattgtgctgatttttgttgataacacaaaaaacactatgttttctggagagctgtgtaagctgtcttgttgcttagttgcaatataagaaatagtgatgttttggacgtaagttgtcaacaaatttctattttatattgttatatttttatgtagtttgaaatgtaaaaatgttctaatatcaagattaacaaatataaatttatggtgca

SEQ ID NO: 452673 - DNA, 513 bp, Homo sapiens
  misc_feature (166)..(166): n is a, c, g, or t
tcattcatcttttaaagctgtcctctcaataacttcagttctaagcactgaattcagtactgtgaatattccttggattgaagtttggcaatgatgcggtccaactgtctctttgcttcacactgtgggaaattgctcatgtcataatattgaggggcaatctctnatactccgaattcggcacggaactgcatttactattgtgaagtttcaagtcccgctgtaaagatcatgttgttttgttttccccagggctttcactgtgatttactgcattgcaggctgtatgataaaacacacataatttaaagagagaaggctcttgattccttatgcaagtggaagagttgaaacttgattgaaggacttaaaacattcacaaccttaagccgaggtggggggatatggggattcaggcaattgtttacacactttgaataactgcaaaggatttacggtttgtgaaaaatgtgtactgtggaaaagataataaattgaagacattattgtgtg

SEQ ID NO: 452674 - DNA, 518 bp, Homo sapiens
gagataatgcaggctttatatcttcattgcagttggagaatctgatgcgactttgcttggttaacactttatgactagcttttcgtctgtctttgcagtatgatcatagtcaccagcaagatgcctttactgacagaactggtcttgtgtggtttctggaaatcagaaggaaaactcgagagctgcactgtctaataaaacttcctgcattgatggaacgttcagttctcatttcaatagcaatgtcaaagtttcatagctagctctcataaataagagaatgatttgaatttggaaaacttttcttcctcttcattttcagtctctcctctattgaaccaccagaatccttacaaaataataatgttgaatatttactgatttttttttttttatgagacggagtctcgctctgttggaatgttctatgccttatgcacatatatgctcatttaaacctcattttgagttttcttacatgtgaattcaactccatgtcactctggggaaaaaaagaa

SEQ ID NO: 452675 - DNA, 3402 bp, Homo sapiens
attatggtttatgttaaaaatccagcattgagttttgagaagccatattatttaaagaagtaatgttctaattttgctgaaatgtatatagaatcatatcatttccctcttttaaatttcaaaaagcaatgaaagttgttttagttagaatgtctgctagtactcttaagaacatactgatttaaaatttgtacctttgtttgtgtttcattcagggaagtgccagacacagcttcagaatgtgactccttaaattcttccattggaaggaaacagtctcctcctttaagcctcgagatataccaaacattatctccgcgaaagatatcaagagatgaggtgtccctagaggattcctcccgaggggattcgcctgtaactgtggatgtgtcttggggttctcccgactgtgtaggtctgacagaaactaagagtatgatcttcagtcctgcaagcaaagtgtacaatggcattttggagaaatcctgtagcatgaaccagctttccagtggcatcccggtgcctaaacctcgccacacatcatgttcctcagctggcaacgacagtaaaccagttcaggaagccccaagtgttgccagaataagcagcatcccacatgacctttgtcataatggagagaaaagcaaaaagccatcaaaaatcaaaagcctttttaagaagaaatctaagtgaactggctgacttgatggaatcatgttcaagtggcatctgtaaactattatcccccaccctccactccccaccttttttttggtttaattttaggaatgtaactccattggggctttccaggccggatgccatagtggaacatccagaagggcaactgtctactgtctgcttatttaagtgactatatataatcaattcatcaagccagttattactgaaaaatcattgaaatgagacagtttacagtcatttctgcctatttatttctgctttgttctcagtgatgtatatgcaacattttgttgaaagccacgatggacttacaagctttaatggactcgtaagccagcatgggcttgcaaaaatttcttgtttaccagagcatcttcttatctttccacagagctatttacatcctggactatataacttaaaagaagtaaaacgtaattgcactactgttttccagactggaaaaaaaaaaaatctctgcaagtgaaactgtatagagtttataaaatgactatggataggggactgttttcacttttagatcaaaatgggtttttaagtagaacctagggtttctaattgacttgatttctggaaatgaaaacccgcgcttttattatgggaagcttcttgaactgcatttactattgtgaagtttcaagtcccgctgtaaagatcatgttgttttgttttccccagggctttcactgtgatttactgcattgcaggctgtatgataaaacacacataatttaaagagagaaggctcttgattccttatgcaagtggaagagttgaaacttgattgaaggacttaaaacattcacaaccttaagccgaggtggggggatatggggattcaggcaattgtttacacactttgaataactgcaaaggatttacggtttgtgaaaaatgtgtactgtggaaaagataataaattgaagacattattgtgtgggattgtgctgatttttgttgataacacaaaaaacactatgttttctggagagctgtgtaagctgtcttgttgcttagttgcaatataagaaatagtgatgttttggacgtaagttgtcaacaaatttctattttatattgttatatttttatgtagtttgaaatgtaaaaatgttctaatatcaagattaacaaatataaatttatggtgcatttagattgcgttgtattaatttataaagtatggtgttcattaaattggtgggttgtataagggtagcttttgttgttaaaaaaacagtagagagttaagttccatatagcaacaaagtatgttaacatctagggagtttctgcttataccactttaaaaatatgcaatcataagtgatttggttactgcaatgcagatggatgtttggatgaacaactgatacattttagttagaatgctttttcagcattatggctaaaatatatgtctaacccagtgctatttaggtgaaaatgctaattgataaaccagaagtttcttttgagatttgctttaaagaaatgctttagtaagaatatgaacaatttcctgatgtctcctataaattgtgattgtttattctattactattgttaaaaacttgaatggtatttatattggctgatatttatatacttaatagattgagttctgtaagggcaaaaacggattgaaatgaacatagcgttttgcactaatgataagataacctgagaggtagggttgaggaacacagggttgaaagctgttggagaggggaaaagttgtgcataaagaactgaaaagggttctggagtgttcattcagagtgaagggaaaactttatccttctatttcttataaccagacaggaggagttcttccctttgaaaattgcaaaaggaatgagaactttgcagttggatgaatagagaagggaaaagttgctggagcacggagtgaagatgggaggagctgttagcaaggcccactgctgctcctgggtgagaagggagctctggagcaggaccagctgggggccggcactgctgcttagagtggaggaggctggccaaagagactgtgggctgttttcagtcagggagcatgtgcattgtttgtgctcaatttcagacactcatttataaacaaattcaaccaagggatatttactgctttatgttgcttatgataattattttgcattaatacagtatacacatttgtaaattcaacaggaaattattgagttttggaaagctacagtaatttctgtattacatcatttatatgtgaaaagttggacatttctgtaagtttttaaaattatccatttgttactttaacattttaaaattatggtgttttcctgattttaaaagcaatattttccttactgtaaaaaaaaaaaaaaagatcgatgatagaaaagtataaagaagaaaatagcaagcaggtcaaatactactatccaaaatgatcacttttaatattttagtatgctttctgctagatctttttctacatattgaagtatattttacataattgaaatcatactatatattcaattttatatcatgctttttcacttaatataagcattatcccaacatcattaaaacttcatgagcaacattttaatgactgtataataatatgctgttgtataaatttaccataatcttttgaagtattctgtcattaaacatttggctgtttct

SEQ ID NO: 452676 - DNA, 3250 bp, Homo sapiens
  misc_feature (2314)..(2314): n is a, c, g, or t
gagaggcgggggattggtatgcgagcgaatgtgcgaggggagggaggcgtcccggcggagcgtggtactacgaccagcgcgggccggagggggcggggggatgcgccgcggcggcggcggcgcgggagctggggttggtgtttggcggcgccagagcagcggatcccggtctcgccgcagcagcagcgcgggtgtcgtgcaccgcctgaagacgccgtacctttctaccctcccacctttttttttttttttttaaataaccggaaccaatgaacgcagccgggatcagagctccggaggccgccggtgccgatgggaccaggctggcgcccggcgggagcccgtgtctgaggcggcgggggcggccggaggagtcgccggcggcggtggtggcgcctcgcggagccggcgagctgcaggcggccggggcgccgctgcgctttcacccggcttctcctcggcgccttcatcccgcctcgactcctggcccagcgtggggctggctgctgcggcggcggcgctgggctgcgttgctggtgctcgggctgctggtagccggagcggcggacggatgcgagcttgtgccccggcacctccgcgggcggcgggcgactggctctgccgcaactgccgcctcctctcccgccgcggcggccggcgatagcccggcgctcatgacagatccctgcatgtcactgagtccaccatgctttacagaagaagacagatttagtctggaagctcttcaaacaatacataaacaaatggatgatgacaaagatggtggaattgaagtagaggaaagtgatgaattcatcagagaagatatgaaatataaagatgctactaataaacacagccatctgcacagagaagataaacatataacgattgaggatttatggaaacgatggaaaacatcagaagttcataattggacccttgaagacactcttcagtggttgatagagtttgttgaactaccccaatatgagaagaattttagagacaacaatgtcaaaggaacgacacttcccaggatagcagtgcacgaaccttcatttatgatctcccagttgaaaatcagtgaccggagtcacagacaaaaacttcagctcaaggcattggatgtggttttgtttggacctctaacacgcccacctcataactggatgaaagattttatcctcacagtttctatagtaattggtgttggaggctgctggtttgcttatacgcagaataagacatcaaaagaacatgttgcaaaaatgatgaaagatttagagagcttacaaactgcagagcaaagtctaatggacttacaagagaggcttgaaaaggcacaggaagaaaacagaaatgttgctgtagaaaagcaaaatttagagcgcaaaatgatggatgaaatcaattatgcaaaggaggaggcttgtcggctgagagagctaagggagggagctgaatgtgaattgagtagacgtcagtatgcagaacaggaattggaacaggttcgcatggctctgaaaaaggccgaaaaagaatttgaactgagaagcagttggtctgttccagatgcacttcagaaatggcttcagttaacacatgaagtagaagtgcaatactacaatattaaaagacaaaacgctgaaatgcagctagctattgctaaagatgaggcagaaaaaattaaaaagaagagaagcacagtctttgggactctgcacgttgcacacagctcctccctagatgaggtagaccacaaaattctggaagcaaagaaagctctctctgagttgacaacttgtttacgagaacgactttttcgctggcaacaaattgagaagatctgtggctttcagatagcccataactcaggactccccagcctgacctcttccctttattctgatcacagctgggtggtgatgcccagagtctccattccaccctatccaattgctggaggagttgatgacttagatgaagacacacccccaatagtgtcacaatttcccgggaccatggctaaacctcctggatcattagccagaagcagcagcctgtgccgttcacgccgcagcattgtgccgtcctcgcctcagcctcagcgagctcagcttgctccacacgccccccacccgtcacaccctcggcaccctcaccacccgcaacacacaccacactccttgccttcccctgatccagatatcctctcagtgtcaagttgccctgcgctttatcgaaatgaagaggaggaagaggccatttacttctctgctgaaaagcaatggaacacaagggagtgtgcagntggagacagccagggaccacatgtacacggcctggtacgctttgacaaggactttggatcttactctgagtatgagagaaagcactgggaagtttcaaggaagtgccagacacagcttcagaatgtgactccttaaattcttccattggaaggaaacagtctcctcctttaagcctcgagatataccaaacattatctccgcgaaagatatcaagagatgaggtgtccctagaggattcctcccgaggggattcgcctgtaactgtggatgtgtcttggggttctcccgactgtgtaggtctgacagaaactaagagtatgatcttcagtcctgcaagcaaagtgtacaatggcattttggagaaatcctgtagcatgaaccagctttccagtggcatcccggtgcctaaacctcgccactactgttttccagactggaaaaaaaaaaaatctctgcaagtgaaactgtatagagtttataaaatgactatggataggggactgttttcacttttagatcaaaatgggtttttaagtagaacctagggtttctaattgacttgatttctggaaatgaaaacccgcgcttttattatgggaagcttcttgaactgcatttactattgtgaagtttcaagtcccgctgtaaagatcatgttgttttgttttccccagggctttcactgtgatttactgcattgcaggctgtatgataaaacacacataatttaaagagagaaggctcttgattccttatgcaagtggaagagttgaaacttgattgaaggacttaaaacattcacaaccttaagccgaggtggggggatatggggattcaggcaattgtttacacactttgaataactgcaaaggatttacggtttgtgaaaaatgtgtactgtggaaaagataataaattgaagacattattgtgtg

SEQ ID NO: 452677 - DNA, 729 bp, Homo sapiens
aaatttactaaatttgtttcttaggctgcattcttagagggattactcagctgggatacacagatctgaataaaagttttattattacagattcttttttcaaactggaacttattgtgtaaatagactctagtaatcataagctttaaattaaaattactgcatttggagaagtgtatacttttcaaagtgaccttagtgatttaaacattattcttttttatcattatcataaaagttttatacagagcttttttcctctaggttgctgcttcatatctgattcaggttagtagttactggaaattaactttgacacttaaattgtgtggaatgagaataagtcttaatctgaattctagccaaaaaatttaaaagcttagttcactcactagcaccattgtagtataatatagctaatgttcttctgttacttttagtacaagattcgggtcttcctgaaccatagaaataagagaaaaattctccagaataaagttttgaattacatcgattggcttaggaaagcacgttttctccctcatctgttttcttttttggaatgcagggatatcttggctagtaattctctactggttttatgattgctaatatattcaaaaccaaaacaaactttattatgttatatatacaaaaatgtctgtatttttttcaaacctagccttatttagtccttttcggtgcagaaaaaattaaaaagaagagaag

SEQ ID NO: 452678 - DNA, 5480 bp, Homo sapiens
gagaggcgggggattggtatgcgagcgaatgtgcgaggggagggaggcgtcccggcggagcgtggtactacgaccagcgcgggccggagggggcggggggatgcgccgcggcggcggcggcgcgggagctggggttggtgtttggcggcgccagagcagcggatcccggtctcgccgcagcagcagcgcgggtgtcgtgcaccgcctgaagacgccgtacctttctaccctcccacctttttttttttttttttaaataaccggaaccaatgaacgcagccgggatcagagctccggaggccgccggtgccgatgggaccaggctggcgcccggcgggagcccgtgtctgaggcggcgggggcggccggaggagtcgccggcggcggtggtggcgcctcgcggagccggcgagctgcaggcggccggggcgccgctgcgctttcacccggcttctcctcggcgccttcatcccgcctcgactcctggcccagcgtggggctggctgctgcggcggcggcgctgggctgcgttgctggtgctcgggctgctggtagccggagcggcggacggatgcgagcttgtgccccggcacctccgcgggcggcgggcgactggctctgccgcaactgccgcctcctctcccgccgcggcggccggcgatagcccggcgctcatgacagatccctgcatgtcactgagtccaccatgctttacagaagaagacagatttagtctggaagctcttcaaacaatacataaacaaatggatgatgacaaagatggtggaattgaagtagaggaaagtgatgaattcatcagagaagatatgaaatataaagatgctactaataaacacagccatctgcacagagaagataaacatataacgattgaggatttatggaaacgatggaaaacatcagaagttcataattggacccttgaagacactcttcagtggttgatagagtttgttgaactaccccaatatgagaagaattttagagacaacaatgtcaaaggaacgacacttcccaggatagcagtgcacgaaccttcatttatgatctcccagttgaaaatcagtgaccggagtcacagacaaaaacttcagctcaaggcattggatgtggttttgtttggacctctaacacgcccacctcataactggatgaaagattttatcctcacagtttctatagtaattggtgttggaggctgctggtttgcttatacgcagaataagacatcaaaagaacatgttgcaaaaatgatgaaagatttagagagcttacaaactgcagagcaaagtctaatggacttacaagagaggcttgaaaaggcacaggaagaaaacagaaatgttgctgtagaaaagcaaaatttagagcgcaaaatgatggatgaaatcaattatgcaaaggaggaggcttgtcggctgagagagctaagggagggagctgaatgtgaattgagtagacgtcagtatgcagaacaggaattggaacaggttcgcatggctctgaaaaaggccgaaaaagaatttgaactgagaagcagttggtctgttccagatgcacttcagaaatggcttcagttaacacatgaagtagaagtgcaatactacaatattaaaagacaaaacgctgaaatgcagctagctattgctaaagatgaggcagaaaaaattaaaaagaagagaagcacagtctttgggactctgcacgttgcacacagctcctccctagatgaggtagaccacaaaattctggaagcaaagaaagctctctctgagttgacaacttgtttacgagaacgactttttcgctggcaacaaattgagaagatctgtggctttcagatagcccataactcaggactccccagcctgacctcttccctttattctgatcacagctgggtggtgatgcccagagtctccattccaccctatccaattgctggaggagttgatgacttagatgaagacacacccccaatagtgtcacaatttcccgggaccatggctaaacctcctggatcattagccagaagcagcagcctgtgccgttcacgccgcagcattgtgccgtcctcgcctcagcctcagcgagctcagcttgctccacacgccccccacccgtcacaccctcggcaccctcaccacccgcaacacacaccacactccttgccttcccctgatccagatatcctctcagtgtcaagttgccctgcgctttatcgaaatgaagaggaggaagaggccatttacttctctgctgaaaagcaatgggaagtgccagacacagcttcagaatgtgactccttaaattcttccattggaaggaaacagtctcctcctttaagcctcgagatataccaaacattatctccgcgaaagatatcaagagatgaggtgtccctagaggattcctcccgaggggattcgcctgtaactgtggatgtgtcttggggttctcccgactgtgtaggtctgacagaaactaagagtatgatcttcagtcctgcaagcaaagtgtacaatggcattttggagaaatcctgtagcatgaaccagctttccagtggcatcccggtgcctaaacctcgccacacatcatgttcctcagctggcaacgacagtaaaccagttcaggaagccccaagtgttgccagaataagcagcatcccacatgacctttgtcataatggagagaaaagcaaaaagccatcaaaaatcaaaagcctttttaagaagaaatctaagtgaactggctgacttgatggaatcatgttcaagtggcatctgtaaactattatcccccaccctccactccccaccttttttttggtttaattttaggaatgtaactccattggggctttccaggccggatgccatagtggaacatccagaagggcaactgtctactgtctgcttatttaagtgactatatataatcaattcatcaagccagttattactgaaaaatcattgaaatgagacagtttacagtcatttctgcctatttatttctgctttgttctcagtgatgtatatgcaacattttgttgaaagccacgatggacttacaagctttaatggactcgtaagccagcatgggcttgcaaaaatttcttgtttaccagagcatcttcttatctttccacagagctatttacatcctggactatataacttaaaagaagtaaaacgtaattgcactactgttttccagactggaaaaaaaaaaaatctctgcaagtgaaactgtatagagtttataaaatgactatggataggggactgttttcacttttagatcaaaatgggtttttaagtagaacctagggtttctaattgacttgatttctggaaatgaaaacccgcgcttttattatgggaagcttcttgaactgcatttactattgtgaagtttcaagtcccgctgtaaagatcatgttgttttgttttccccagggctttcactgtgatttactgcattgcaggctgtatgataaaacacacataatttaaagagagaaggctcttgattccttatgcaagtggaagagttgaaacttgattgaaggacttaaaacattcacaaccttaagccgaggtggggggatatggggattcaggcaattgtttacacactttgaataactgcaaaggatttacggtttgtgaaaaatgtgtactgtggaaaagataataaattgaagacattattgtgtgggattgtgctgatttttgttgataacacaaaaaacactatgttttctggagagctgtgtaagctgtcttgttgcttagttgcaatataagaaatagtgatgttttggacgtaagttgtcaacaaatttctattttatattgttatatttttatgtagtttgaaatgtaaaaatgttctaatatcaagattaacaaatataaatttatggtgcatttagattgcgttgtattaatttataaagtatggtgttcattaaattggtgggttgtataagggtagcttttgttgttaaaaaaacagtagagagttaagttccatatagcaacaaagtatgttaacatctagggagtttctgcttataccactttaaaaatatgcaatcataagtgatttggttactgcaatgcagatggatgtttggatgaacaactgatacattttagttagaatgctttttcagcattatggctaaaatatatgtctaacccagtgctatttaggtgaaaatgctaattgataaaccagaagtttcttttgagatttgctttaaagaaatgctttagtaagaatatgaacaatttcctgatgtctcctataaattgtgattgtttattctattactattgttaaaaacttgaatggtatttatattggctgatatttatatacttaatagattgagttctgtaagggcaaaaacggattgaaatgaacatagcgttttgcactaatgataagataacctgagaggtagggttgaggaacacagggttgaaagctgttggagaggggaaaagttgtgcataaagaactgaaaagggttctggagtgttcattcagagtgaagggaaaactttatccttctatttcttataaccagacaggaggagttcttccctttgaaaattgcaaaaggaatgagaactttgcagttggatgaatagagaagggaaaagttgctggagcacggagtgaagatgggaggagctgttagcaaggcccactgctgctcctgggtgagaagggagctctggagcaggaccagctgggggccggcactgctgcttagagtggaggaggctggccaaagagactgtgggctgttttcagtcagggagcatgtgcattgtttgtgctcaatttcagacactcatttataaacaaattcaaccaagggatatttactgctttatgttgcttatgataattattttgcattaatacagtatacacatttgtaaattcaacaggaaattattgagttttggaaagctacagtaatttctgtattacatcatttatatgtgaaaagttggacatttctgtaagtttttaaaattatccatttgttactttaacattttaaaattatggtgttttcctgattttaaaagcaatattttccttactgtaaaaaaaaaaaaaaagatcgatgatagaaaagtataaagaagaaaatagcaagcaggtcaaatactactatccaaaatgatcacttttaatattttagtatgctttctgctagatctttttctacatattgaagtatattttacataattgaaatcatactatatattcaattttatatcatgctttttcacttaatataagcattatcccaacatcattaaaacttcatgagcaacattttaatgactgtataataatatgctgttgtataaatttaccataatcttttgaagtattctgtcattaaacatttggctgtttct

SEQ ID NO: 452679 - DNA, 3725 bp, Homo sapiens
gtaatttctttattggcttttccaggaaagctctctctgagttgacaacttgtttacgagaacgactttttcgctggcaacaaattgagaagatctgtggctttcagatagcccataactcaggactccccagcctgacctcttccctttattctgatcacagctgggtggtgatgcccagagtctccattccaccctatccaattgctggaggagttgatgacttagatgaagacacacccccaatagtgtcacaatttcccgggaccatggctaaacctcctggatcattagccagaagcagcagcctgtgccgttcacgccgcagcattgtgccgtcctcgcctcagcctcagcgagctcagcttgctccacacgccccccacccgtcacaccctcggcaccctcaccacccgcaacacacaccacactccttgccttcccctgatccagatatcctctcagtgtcaagttgccctgcgctttatcgaaatgaagaggaggaagaggccatttacttctctgctgaaaagcaatgggaagtgccagacacagcttcagaatgtgactccttaaattcttccattggaaggaaacagtctcctcctttaagcctcgagatataccaaacattatctccgcgaaagatatcaagagatgaggtgtccctagaggattcctcccgaggggattcgcctgtaactgtggatgtgtcttggggttctcccgactgtgtaggtctgacagaaactaagagtatgatcttcagtcctgcaagcaaagtgtacaatggcattttggagaaatcctgtagcatgaaccagctttccagtggcatcccggtgcctaaacctcgccacacatcatgttcctcagctggcaacgacagtaaaccagttcaggaagccccaagtgttgccagaataagcagcatcccacatgacctttgtcataatggagagaaaagcaaaaagccatcaaaaatcaaaagcctttttaagaagaaatctaagtgaactggctgacttgatggaatcatgttcaagtggcatctgtaaactattatcccccaccctccactccccaccttttttttggtttaattttaggaatgtaactccattggggctttccaggccggatgccatagtggaacatccagaagggcaactgtctactgtctgcttatttaagtgactatatataatcaattcatcaagccagttattactgaaaaatcattgaaatgagacagtttacagtcatttctgcctatttatttctgctttgttctcagtgatgtatatgcaacattttgttgaaagccacgatggacttacaagctttaatggactcgtaagccagcatgggcttgcaaaaatttcttgtttaccagagcatcttcttatctttccacagagctatttacatcctggactatataacttaaaagaagtaaaacgtaattgcactactgttttccagactggaaaaaaaaaaaatctctgcaagtgaaactgtatagagtttataaaatgactatggataggggactgttttcacttttagatcaaaatgggtttttaagtagaacctagggtttctaattgacttgatttctggaaatgaaaacccgcgcttttattatgggaagcttcttgaactgcatttactattgtgaagtttcaagtcccgctgtaaagatcatgttgttttgttttccccagggctttcactgtgatttactgcattgcaggctgtatgataaaacacacataatttaaagagagaaggctcttgattccttatgcaagtggaagagttgaaacttgattgaaggacttaaaacattcacaaccttaagccgaggtggggggatatggggattcaggcaattgtttacacactttgaataactgcaaaggatttacggtttgtgaaaaatgtgtactgtggaaaagataataaattgaagacattattgtgtgggattgtgctgatttttgttgataacacaaaaaacactatgttttctggagagctgtgtaagctgtcttgttgcttagttgcaatataagaaatagtgatgttttggacgtaagttgtcaacaaatttctattttatattgttatatttttatgtagtttgaaatgtaaaaatgttctaatatcaagattaacaaatataaatttatggtgcatttagattgcgttgtattaatttataaagtatggtgttcattaaattggtgggttgtataagggtagcttttgttgttaaaaaaacagtagagagttaagttccatatagcaacaaagtatgttaacatctagggagtttctgcttataccactttaaaaatatgcaatcataagtgatttggttactgcaatgcagatggatgtttggatgaacaactgatacattttagttagaatgctttttcagcattatggctaaaatatatgtctaacccagtgctatttaggtgaaaatgctaattgataaaccagaagtttcttttgagatttgctttaaagaaatgctttagtaagaatatgaacaatttcctgatgtctcctataaattgtgattgtttattctattactattgttaaaaacttgaatggtatttatattggctgatatttatatacttaatagattgagttctgtaagggcaaaaacggattgaaatgaacatagcgttttgcactaatgataagataacctgagaggtagggttgaggaacacagggttgaaagctgttggagaggggaaaagttgtgcataaagaactgaaaagggttctggagtgttcattcagagtgaagggaaaactttatccttctatttcttataaccagacaggaggagttcttccctttgaaaattgcaaaaggaatgagaactttgcagttggatgaatagagaagggaaaagttgctggagcacggagtgaagatgggaggagctgttagcaaggcccactgctgctcctgggtgagaagggagctctggagcaggaccagctgggggccggcactgctgcttagagtggaggaggctggccaaagagactgtgggctgttttcagtcagggagcatgtgcattgtttgtgctcaatttcagacactcatttataaacaaattcaaccaagggatatttactgctttatgttgcttatgataattattttgcattaatacagtatacacatttgtaaattcaacaggaaattattgagttttggaaagctacagtaatttctgtattacatcatttatatgtgaaaagttggacatttctgtaagtttttaaaattatccatttgttactttaacattttaaaattatggtgttttcctgattttaaaagcaatattttccttactgtaaaaaaaaaaaaaaagatcgatgatagaaaagtataaagaagaaaatagcaagcaggtcaaatactactatccaaaatgatcacttttaatattttagtatgctttctgctagatctttttctacatattgaagtatattttacataattgaaatcatactatatattcaattttatatcatgctttttcacttaatataagcattatcccaacatcattaaaacttcatgagcaacattttaatgactgtataataatatgctgttgtataaatttaccataatcttttgaagtattctgtcattaaacatttggctgtttct

SEQ ID NO: 452680 - DNA, 2713 bp, Homo sapiens
gagaggcgggggattggtatgcgagcgaatgtgcgaggggagggaggcgtcccggcggagcgtggtactacgaccagcgcgggccggagggggcggggggatgcgccgcggcggcggcggcgcgggagctggggttggtgtttggcggcgccagagcagcggatcccggtctcgccgcagcagcagcgcgggtgtcgtgcaccgcctgaagacgccgtacctttctaccctcccacctttttttttttttttttaaataaccggaaccaatgaacgcagccgggatcagagctccggaggccgccggtgccgatgggaccaggctggcgcccggcgggagcccgtgtctgaggcggcgggggcggccggaggagtcgccggcggcggtggtggcgcctcgcggagccggcgagctgcaggcggccggggcgccgctgcgctttcacccggcttctcctcggcgccttcatcccgcctcgactcctggcccagcgtggggctggctgctgcggcggcggcgctgggctgcgttgctggtgctcgggctgctggtagccggagcggcggacggatgcgagcttgtgccccggcacctccgcgggcggcgggcgactggctctgccgcaactgccgcctcctctcccgccgcggcggccggcgatagcccggcgctcatgacagatccctgcatgtcactgagtccaccatgctttacagaagaagacagatttagtctggaagctcttcaaacaatacataaacaaatggatgatgacaaagatggtggaattgaagtagaggaaagtgatgaattcatcagagaagatatgaaatataaagatgctactaataaacacagccatctgcacagagaagataaacatataacgattgaggatttatggaaacgatggaaaacatcagaagttcataattggacccttgaagacactcttcagtggttgatagagtttgttgaactaccccaatatgagaagaattttagagacaacaatgtcaaaggaacgacacttcccaggatagcagtgcacgaaccttcatttatgatctcccagttgaaaatcagtgaccggagtcacagacaaaaacttcagctcaaggcattggatgtggttttgtttggacctctaacacgcccacctcataactggatgaaagattttatcctcacagtttctatagtaattggtgttggaggctgctggtttgcttatacgcagaataagacatcaaaagaacatgttgcaaaaatgatgaaagatttagagagcttacaaactgcagagcaaagtctaatggacttacaagagaggcttgaaaaggcacaggaagaaaacagaaatgttgctgtagaaaagcaaaatttagagcgcaaaatgatggatgaaatcaattatgcaaaggaggaggcttgtcggctgagagagctaagggagggagctgaatgtgaattgagtagacgtcagtatgcagaacaggaattggaacaggttcgcatggctctgaaaaaggccgaaaaagaatttgaactgagaagcagttggtctgttccagatgcacttcagaaatggcttcagttaacacatgaagtagaagtgcaatactacaatattaaaagacaaaacgctgaaatgcagctagctattgctaaagatgaggcagaaaaaattaaaaagaagagaagcacagtctttgggactctgcacgttgcacacagctcctccctagatgaggtagaccacaaaattctggaagcaaagaaagctctctctgagttgacaacttgtttacgagaacgactttttcgctggcaacaaattgagaagatctgtggctttcagatagcccataactcaggactccccagcctgacctcttccctttattctgatcacagctgggtggtgatgcccagagtctccattccaccctatccaattgctggaggagttgatgacttagatgaagacacacccccaatagtgtcacaatttcccgggaccatggctaaacctcctggatcattagccagaagcagcagcctgtgccgttcacgccgcagcattgtgccgtcctcgcctcagcctcagcgagctcagcttgctccacacgccccccacccgtcacaccctcggcaccctcaccacccgcaacacacaccacactccttgccttcccctgatccagatatcctctcagtgtcaagttgccctgcgctttatcgaaatgaagaggaggaagaggccatttacttctctgctgaaaagcaatgtatgatcatagtcaccagcaagatgcctttactgacagaactggtcttgtgtggtttctggaaatcagaaggaaaactcgagagctgcactgtctaataaaacttcctgcattgatggaacgttcagttctcatttcaatagcaatgtcaaagtttcatagctagctctcataaataagagaatgatttgaatttggaaaacttttcttcctcttcattttcagtctctcctctattgaaccaccagaatccttacaaaataataatgttgaatatttactgatttttttttttttatgagacggagtctcgctctgttggaatgttctatgccttatgcacatatatgctcatttaaacctcattttgagttttcttacatgtgaattcaactccatgtcactctggggaaaaaaagaa

SEQ ID NO: 452681 - DNA, 246 bp, Homo sapiens
cagggttgaggcaagcgggaggtggaagggacgcttgagagtctgccaaggctgctctgaacttggcccacctcagaagaaggcagcaaggacagaccgagtgtcacagacgccagagagcctggatttcctcaaggtccccgaccagggagctgcaggggtcaggagacaaacaaccagtcgcctcccccagcagggcagacccaagccccaagcccaagcccaaccacggcaaacacggcccga

SEQ ID NO: 452682 - DNA, 8877 bp, Homo sapiens
cggctcccagggaggaggcatgagcgccctgccgttaccgcttcttctgccgtacagttgccgcttcggggcctaactctagctctttgaagcggctcctgtgggaaggagtcataaggcgggaagtgaggatcggacaccgccttgagtttggtgtgcagtggaagaactgacctaggaggaagagaataggggggaacggggagctagtctcaagatggcggctcccacggcggcaggcgcagcctgagcagcagaggcggactaaggggagaggcgcgagacttcacaagccgtacggcgcgagcccccaaacggccctcgagagctcgagctggttccaccggcctccggcccgcctccattcgttaggtgtgtcgaggctgtttcgggagcggcggctgcactaaggcgctgggcggggaagcgggacggtctcaagatggcggctcccacaattgtggtctgagcgccggcggggctgcgacgaccgcggcgcttgtggctcctttccacccgccccggaagccggccagtgctggggacttgggggtgtgggaaccgggccggggctccgccatttccggcgggggagggctacgactgaggaagggaggagagagaggcggctcaagatggcggctcccagggcctcccgcccgagcttgtaagcgggagcgcccggacaagtagtcggggcgacgggactcagcggcctccagcttcttgagcctaggcgctcgacagtttcgggcggctcttgcggagacggggtgagcgagaagaaagggaagagccaaagggaaggagggcagttaagatggcggcctccatggagtcgtctaccgctgtgtgagaaaccgcttctccgtgagagctgccttagacgaaagggggtgtgtgaaaggaattgaggggctcccttcccgcttgttgacttctccccaccgcaccctttcccggaactatggcttcggccgtgtcgcccgccaacttgccagcggtgcttctgcagccccgctggaagcgagtggtgggctggtcgggtccggtgccacggccccgccacggccaccgcgccgtggccatcaaggagctcatcgtggtgtttggcggcggcaacgagggaatagtggacgaactgcacgtgtacaacacggcaaccaaccagtggttcatcccagccgtgaggggggacattccccctgggtgtgcagcctatggcttcgtgtgtgacgggactcgcctcctggtgtttggtgggatggtggagtatgggaaatacagcaatgacctctacgaactccaggcgagccggtgggagtggaagagactcaaagcaaagacgcccaaaaacgggccccctccgtgtcctcgactcgggcacagcttctcccttgtgggcaacaaatgctacctgtttgggggtctggccaatgatagcgaggacccaaagaacaacattccaaggtacctgaatgacttatatatcctggaattacggccaggctctggagtggtagcctgggacattcccatcacttacggggtcctaccaccaccccgggagtcacatactgccgtggtctacaccgaaaaagacaataagaagtccaagctggtgatctacggcgggatgagtggctgcaggctgggggacctgtggaccctagatattgacaccctgacgtggaataagcccagtctcagcggggtggcgcctcttcctcgcagtctccactcggcaaccaccatcggaaataaaatgtacgtgtttggtggctgggtgcctctcgtcatggatgacgtcaaagtggccacacacgagaaggagtggaagtgtaccaacacgctggcttgtctcaacctggataccatggcctgggagaccatcctgatggatacactggaggacaacatcccccgtgctcgggctggccactgcgcagtcgccatcaacacccgcctgtacatttggagtgggcgtgacggctaccgcaaggcctggaacaaccaggtctgctgcaaggacctctggtacctagagacagaaaagccaccacccccagcccgagtacaactggtacgcgccaacaccaactccctggaggtgagctggggggcagtggcaacagccgacagctaccttctccagctccagaaatatgacattcctgccacggctgctactgccacctcccctacacccaatccggtcccatctgtgcctgccaaccctcccaagagccctgccccagcagcagccgcacctgctgtgcagccgctgacccaagtaggcatcacgctcctgccccaggctgcccccgcacccccgaccaccaccaccatccaggtcttgccaacggtgcctggcagctccatttctgtgcccaccgcagccaggactcaaggtgtccctgctgttctcaaagtgaccggtcctcaggctacaacaggaactccattggtcaccatgcgacctgccagccaggctgggaaagcccctgtcaccgtgacctcccttcccgccggagtgcggatggttgtgccaacacagagtgcccagggaacggtgattggcagtagcccacagatgagtgggatggccgcactggccgctgcggccgctgccacccagaagatccccccttcctcggcacccacggtgctgagtgtcccagcgggtaccaccatcgtgaagaccatggctgtgacacctggcactaccaccctcccagccactgtgaaggtggcctcctcgccagtcatggtgagcaaccctgccactcgcatgctgaagactgcagccgcccaggtggggacatcggtttcctccgccaccaacacgtctacccgccctatcatcacagtgcacaagtcaggcactgtgacagtggcccagcaagcccaggtggtgaccacagttgtgggcggggtcaccaagaccatcaccctggtgaagagccccatctctgtcccaggaggcagtgctctgatttccaatctgggcaaagtgatgtcggtggtccagaccaaaccagttcagacttcagcagtcacaggccaggcgtccacgggtcctgtgactcagatcatccagaccaaagggcccctgccagcgggaacaatcctgaagctggtgacctcagcagatggcaagcccaccaccatcatcactaccacgcaggccagtggggcggggaccaagcccaccatcctgggcatcagcagcgtctcccccagtaccaccaagcccggcacgaccaccatcatcaaaaccatccccatgtcggccatcatcacccaggcgggcgccacgggtgtgaccagcagtcctggcatcaagtcccccatcaccatcatcaccaccaaggtgatgacttcaggaactggagcacctgcgaaaatcatcactgctgtccccaaaattgccactggccacgggcagcagggagtgacccaggtggtgcttaagggggccccgggacagccaggcaccatcctccgcactgtgcccatggggggtgttcgcctggtcacacccgtcaccgtctccgccgtcaagccagccgtcaccacgttggttgtgaaaggcaccacaggtgtcacgaccctaggcacagtgacaggcaccgtctccaccagccttgccggggcggggggccacagcactagtgcttccctggccacgcccatcaccaccttgggcaccattgccaccctctcaagccaggtgatcaaccccactgccatcactgtgtcggccgcacagaccacgctgacagcggcaggcgggctcacaaccccaaccatcaccatgcagcccgtgtcccagcccacccaggtaactctgatcacggcacctagtggggtggaggcccagcctgtgcatgacctccctgtgtccattctggcctccccgactacagaacagcccaccgccacagttaccatcgccgactcaggccagggtgatgtgcagcctggcactgtcaccttggtgtgctccaacccaccctgtgagacccacgagactggcaccaccaacacggccaccactactgttgtggctaaccttgggggacacccccagcccacccaagtgcagttcgtctgtgacagacaggaggcagctgcttctcttgtgacctcgactgtgggccagcagaatggtagcgtggtccgagtctgttcgaacccgccctgcgagacccacgagacgggcaccaccaacaccgccaccaccgccacctccaacatggccgggcagcatggctgctcaaacccaccctgcgagacccacgagacgggcaccaccaacactgccactacagccatgtcgagcgtcggcgccaaccaccagcgagatgcccgtcgggcctgtgcagctggcacccctgccgtgatccggatcagtgtggccactggggcgctggaggcagcccagggctctaagtcccagtgccaaacccgccagaccagcgcgaccagcaccaccatgactgtgatggccaccggggccccgtgctcggccggcccactccttgggccgagcatggcacgggagcccgggggccgcagccctgcttttgtgcagttggcccctctgagcagcaaagtcaggctgagcagcccaagcattaaggaccttcctgcggggcgccacagccatgcggtcagcaccgctgccatgacccgttccagcgtgggtgctggggagccccgcatggcacctgtgtgcgagagcctccagggtggctcgcccagcaccacagtgactgtgacagccctggaggcactgctgtgcccctcggccaccgtgacccaagtctgctccaacccaccatgtgagacccacgagacaggcaccaccaacaccgccactacctcgaatgcaggcagcgcccagagggtgtgctccaacccgccatgcgagacccacgagacgggcaccacccacacggccaccaccgctacttcaaacgggggcacgggccagcccgagggtgggcagcagccccctgctggtcgcccctgtgagacacaccagaccacttccactggcaccaccatgtcggtcagcgtgggtgccctgcttcccgacgccacttcttcccacaggaccgtggagtctggcctagaggtggcggcggcacccagcgtcaccccccaggctggcaccgcgctgctggctcctttcccaacacagagggtgtgctccaaccccccctgtgagacccacgagacgggcaccactcacacggccaccactgtcacttccaacatgagttcaaaccaagaccccccacctgctgccagcgatcagggagaggtggagagcacccagggcgacagcgtgaacatcaccagctccagtgccatcacgacaaccgtgtcctccacactgacgcgggctgtgaccaccgtgacgcagtccacaccggtcccgggcccctctgtgccgcccccagaggaactccaggtgtcgccaggtcctcgccagcagctgccgccacggcagcttctgcagtcggcttccacagccctgatgggggagtccgccgaggtcctgtcagcctcccagacccctgagctcccggccgccgtggatctgagcagcacaggggagccatcttcgggccaggagtctgccggctctgcggtggtggccactgtggtggtccagccacccccacccacacagtccgaagtagaccagttatcacttccccaagagctaatggccgaggcccaagctggcaccaccaccctcatggtaacggggctcacccccgaggagctggcagtgacggctgctgcagaagcagctgcccaggccgcagccacggaggaagcccaggccctggccatccaggcggtgctccaggccgcgcagcaggccgtcatgggcaccggcgagcccatggacacctccgaggcagcagcaaccgtgactcaggcggagctggggcacctgtcggccgagggtcaggagggccaggccaccaccatacccattgtgctgacacagcaggagctggctgccctggtgcagcagcagcagctgcaggaggcccaggcccagcagcagcatcaccacctccccactgaggccctggcccctgccgacagtctcaacgacccagccattgagagcaattgcctcaatgagctggccggcacggtccccagcactgtggcgctgctgccctcaacggccactgagagcctggctccatccaacacatttgtggccccccagccggttgtggtggccagcccagccaagctgcaggctgcagctaccctgaccgaagtggccaatggcatcgagtccctgggtgtgaagccagacctgccgcccccacccagcaaagcccccatgaagaaggaaaaccagtggtttgatgtgggagtcattaagggcaccaatgtaatggtgacacactatttcctgccaccagatgatgctgtcccatcagacgatgatttgggcaccgtccctgactataaccagctgaagaagcaggagctgcagccaggcacagcctataagtttcgtgttgccggaatcaatgcctgtggccgggggcccttcagcgaaatctcagcctttaagacgtgcctgcctggtttcccaggggccccttgtgccattaaaatcagcaaaagtccggatggtgctcacctcacctgggagccaccctctgtgacctccggcaagattatcgagtactccgtgtacctggccatccagagctcacaggctgggggcgagctcaagagctccaccccggcccagctggccttcatgcgggtgtactgcgggcccagcccctcctgcctggtgcagtcctccagcctttccaacgcccacatcgactacaccaccaagcccgccatcatcttccgcatcgccgcccgcaatgagaagggctatggcccggccacacaagtgaggtggctgcaggaaaccagtaaagacagctctggcaccaagccagccaacaagcggcccatgtcctctccagaaatgaaatctgctccaaagaaatctaaggccgatggtcagtgagaggaagctgactagcccctggattcttctccagacccccctgcttcaggaacacccgccagggcccacccctcccaccccgtcccagcattcgcacttcaccctcgcgagccgctgttcactcctctcccctttctctttctctctgtttttaaaataatctaaagaaagcacattttaccattgctgttgggaggaagcagaggcagatgggaaagcagagagaggagcgcgcttcctttcctccccgctgccgcccaccctggggagagacttttgcggggagggaaggcggagctgaggacagccagctccgccctcccaaggctgtgcgttcctgagggccaggtcgggggcaggcatggaggggaggaaaggcgtccctcttggccctccccagagtggctttcctggcaccctggcctgggtgtctggttctgttttcttttcttccccttgtgtttccagtcacctaacttcccttcctcaggctcccccggcccaccctgctcagtgaccccacaggaagcttacacattttctcagaggcctttgtgctcccacctcttctaccctccccctcttctttcccattttaaaaaagaaaagaaggaaaaagaaaaaaggggcaaggagccccgcggcggcctgggcagcgcctgtgcagacctccctgcaggccgcactgccaactgctgcatttgttgtgttttttaggttgcaattggtgaagttcacactttcattgtaattttagcgtgtggggttttgtcccttttttgttgttgttagctgtgtacagaatgtgtaatcttttttcttttctcttttttttgttttgttttgttttgtttttgtttttttacttttttcttcttggctaattcttggcagggatctttctggaggaaaagctggggccagccagggcaggagaggtgtgaaatctgccacgaggggcctgctgtttgccacccagcccaacttcctgttgctggcccctgccctctgcccttttgcctgtcctcaggccgctggaacaaaggaaggacagctcattcctcatgggcgatcactccgcatctatagggtcgagcctaggggagcttgagggagggctggggcctccttgtcctggatttccagctctccccatgccccctccctgagcaccaccggcaccgctcccaaacagggctgctggtttccgcagccactgctccacctcccccaaatcgtcatggaaagggtggagaatggaggggaaccaggcgtccttggaggcagcttgggagggtgactgtgtagtgtcacccacaagggaggctagggcaatggagcaggccaccagcagcagctgtgcagcatggaactcaggccaggctccgaggctgggggatctgcttggagttttctgccccccaccccaaacttctgtcgaggagcaaggcttgccagcaagtcagaaggatttgaaccgagcagccaatctttccagccctcccctaccgacctctgcctggagacgcagcagcctgtgtcctccagggcctctggtttgttgtattatagtatatttcgctgtggaaaatgtcacgtttagtcaccttggagcccactcacctggtcctgttgttttaccccatcccttctctcgcgcgcctattgatttgtttctgaggagagtacaccgttcactattgtagagtaacccctgtgactcaatattaccatagtgcgatgtcgttttgtgctattttgaacaattaaaagactttttttgaaataaccaaactaggtgt

SEQ ID NO: 452683 - DNA, 7787 bp, Homo sapiens
  misc_feature (18)..(18): n is a, c, g, or t
ctgggtatactccccttntttgggacggcggcaacgagggaatagtttacgaactgcacgttacacacggcaaccaaccagtggttcatcccagccgtgaggggggacattccccctgggtgtgcagcctatggcttcgtgtgtgacgggactcgcctcctggtgtttggtgggatggtggagtatgggaaatacagcaatgacctctacgaactccaggcgagccggtgggagtggaagagactcaaagcaaagacgcccaaaaacgggccccctccgtgtcctcgactcgggcacagcttctcccttgtgggcaacaaatgctacctgtttgggggtctggccaatgatagcgaggacccaaagaacaacattccaaggtacctgaatgacttatatatcctggaattacggccaggctctggagtggtagcctgggacattcccatcacttacggggtcctaccaccaccccgggagtcacatactgccgtggtctacaccgaaaaagacaataagaagtccaagctggtgatctacggcgggatgagtggctgcaggctgggggacctgtggaccctagatattgacaccctgacgtggaataagcccagtctcagcggggtggcgcctcttcctcgcagtctccactcggcaaccaccatcggaaataaaatgtacgtgtttggtggctgggtgcctctcgtcatggatgacgtcaaagtggccacacacgagaaggagtggaagtgtaccaacacgctggcttgtctcaacctggataccatggcctgggagaccatcctgatggatacactggaggacaacatcccccgtgctcgggctggccactgcgcagtcgccatcaacacccgcctgtacatttggagtgggcgtgacggctaccgcaaggcctggaacaaccaggtctgctgcaaggacctctggtacctagagacagaaaagccaccacccccagcccgagtacaactggtacgcgccaacaccaactccctggaggtgagctggggggcagtggcaacagccgacagctaccttctccagctccagaaatatgacattcctgccacggctgctactgccacctcccctacacccaatccggtcccatctgtgcctgccaaccctcccaagagccctgccccagcagcagccgcacctgctgtgcagccgctgacccaagtaggcatcacgctcctgccccaggctgcccccgcacccccgaccaccaccaccatccaggtcttgccaacggtgcctggcagctccatttctgtgcccaccgcagccaggactcaaggtgtccctgctgttctcaaagtgaccggtcctcaggctacaacaggaactccattggtcaccatgcgacctgccagccaggctgggaaagcccctgtcaccgtgacctcccttcccgccggagtgcggatggttgtgccaacacagagtgcccagggaacggtgattggcagtagcccacagatgagtgggatggccgcactggccgctgcggccgctgccacccagaagatccccccttcctcggcacccacggtgctgagtgtcccagcgggtaccaccatcgtgaagaccatggctgtgacacctggcactaccaccctcccagccactgtgaaggtggcctcctcgccagtcatggtgagcaaccctgccactcgcatgctgaagactgcagccgcccaggtggggacatcggtttcctccgccaccaacacgtctacccgccctatcatcacagtgcacaagtcaggcactgtgacagtggcccagcaagcccaggtggtgaccacagttgtgggcggggtcaccaagaccatcaccctggtgaagagccccatctctgtcccaggaggcagtgctctgatttccaatctgggcaaagtgatgtcggtggtccagaccaaaccagttcagacttcagcagtcacaggccaggcgtccacgggtcctgtgactcagatcatccagaccaaagggcccctgccagcgggaacaatcctgaagctggtgacctcagcagatggcaagcccaccaccatcatcactaccacgcaggccagtggggcggggaccaagcccaccatcctgggcatcagcagcgtctcccccagtaccaccaagcccggcacgaccaccatcatcaaaaccatccccatgtcggccatcatcacccaggcgggcgccacgggtgtgaccagcagtcctggcatcaagtcccccatcaccatcatcaccaccaaggtgatgacttcaggaactggagcacctgcgaaaatcatcactgctgtccccaaaattgccactggccacgggcagcagggagtgacccaggtggtgcttaagggggccccgggacagccaggcaccatcctccgcactgtgcccatggggggtgttcgcctggtcacacccgtcaccgtctccgccgtcaagccagccgtcaccacgttggttgtgaaaggcaccacaggtgtcacgaccctaggcacagtgacaggcaccgtctccaccagccttgccggggcggggggccacagcactagtgcttccctggccacgcccatcaccaccttgggcaccattgccaccctctcaagccaggtgatcaaccccactgccatcactgtgtcggccgcacagaccacgctgacagcggcaggcgggctcacaaccccaaccatcaccatgcagcccgtgtcccagcccacccaggtaactctgatcacggcacctagtggggtggaggcccagcctgtgcatgacctccctgtgtccattctggcctccccgactacagaacagcccaccgccacagttaccatcgccgactcaggccagggtgatgtgcagcctggcactgtcaccttggtgtgctccaacccaccctgtgagacccacgagactggcaccaccaacacggccaccactactgttgtggctaaccttgggggacacccccagcccacccaagtgcagttcgtctgtgacagacaggaggcagctgcttctcttgtgacctcgactgtgggccagcagaatggtagcgtggtccgagtctgttcgaacccgccctgcgagacccacgagacgggcaccaccaacaccgccaccaccgccacctccaacatggccgggcagcatggctgctcaaacccaccctgcgagacccacgagacgggcaccaccaacactgccactacagccatgtcgagcgtcggcgccaaccaccagcgagatgcccgtcgggcctgtgcagctggcacccctgccgtgatccggatcagtgtggccactggggcgctggaggcagcccagggctctaagtcccagtgccaaacccgccagaccagcgcgaccagcaccaccatgactgtgatggccaccggggccccgtgctcggccggcccactccttgggccgagcatggcacgggagcccgggggccgcagccctgcttttgtgcagttggcccctctgagcagcaaagtcaggctgagcagcccaagcattaaggaccttcctgcggggcgccacagccatgcggtcagcaccgctgccatgacccgttccagcgtgggtgctggggagccccgcatggcacctgtgtgcgagagcctccagggtggctcgcccagcaccacagtgactgtgacagccctggaggcactgctgtgcccctcggccaccgtgacccaagtctgctccaacccaccatgtgagacccacgagacaggcaccaccaacaccgccactacctcgaatgcaggcagcgcccagagggtgtgctccaacccgccatgcgagacccacgagacgggcaccacccacacggccaccaccgctacttcaaacgggggcacgggccagcccgagggtgggcagcagccccctgctggtcgcccctgtgagacacaccagaccacttccactggcaccaccatgtcggtcagcgtgggtgccctgcttcccgacgccacttcttcccacaggaccgtggagtctggcctagaggtggcggcggcacccagcgtcaccccccaggctggcaccgcgctgctggctcctttcccaacacagagggtgtgctccaaccccccctgtgagacccacgagacgggcaccactcacacggccaccactgtcacttccaacatgagttcaaaccaagaccccccacctgctgccagcgatcagggagaggtggagagcacccagggcgacagcgtgaacatcaccagctccagtgccatcacgacaaccgtgtcctccacactgacgcgggctgtgaccaccgtgacgcagtccacaccggtcccgggcccctctgtgccgcccccagaggaactccaggtgtcgccaggtcctcgccagcagctgccgccacggcagcttctgcagtcggcttccacagccctgatgggggagtccgccgaggtcctgtcagcctcccagacccctgagctcccggccgccgtggatctgagcagcacaggggagccatcttcgggccaggagtctgccggctctgcggtggtggccactgtggtggtccagccacccccacccacacagtccgaagtagaccagttatcacttccccaagagctaatggccgaggcccaagctggcaccaccaccctcatggtaacggggctcacccccgaggagctggcagtgacggctgctgcagaagcagctgcccaggccgcagccacggaggaagcccaggccctggccatccaggcggtgctccaggccgcgcagcaggccgtcatgggcaccggcgagcccatggacacctccgaggcagcagcaaccgtgactcaggcggagctggggcacctgtcggccgagggtcaggagggccaggccaccaccatacccattgtgctgacacagcaggagctggctgccctggtgcagcagcagcagctgcaggaggcccaggcccagcagcagcatcaccacctccccactgaggccctggcccctgccgacagtctcaacgacccagccattgagagcaattgcctcaatgagctggccggcacggtccccagcactgtggcgctgctgccctcaacggccactgagagcctggctccatccaacacatttgtggccccccagccggttgtggtggccagcccagccaagctgcaggctgcagctaccctgaccgaagtggccaatggcatcgagtccctgggtgtgaagccagacctgccgcccccacccagcaaagcccccatgaagaaggaaaaccagtggtttgatgtgggagtcattaagggcaccaatgtaatggtgacacactatttcctgccaccagatgatgctgtcccatcagacgatgatttgggcaccgtccctgactataaccagctgaagaagcaggagctgcagccaggcacagcctataagtttcgtgttgccggaatcaatgcctgtggccgggggcccttcagcgaaatctcagcctttaagacgtgcctgcctggtttcccaggggccccttgtgccattaaaatcagcaaaagtccggatggtgctcacctcacctgggagccaccctctgtgacctccggcaagattatcgagtactccgtgtacctggccatccagagctcacaggctgggggcgagctcaagagctccaccccggcccagctggccttcatgcgggtgtactgcgggcccagcccctcctgcctggtgcagtcctccagcctttccaacgcccacatcgactacaccaccaagcccgccatcatcttccgcatcgccgcccgcaatgagaagggctatggcccggccacacaagtgaggtggctgcaggaaaccagtaaagacagctctggcaccaagccagccaacaagcggcccatgtcctctccagaaatgaaatctgctccaaagaaatctaaggccgatggtcagtgagaggaagctgactagcccctggattcttctccagacccccctgcttcaggaacacccgccagggcccacccctcccaccccgtcccagcattcgcacttcaccctcgcgagccgctgttcactcctctcccctttctctttctctctgtttttaaaataatctaaagaaagcacattttaccattgctgttgggaggaagcagaggcagatgggaaagcagagagaggagcgcgcttcctttcctccccgctgccgcccaccctggggagagacttttgcggggagggaaggcggagctgaggacagccagctccgccctcccaaggctgtgcgttcctgagggccaggtcgggggcaggcatggaggggaggaaaggcgtccctcttggccctccccagagtggctttcctggcaccctggcctgggtgtctggttctgttttcttttcttccccttgtgtttccagtcacctaacttcccttcctcaggctcccccggcccaccctgctcagtgaccccacaggaagcttacacattttctcagaggcctttgtgctcccacctcttctaccctccccctcttctttcccattttaaaaaagaaaagaaggaaaaagaaaaaaggggcaaggagccccgcggcggcctgggcagcgcctgtgcagacctccctgcaggccgcactgccaactgctgcatttgttgtgttttttaggttgcaattggtgaagttcacactttcattgtaattttagcgtgtggggttttgtcccttttttgttgttgttagctgtgtacagaatgtgtaatcttttttcttttctcttttttttgttttgttttgttttgtttttgtttttttacttttttcttcttggctaattcttggcagggatctttctggaggaaaagctggggccagccagggcaggagaggtgtgaaatctgccacgaggggcctgctgtttgccacccagcccaacttcctgttgctggcccctgccctctgcccttttgcctgtcctcaggccgctggaacaaaggaaggacagctcattcctcatgggcgatcactccgcatctatagggtcgagcctaggggagcttgagggagggctggggcctccttgtcctggatttccagctctccccatgccccctccctgagcaccaccggcaccgctcccaaacagggctgctggtttccgcagccactgctccacctcccccaaatcgtcatggaaagggtggagaatggaggggaaccaggcgtccttggaggcagcttgggagggtgactgtgtagtgtcacccacaagggaggctagggcaatggagcaggccaccagcagcagctgtgcagcatggaactcaggccaggctccgaggctgggggatctgcttggagttttctgccccccaccccaaacttctgtcgaggagcaaggcttgccagcaagtcagaaggatttgaaccgagcagccaatctttccagccctcccctaccgacctctgcctggagacgcagcagcctgtgtcctccagggcctctggtttgttgtattatagtatatttcgctgtggaaaatgtcacgtttagtcaccttggagcccactcacctggtcctgttgttttaccccatcccttctctcgcgcgcctattgatttgtttctgaggagagtacaccgttcactattgtagagtaacccctgtgactcaatattaccatagtgcgatgtcgttttgtgctattttgaacaattaaaagactttttttgaaataaccaaactaggtgt

SEQ ID NO: 452684 - DNA, 9009 bp, Homo sapiens
cggctcccagggaggaggcatgagcgccctgccgttaccgcttcttctgccgtacagttgccgcttcggggcctaactctagctctttgaagcggctcctgtgggaaggagtcataaggcgggaagtgaggatcggacaccgccttgagtttggtgtgcagtggaagaactgacctaggaggaagagaataggggggaacggggagctagtctcaagatggcggctcccacggcggcaggcgcagcctgagcagcagaggcggactaaggggagaggcgcgagacttcacaagccgtacggcgcgagcccccaaacggccctcgagagctcgagctggttccaccggcctccggcccgcctccattcgttaggtgtgtcgaggctgtttcgggagcggcggctgcactaaggcgctgggcggggaagcgggacggtctcaagatggcggctcccacaattgtggtctgagcgccggcggggctgcgacgaccgcggcgcttgtggctcctttccacccgccccggaagccggccagtgctggggacttgggggtgtgggaaccgggccggggctccgccatttccggcgggggagggctacgactgaggaagggaggagagagaggcggctcaagatggcggctcccagggcctcccgcccgagcttgtaagcgggagcgcccggacaagtagtcggggcgacgggactcagcggcctccagcttcttgagcctaggcgctcgacagtttcgggcggctcttgcggagacggggtgagcgagaagaaagggaagagccaaagggaaggagggcagttaagatggcggcctccatggagtcgtctaccgctgtgtgagaaaccgcttctccgtgagagctgccttagacgaaagggggtgtgtgaaaggaattgaggggctcccttcccgcttgttgacttctccccaccgcaccctttcccggaactatggcttcggccgtgtcgcccgccaacttgccagcggtgcttctgcagccccgctggaagcgagtggtgggctggtcgggtccggtgccacggccccgccacggccaccgcgccgtggccatcaaggagctcatcgtggtgtttggcggcggcaacgagggaatagtggacgaactgcacgtgtacaacacggcaaccaaccagtggttcatcccagccgtgaggggggacattccccctgggtgtgcagcctatggcttcgtgtgtgacgggactcgcctcctggtgtttggtgggatggtggagtatgggaaatacagcaatgacctctacgaactccaggcgagccggtgggagtggaagagactcaaagcaaagacgcccaaaaacgggccccctccgtgtcctcgactcgggcacagcttctcccttgtgggcaacaaatgctacctgtttgggggtctggccaatgatagcgaggacccaaagaacaacattccaaggtacctgaatgacttatatatcctggaattacggccaggctctggagtggtagcctgggacattcccatcacttacggggtcctaccaccaccccgggagtcacatactgccgtggtctacaccgaaaaagacaataagaagtccaagctggtgatctacggcgggatgagtggctgcaggctgggggacctgtggaccctagatattgacaccctgacgtggaataagcccagtctcagcggggtggcgcctcttcctcgcagtctccactcggcaaccaccatcggaaataaaatgtacgtgtttggtggctgggtgcctctcgtcatggatgacgtcaaagtggccacacacgagaaggagtggaagtgtaccaacacgctggcttgtctcaacctggataccatggcctgggagaccatcctgatggatacactggaggacaacatcccccgtgctcgggctggccactgcgcagtcgccatcaacacccgcctgtacatttggagtgggcgtgacggctaccgcaaggcctggaacaaccaggtctgctgcaaggacctctggtacctagagacagaaaagccaccacccccagcccgagtacaactggtacgcgccaacaccaactccctggaggtgagctggggggcagtggcaacagccgacagctaccttctccagctccagaaatatgacattcctgccacggctgctactgccacctcccctacacccaatccggtcccatctgtgcctgccaaccctcccaagagccctgccccagcagcagccgcacctgctgtgcagccgctgacccaagtaggcatcacgctcctgccccaggctgcccccgcacccccgaccaccaccaccatccaggtcttgccaacggtgcctggcagctccatttctgtgcccaccgcagccaggactcaaggtgtccctgctgttctcaaagtgaccggtcctcaggctacaacaggaactccattggtcaccatgcgacctgccagccaggctgggaaagcccctgtcaccgtgacctcccttcccgccggagtgcggatggttgtgccaacacagagtgcccagggaacggtgattggcagtagcccacagatgagtgggatggccgcactggccgctgcggccgctgccacccagaagatccccccttcctcggcacccacggtgctgagtgtcccagcgggtaccaccatcgtgaagaccatggctgtgacacctggcactaccaccctcccagccactgtgaaggtggcctcctcgccagtcatggtgagcaaccctgccactcgcatgctgaagactgcagccgcccaggtggggacatcggtttcctccgccaccaacacgtctacccgccctatcatcacagtgcacaagtcaggcactgtgacagtggcccagcaagcccaggtggtgaccacagttgtgggcggggtcaccaagaccatcaccctggtgaagagccccatctctgtcccaggaggcagtgctctgatttccaatctgggcaaagtgatgtcggtggtccagaccaaaccagttcagacttcagcagtcacaggccaggcgtccacgggtcctgtgactcagatcatccagaccaaagggcccctgccagcgggaacaatcctgaagctggtgacctcagcagatggcaagcccaccaccatcatcactaccacgcaggccagtggggcggggaccaagcccaccatcctgggcatcagcagcgtctcccccagtaccaccaagcccggcacgaccaccatcatcaaaaccatccccatgtcggccatcatcacccaggcgggcgccacgggtgtgaccagcagtcctggcatcaagtcccccatcaccatcatcaccaccaaggtgatgacttcaggaactggagcacctgcgaaaatcatcactgctgtccccaaaattgccactggccacgggcagcagggagtgacccaggtggtgcttaagggggccccgggacagccaggcaccatcctccgcactgtgcccatggggggtgttcgcctggtcacacccgtcaccgtctccgccgtcaagccagccgtcaccacgttggttgtgaaaggcaccacaggtgtcacgaccctaggcacagtgacaggcaccgtctccaccagccttgccggggcggggggccacagcactagtgcttccctggccacgcccatcaccaccttgggcaccattgccaccctctcaagccaggtgatcaaccccactgccatcactgtgtcggccgcacagaccacgctgacagcggcaggcgggctcacaaccccaaccatcaccatgcagcccgtgtcccagcccacccaggtaactctgatcacggcacctagtggggtggaggcccagcctgtgcatgacctccctgtgtccattctggcctccccgactacagaacagcccaccgccacagttaccatcgccgactcaggccagggtgatgtgcagcctggcactgtcaccttggtgtgctccaacccaccctgtgagacccacgagactggcaccaccaacacggccaccactactgttgtggctaaccttgggggacacccccagcccacccaagtgcagttcgtctgtgacagacaggaggcagctgcttctcttgtgacctcgactgtgggccagcagaatggtagcgtggtccgagtctgttcgaacccgccctgcgagacccacgagacgggcaccaccaacaccgccaccaccgccacctccaacatggccgggcagcatggctgctcaaacccaccctgcgagacccacgagacgggcaccaccaacactgccactacagccatgtcgagcgtcggcgccaaccaccagcgagatgcccgtcgggcctgtgcagctggcacccctgccgtgatccggatcagtgtggccactggggcgctggaggcagcccagggctctaagtcccagtgccaaacccgccagaccagcgcgaccagcaccaccatgactgtgatggccaccggggccccgtgctcggccggcccactccttgggccgagcatggcacgggagcccgggggccgcagccctgcttttgtgcagttggcccctctgagcagcaaagtcaggctgagcagcccaagcattaaggaccttcctgcggggcgccacagccatgcggtcagcaccgctgccatgacccgttccagcgtgggtgctggggagccccgcatggcacctgtgtgcgagagcctccagggtggctcgcccagcaccacagtgactgtgacagccctggaggcactgctgtgcccctcggccaccgtgacccaagtctgctccaacccaccatgtgagacccacgagacaggcaccaccaacaccgccactacctcgaatgcaggcagcgcccagagggtgtgctccaacccgccatgcgagacccacgagacgggcaccacccacacggccaccaccgctacttcaaacgggggcacgggccagcccgagggtgggcagcagccccctgctggtcgcccctgtgagacacaccagaccacttccactggcaccaccatgtcggtcagcgtgggtgccctgcttcccgacgccacttcttcccacaggaccgtggagtctggcctagaggtggcggcggcacccagcgtcaccccccaggctggcaccgcgctgctggctcctttcccaacacagagggtgtgctccaaccccccctgtgagacccacgagacgggcaccactcacacggccaccactgtcacttccaacatgagttcaaaccaagaccccccacctgctgccagcgatcagggagaggtggagagcacccagggcgacagcgtgaacatcaccagctccagtgccatcacgacaaccgtgtcctccacactgacgcgggctgtgaccaccgtgacgcagtccacaccggtcccgggcccctctgtgccgaagatctcatcaatgactgagactgccccaagggctctgactactgaagtccccatcccggccaaaataacagtgaccatagccaacacagaaacttctgacatgcccttctctgctgttgacatcctgcagcccccagaggaactccaggtgtcgccaggtcctcgccagcagctgccgccacggcagcttctgcagtcggcttccacagccctgatgggggagtccgccgaggtcctgtcagcctcccagacccctgagctcccggccgccgtggatctgagcagcacaggggagccatcttcgggccaggagtctgccggctctgcggtggtggccactgtggtggtccagccacccccacccacacagtccgaagtagaccagttatcacttccccaagagctaatggccgaggcccaagctggcaccaccaccctcatggtaacggggctcacccccgaggagctggcagtgacggctgctgcagaagcagctgcccaggccgcagccacggaggaagcccaggccctggccatccaggcggtgctccaggccgcgcagcaggccgtcatgggcaccggcgagcccatggacacctccgaggcagcagcaaccgtgactcaggcggagctggggcacctgtcggccgagggtcaggagggccaggccaccaccatacccattgtgctgacacagcaggagctggctgccctggtgcagcagcagcagctgcaggaggcccaggcccagcagcagcatcaccacctccccactgaggccctggcccctgccgacagtctcaacgacccagccattgagagcaattgcctcaatgagctggccggcacggtccccagcactgtggcgctgctgccctcaacggccactgagagcctggctccatccaacacatttgtggccccccagccggttgtggtggccagcccagccaagctgcaggctgcagctaccctgaccgaagtggccaatggcatcgagtccctgggtgtgaagccagacctgccgcccccacccagcaaagcccccatgaagaaggaaaaccagtggtttgatgtgggagtcattaagggcaccaatgtaatggtgacacactatttcctgccaccagatgatgctgtcccatcagacgatgatttgggcaccgtccctgactataaccagctgaagaagcaggagctgcagccaggcacagcctataagtttcgtgttgccggaatcaatgcctgtggccgggggcccttcagcgaaatctcagcctttaagacgtgcctgcctggtttcccaggggccccttgtgccattaaaatcagcaaaagtccggatggtgctcacctcacctgggagccaccctctgtgacctccggcaagattatcgagtactccgtgtacctggccatccagagctcacaggctgggggcgagctcaagagctccaccccggcccagctggccttcatgcgggtgtactgcgggcccagcccctcctgcctggtgcagtcctccagcctttccaacgcccacatcgactacaccaccaagcccgccatcatcttccgcatcgccgcccgcaatgagaagggctatggcccggccacacaagtgaggtggctgcaggaaaccagtaaagacagctctggcaccaagccagccaacaagcggcccatgtcctctccagaaatgaaatctgctccaaagaaatctaaggccgatggtcagtgagaggaagctgactagcccctggattcttctccagacccccctgcttcaggaacacccgccagggcccacccctcccaccccgtcccagcattcgcacttcaccctcgcgagccgctgttcactcctctcccctttctctttctctctgtttttaaaataatctaaagaaagcacattttaccattgctgttgggaggaagcagaggcagatgggaaagcagagagaggagcgcgcttcctttcctccccgctgccgcccaccctggggagagacttttgcggggagggaaggcggagctgaggacagccagctccgccctcccaaggctgtgcgttcctgagggccaggtcgggggcaggcatggaggggaggaaaggcgtccctcttggccctccccagagtggctttcctggcaccctggcctgggtgtctggttctgttttcttttcttccccttgtgtttccagtcacctaacttcccttcctcaggctcccccggcccaccctgctcagtgaccccacaggaagcttacacattttctcagaggcctttgtgctcccacctcttctaccctccccctcttctttcccattttaaaaaagaaaagaaggaaaaagaaaaaaggggcaaggagccccgcggcggcctgggcagcgcctgtgcagacctccctgcaggccgcactgccaactgctgcatttgttgtgttttttaggttgcaattggtgaagttcacactttcattgtaattttagcgtgtggggttttgtcccttttttgttgttgttagctgtgtacagaatgtgtaatcttttttcttttctcttttttttgttttgttttgttttgtttttgtttttttacttttttcttcttggctaattcttggcagggatctttctggaggaaaagctggggccagccagggcaggagaggtgtgaaatctgccacgaggggcctgctgtttgccacccagcccaacttcctgttgctggcccctgccctctgcccttttgcctgtcctcaggccgctggaacaaaggaaggacagctcattcctcatgggcgatcactccgcatctatagggtcgagcctaggggagcttgagggagggctggggcctccttgtcctggatttccagctctccccatgccccctccctgagcaccaccggcaccgctcccaaacagggctgctggtttccgcagccactgctccacctcccccaaatcgtcatggaaagggtggagaatggaggggaaccaggcgtccttggaggcagcttgggagggtgactgtgtagtgtcacccacaagggaggctagggcaatggagcaggccaccagcagcagctgtgcagcatggaactcaggccaggctccgaggctgggggatctgcttggagttttctgccccccaccccaaacttctgtcgaggagcaaggcttgccagcaagtcagaaggatttgaaccgagcagccaatctttccagccctcccctaccgacctctgcctggagacgcagcagcctgtgtcctccagggcctctggtttgttgtattatagtatatttcgctgtggaaaatgtcacgtttagtcaccttggagcccactcacctggtcctgttgttttaccccatcccttctctcgcgcgcctattgatttgtttctgaggagagtacaccgttcactattgtagagtaacccctgtgactcaatattaccatagtgcgatgtcgttttgtgctattttgaacaattaaaagactttttttgaaataaccaaactaggtgt

SEQ ID NO: 452685 - DNA, 7891 bp, Homo sapiens
cctccttccctcctcccggttctccggttctgcttctcagaggcagccatgtgggtggtttcctgtccaccctgcaggggctcttcatatctgagcattagccataggtccctttaaaaacaaacagtggcagcctggcgcacgcagtgccacacctggcctttctcatccgccgtatcttggagatcactccacgtccctgccccgcagcagcctccttcgagttgcggttgtgctgctgtaacttgtacaggcgccgctccgtgagtatccttgcaccatctccacccgtgtgcaagtgtatcctaggggtgaaaacctagaagtagggttgctgtccgatgcggctgaactgccctgcacagaggctgtgcccacgtaggcgctccagtggtgccctcacggaatggtcaggccactctttgccaagcctgatgggtggccgaagctccccctccggctcaccttgagccccagctgctgcgggcctgaaaataaaaatgccaggcgccgatggttgaagtttagatttcttttgcgtgagagtgtgtgttttttcttaagatctttctatcacgttttccctaaaccactttcccattgccgtctctttctgtgagttgtagtgttctttaacgggcaaggaggtaaacctctgactgtgtttctcatggttttcttagttggccgttggtggtttgtaattttattttttgtgttgctttttgccacaaagggtttctttgttttgttgtttttaatgtaataatccaataacttcttgattttaattcccatccttgacaacaaaagaaccaagggcaaccaggggtggcgggtttcctccatcctccttgctgacctcccttgtctgccctcccccagataccatggcctgggagaccatcctgatggatacactggaggacaacatcccccgtgctcgggctggccactgcgcagtcgccatcaacacccgcctgtacatttggagtgggcgtgacggctaccgcaaggcctggaacaaccaggtctgctgcaaggacctctggtacctagagacagaaaagccaccacccccagcccgagtacaactggtacgcgccaacaccaactccctggaggtgagctggggggcagtggcaacagccgacagctaccttctccagctccagaaatatgacattcctgccacggctgctactgccacctcccctacacccaatccggtcccatctgtgcctgccaaccctcccaagagccctgccccagcagcagccgcacctgctgtgcagccgctgacccaagtaggcatcacgctcctgccccaggctgcccccgcacccccgaccaccaccaccatccaggtcttgccaacggtgcctggcagctccatttctgtgcccaccgcagccaggactcaaggtgtccctgctgttctcaaagtgaccggtcctcaggctacaacaggaactccattggtcaccatgcgacctgccagccaggctgggaaagcccctgtcaccgtgacctcccttcccgccggagtgcggatggttgtgccaacacagagtgcccagggaacggtgattggcagtagcccacagatgagtgggatggccgcactggccgctgcggccgctgccacccagaagatccccccttcctcggcacccacggtgctgagtgtcccagcgggtaccaccatcgtgaagaccatggctgtgacacctggcactaccaccctcccagccactgtgaaggtggcctcctcgccagtcatggtgagcaaccctgccactcgcatgctgaagactgcagccgcccaggtggggacatcggtttcctccgccaccaacacgtctacccgccctatcatcacagtgcacaagtcaggcactgtgacagtggcccagcaagcccaggtggtgaccacagttgtgggcggggtcaccaagaccatcaccctggtgaagagccccatctctgtcccaggaggcagtgctctgatttccaatctgggcaaagtgatgtcggtggtccagaccaaaccagttcagacttcagcagtcacaggccaggcgtccacgggtcctgtgactcagatcatccagaccaaagggcccctgccagcgggaacaatcctgaagctggtgacctcagcagatggcaagcccaccaccatcatcactaccacgcaggccagtggggcggggaccaagcccaccatcctgggcatcagcagcgtctcccccagtaccaccaagcccggcacgaccaccatcatcaaaaccatccccatgtcggccatcatcacccaggcgggcgccacgggtgtgaccagcagtcctggcatcaagtcccccatcaccatcatcaccaccaaggtgatgacttcaggaactggagcacctgcgaaaatcatcactgctgtccccaaaattgccactggccacgggcagcagggagtgacccaggtggtgcttaagggggccccgggacagccaggcaccatcctccgcactgtgcccatggggggtgttcgcctggtcacacccgtcaccgtctccgccgtcaagccagccgtcaccacgttggttgtgaaaggcaccacaggtgtcacgaccctaggcacagtgacaggcaccgtctccaccagccttgccggggcggggggccacagcactagtgcttccctggccacgcccatcaccaccttgggcaccattgccaccctctcaagccaggtgatcaaccccactgccatcactgtgtcggccgcacagaccacgctgacagcggcaggcgggctcacaaccccaaccatcaccatgcagcccgtgtcccagcccacccaggtaactctgatcacggcacctagtggggtggaggcccagcctgtgcatgacctccctgtgtccattctggcctccccgactacagaacagcccaccgccacagttaccatcgccgactcaggccagggtgatgtgcagcctggcactgtcaccttggtgtgctccaacccaccctgtgagacccacgagactggcaccaccaacacggccaccactactgttgtggctaaccttgggggacacccccagcccacccaagtgcagttcgtctgtgacagacaggaggcagctgcttctcttgtgacctcgactgtgggccagcagaatggtagcgtggtccgagtctgttcgaacccgccctgcgagacccacgagacgggcaccaccaacaccgccaccaccgccacctccaacatggccgggcagcatggctgctcaaacccaccctgcgagacccacgagacgggcaccaccaacactgccactacagccatgtcgagcgtcggcgccaaccaccagcgagatgcccgtcgggcctgtgcagctggcacccctgccgtgatccggatcagtgtggccactggggcgctggaggcagcccagggctctaagtcccagtgccaaacccgccagaccagcgcgaccagcaccaccatgactgtgatggccaccggggccccgtgctcggccggcccactccttgggccgagcatggcacgggagcccgggggccgcagccctgcttttgtgcagttggcccctctgagcagcaaagtcaggctgagcagcccaagcattaaggaccttcctgcggggcgccacagccatgcggtcagcaccgctgccatgacccgttccagcgtgggtgctggggagccccgcatggcacctgtgtgcgagagcctccagggtggctcgcccagcaccacagtgactgtgacagccctggaggcactgctgtgcccctcggccaccgtgacccaagtctgctccaacccaccatgtgagacccacgagacaggcaccaccaacaccgccactacctcgaatgcaggcagcgcccagagggtgtgctccaacccgccatgcgagacccacgagacgggcaccacccacacggccaccaccgctacttcaaacgggggcacgggccagcccgagggtgggcagcagccccctgctggtcgcccctgtgagacacaccagaccacttccactggcaccaccatgtcggtcagcgtgggtgccctgcttcccgacgccacttcttcccacaggaccgtggagtctggcctagaggtggcggcggcacccagcgtcaccccccaggctggcaccgcgctgctggctcctttcccaacacagagggtgtgctccaaccccccctgtgagacccacgagacgggcaccactcacacggccaccactgtcacttccaacatgagttcaaaccaagaccccccacctgctgccagcgatcagggagaggtggagagcacccagggcgacagcgtgaacatcaccagctccagtgccatcacgacaaccgtgtcctccacactgacgcgggctgtgaccaccgtgacgcagtccacaccggtcccgggcccctctgtgccgcccccagaggaactccaggtgtcgccaggtcctcgccagcagctgccgccacggcagcttctgcagtcggcttccacagccctgatgggggagtccgccgaggtcctgtcagcctcccagacccctgagctcccggccgccgtggatctgagcagcacaggggagccatcttcgggccaggagtctgccggctctgcggtggtggccactgtggtggtccagccacccccacccacacagtccgaagtagaccagttatcacttccccaagagctaatggccgaggcccaagctggcaccaccaccctcatggtaacggggctcacccccgaggagctggcagtgacggctgctgcagaagcagctgcccaggccgcagccacggaggaagcccaggccctggccatccaggcggtgctccaggccgcgcagcaggccgtcatgggcaccggcgagcccatggacacctccgaggcagcagcaaccgtgactcaggcggagctggggcacctgtcggccgagggtcaggagggccaggccaccaccatacccattgtgctgacacagcaggagctggctgccctggtgcagcagcagcagctgcaggaggcccaggcccagcagcagcatcaccacctccccactgaggccctggcccctgccgacagtctcaacgacccagccattgagagcaattgcctcaatgagctggccggcacggtccccagcactgtggcgctgctgccctcaacggccactgagagcctggctccatccaacacatttgtggccccccagccggttgtggtggccagcccagccaagctgcaggctgcagctaccctgaccgaagtggccaatggcatcgagtccctgggtgtgaagccagacctgccgcccccacccagcaaagcccccatgaagaaggaaaaccagtggtttgatgtgggagtcattaagggcaccaatgtaatggtgacacactatttcctgccaccagatgatgctgtcccatcagacgatgatttgggcaccgtccctgactataaccagctgaagaagcaggagctgcagccaggcacagcctataagtttcgtgttgccggaatcaatgcctgtggccgggggcccttcagcgaaatctcagcctttaagacgtgcctgcctggtttcccaggggccccttgtgccattaaaatcagcaaaagtccggatggtgctcacctcacctgggagccaccctctgtgacctccggcaagattatcgagtactccgtgtacctggccatccagagctcacaggctgggggcgagctcaagagctccaccccggcccagctggccttcatgcgggtgtactgcgggcccagcccctcctgcctggtgcagtcctccagcctttccaacgcccacatcgactacaccaccaagcccgccatcatcttccgcatcgccgcccgcaatgagaagggctatggcccggccacacaagtgaggtggctgcaggaaaccagtaaagacagctctggcaccaagccagccaacaagcggcccatgtcctctccagaaatgaaatctgctccaaagaaatctaaggccgatggtcagtgagaggaagctgactagcccctggattcttctccagacccccctgcttcaggaacacccgccagggcccacccctcccaccccgtcccagcattcgcacttcaccctcgcgagccgctgttcactcctctcccctttctctttctctctgtttttaaaataatctaaagaaagcacattttaccattgctgttgggaggaagcagaggcagatgggaaagcagagagaggagcgcgcttcctttcctccccgctgccgcccaccctggggagagacttttgcggggagggaaggcggagctgaggacagccagctccgccctcccaaggctgtgcgttcctgagggccaggtcgggggcaggcatggaggggaggaaaggcgtccctcttggccctccccagagtggctttcctggcaccctggcctgggtgtctggttctgttttcttttcttccccttgtgtttccagtcacctaacttcccttcctcaggctcccccggcccaccctgctcagtgaccccacaggaagcttacacattttctcagaggcctttgtgctcccacctcttctaccctccccctcttctttcccattttaaaaaagaaaagaaggaaaaagaaaaaaggggcaaggagccccgcggcggcctgggcagcgcctgtgcagacctccctgcaggccgcactgccaactgctgcatttgttgtgttttttaggttgcaattggtgaagttcacactttcattgtaattttagcgtgtggggttttgtcccttttttgttgttgttagctgtgtacagaatgtgtaatcttttttcttttctcttttttttgttttgttttgttttgtttttgtttttttacttttttcttcttggctaattcttggcagggatctttctggaggaaaagctggggccagccagggcaggagaggtgtgaaatctgccacgaggggcctgctgtttgccacccagcccaacttcctgttgctggcccctgccctctgcccttttgcctgtcctcaggccgctggaacaaaggaaggacagctcattcctcatgggcgatcactccgcatctatagggtcgagcctaggggagcttgagggagggctggggcctccttgtcctggatttccagctctccccatgccccctccctgagcaccaccggcaccgctcccaaacagggctgctggtttccgcagccactgctccacctcccccaaatcgtcatggaaagggtggagaatggaggggaaccaggcgtccttggaggcagcttgggagggtgactgtgtagtgtcacccacaagggaggctagggcaatggagcaggccaccagcagcagctgtgcagcatggaactcaggccaggctccgaggctgggggatctgcttggagttttctgccccccaccccaaacttctgtcgaggagcaaggcttgccagcaagtcagaaggatttgaaccgagcagccaatctttccagccctcccctaccgacctctgcctggagacgcagcagcctgtgtcctccagggcctctggtttgttgtattatagtatatttcgctgtggaaaatgtcacgtttagtcaccttggagcccactcacctggtcctgttgttttaccccatcccttctctcgcgcgcctattgatttgtttctgaggagagtacaccgttcactattgtagagtaacccctgtgactcaatattaccatagtgcgatgtcgttttgtgctattttgaacaattaaaagactttttttgaaataaccaaactaggtgt

SEQ ID NO: 452686 - DNA, 6072 bp, Homo sapiens
  misc_feature (22)..(22): n is a, c, g, or t
tgagaatggagcccctgggccnccaatctctcgctttcctctgtctgctccgcccctctctggcctctgcaagtcaggcactgtgacagtggcccagcaagcccaggtggtgaccacagttgtgggcggggtcaccaagaccatcaccctggtgaagagccccatctctgtcccaggaggcagtgctctgatttccaatctgggcaaagtgatgtcggtggtccagaccaaaccagttcagacttcagcagtcacaggccaggcgtccacgggtcctgtgactcagatcatccagaccaaagggcccctgccagcgggaacaatcctgaagctggtgacctcagcagatggcaagcccaccaccatcatcactaccacgcaggccagtggggcggggaccaagcccaccatcctgggcatcagcagcgtctcccccagtaccaccaagcccggcacgaccaccatcatcaaaaccatccccatgtcggccatcatcacccaggcgggcgccacgggtgtgaccagcagtcctggcatcaagtcccccatcaccatcatcaccaccaaggtgatgacttcaggaactggagcacctgcgaaaatcatcactgctgtccccaaaattgccactggccacgggcagcagggagtgacccaggtggtgcttaagggggccccgggacagccaggcaccatcctccgcactgtgcccatggggggtgttcgcctggtcacacccgtcaccgtctccgccgtcaagccagccgtcaccacgttggttgtgaaaggcaccacaggtgtcacgaccctaggcacagtgacaggcaccgtctccaccagccttgccggggcggggggccacagcactagtgcttccctggccacgcccatcaccaccttgggcaccattgccaccctctcaagccaggtgatcaaccccactgccatcactgtgtcggccgcacagaccacgctgacagcggcaggcgggctcacaaccccaaccatcaccatgcagcccgtgtcccagcccacccaggtaactctgatcacggcacctagtggggtggaggcccagcctgtgcatgacctccctgtgtccattctggcctccccgactacagaacagcccaccgccacagttaccatcgccgactcaggccagggtgatgtgcagcctggcactgtcaccttggtgtgctccaacccaccctgtgagacccacgagactggcaccaccaacacggccaccactactgttgtggctaaccttgggggacacccccagcccacccaagtgcagttcgtctgtgacagacaggaggcagctgcttctcttgtgacctcgactgtgggccagcagaatggtagcgtggtccgagtctgttcgaacccgccctgcgagacccacgagacgggcaccaccaacaccgccaccaccgccacctccaacatggccgggcagcatggctgctcaaacccaccctgcgagacccacgagacgggcaccaccaacactgccactacagccatgtcgagcgtcggcgccaaccaccagcgagatgcccgtcgggcctgtgcagctggcacccctgccgtgatccggatcagtgtggccactggggcgctggaggcagcccagggctctaagtcccagtgccaaacccgccagaccagcgcgaccagcaccaccatgactgtgatggccaccggggccccgtgctcggccggcccactccttgggccgagcatggcacgggagcccgggggccgcagccctgcttttgtgcagttggcccctctgagcagcaaagtcaggctgagcagcccaagcattaaggaccttcctgcggggcgccacagccatgcggtcagcaccgctgccatgacccgttccagcgtgggtgctggggagccccgcatggcacctgtgtgcgagagcctccagggtggctcgcccagcaccacagtgactgtgacagccctggaggcactgctgtgcccctcggccaccgtgacccaagtctgctccaacccaccatgtgagacccacgagacaggcaccaccaacaccgccactacctcgaatgcaggcagcgcccagagggtgtgctccaacccgccatgcgagacccacgagacgggcaccacccacacggccaccaccgctacttcaaacgggggcacgggccagcccgagggtgggcagcagccccctgctggtcgcccctgtgagacacaccagaccacttccactggcaccaccatgtcggtcagcgtgggtgccctgcttcccgacgccacttcttcccacaggaccgtggagtctggcctagaggtggcggcggcacccagcgtcaccccccaggctggcaccgcgctgctggctcctttcccaacacagagggtgtgctccaaccccccctgtgagacccacgagacgggcaccactcacacggccaccactgtcacttccaacatgagttcaaaccaagaccccccacctgctgccagcgatcagggagaggtggagagcacccagggcgacagcgtgaacatcaccagctccagtgccatcacgacaaccgtgtcctccacactgacgcgggctgtgaccaccgtgacgcagtccacaccggtcccgggcccctctgtgccgcccccagaggaactccaggtgtcgccaggtcctcgccagcagctgccgccacggcagcttctgcagtcggcttccacagccctgatgggggagtccgccgaggtcctgtcagcctcccagacccctgagctcccggccgccgtggatctgagcagcacaggggagccatcttcgggccaggagtctgccggctctgcggtggtggccactgtggtggtccagccacccccacccacacagtccgaagtagaccagttatcacttccccaagagctaatggccgaggcccaagctggcaccaccaccctcatggtaacggggctcacccccgaggagctggcagtgacggctgctgcagaagcagctgcccaggccgcagccacggaggaagcccaggccctggccatccaggcggtgctccaggccgcgcagcaggccgtcatgggcaccggcgagcccatggacacctccgaggcagcagcaaccgtgactcaggcggagctggggcacctgtcggccgagggtcaggagggccaggccaccaccatacccattgtgctgacacagcaggagctggctgccctggtgcagcagcagcagctgcaggaggcccaggcccagcagcagcatcaccacctccccactgaggccctggcccctgccgacagtctcaacgacccagccattgagagcaattgcctcaatgagctggccggcacggtccccagcactgtggcgctgctgccctcaacggccactgagagcctggctccatccaacacatttgtggccccccagccggttgtggtggccagcccagccaagctgcaggctgcagctaccctgaccgaagtggccaatggcatcgagtccctgggtgtgaagccagacctgccgcccccacccagcaaagcccccatgaagaaggaaaaccagtggtttgatgtgggagtcattaagggcaccaatgtaatggtgacacactatttcctgccaccagatgatgctgtcccatcagacgatgatttgggcaccgtccctgactataaccagctgaagaagcaggagctgcagccaggcacagcctataagtttcgtgttgccggaatcaatgcctgtggccgggggcccttcagcgaaatctcagcctttaagacgtgcctgcctggtttcccaggggccccttgtgccattaaaatcagcaaaagtccggatggtgctcacctcacctgggagccaccctctgtgacctccggcaagattatcgagtactccgtgtacctggccatccagagctcacaggctgggggcgagctcaagagctccaccccggcccagctggccttcatgcgggtgtactgcgggcccagcccctcctgcctggtgcagtcctccagcctttccaacgcccacatcgactacaccaccaagcccgccatcatcttccgcatcgccgcccgcaatgagaagggctatggcccggccacacaagtgaggtggctgcaggaaaccagtaaagacagctctggcaccaagccagccaacaagcggcccatgtcctctccagaaatgaaatctgctccaaagaaatctaaggccgatggtcagtgagaggaagctgactagcccctggattcttctccagacccccctgcttcaggaacacccgccagggcccacccctcccaccccgtcccagcattcgcacttcaccctcgcgagccgctgttcactcctctcccctttctctttctctctgtttttaaaataatctaaagaaagcacattttaccattgctgttgggaggaagcagaggcagatgggaaagcagagagaggagcgcgcttcctttcctccccgctgccgcccaccctggggagagacttttgcggggagggaaggcggagctgaggacagccagctccgccctcccaaggctgtgcgttcctgagggccaggtcgggggcaggcatggaggggaggaaaggcgtccctcttggccctccccagagtggctttcctggcaccctggcctgggtgtctggttctgttttcttttcttccccttgtgtttccagtcacctaacttcccttcctcaggctcccccggcccaccctgctcagtgaccccacaggaagcttacacattttctcagaggcctttgtgctcccacctcttctaccctccccctcttctttcccattttaaaaaagaaaagaaggaaaaagaaaaaaggggcaaggagccccgcggcggcctgggcagcgcctgtgcagacctccctgcaggccgcactgccaactgctgcatttgttgtgttttttaggttgcaattggtgaagttcacactttcattgtaattttagcgtgtggggttttgtcccttttttgttgttgttagctgtgtacagaatgtgtaatcttttttcttttctcttttttttgttttgttttgttttgtttttgtttttttacttttttcttcttggctaattcttggcagggatctttctggaggaaaagctggggccagccagggcaggagaggtgtgaaatctgccacgaggggcctgctgtttgccacccagcccaacttcctgttgctggcccctgccctctgcccttttgcctgtcctcaggccgctggaacaaaggaaggacagctcattcctcatgggcgatcactccgcatctatagggtcgagcctaggggagcttgagggagggctggggcctccttgtcctggatttccagctctccccatgccccctccctgagcaccaccggcaccgctcccaaacagggctgctggtttccgcagccactgctccacctcccccaaatcgtcatggaaagggtggagaatggaggggaaccaggcgtccttggaggcagcttgggagggtgactgtgtagtgtcacccacaagggaggctagggcaatggagcaggccaccagcagcagctgtgcagcatggaactcaggccaggctccgaggctgggggatctgcttggagttttctgccccccaccccaaacttctgtcgaggagcaaggcttgccagcaagtcagaaggatttgaaccgagcagccaatctttccagccctcccctaccgacctctgcctggagacgcagcagcctgtgtcctccagggcctctggtttgttgtattatagtatatttcgctgtggaaaatgtcacgtttagtcaccttggagcccactcacctggtcctgttgttttaccccatcccttctctcgcgcgcctattgatttgtttctgaggagagtacaccgttcactattgtagagtaacccctgtgactcaatattaccatagtgcgatgtcgttttgtgctattttgaacaattaaaagactttttttgaaataaccaaactaggtgt

SEQ ID NO: 452687 - DNA, 4998 bp, Homo sapiens
gtcatgcacagcctgggcctccaccccactaggtgccgtgatcagagttacctgggtgggctggtacacgggctgcatggtgatgtttggggtcgtgagcccgcctggcactgtcaccttggtgtgctccaacccaccctgtgagacccacgagactggcaccaccaacacggccaccactactgttgtggctaaccttgggggacacccccagcccacccaagtgcagttcgtctgtgacagacaggaggcagctgcttctcttgtgacctcgactgtgggccagcagaatggtagcgtggtccgagtctgttcgaacccgccctgcgagacccacgagacgggcaccaccaacaccgccaccaccgccacctccaacatggccgggcagcatggctgctcaaacccaccctgcgagacccacgagacgggcaccaccaacactgccactacagccatgtcgagcgtcggcgccaaccaccagcgagatgcccgtcgggcctgtgcagctggcacccctgccgtgatccggatcagtgtggccactggggcgctggaggcagcccagggctctaagtcccagtgccaaacccgccagaccagcgcgaccagcaccaccatgactgtgatggccaccggggccccgtgctcggccggcccactccttgggccgagcatggcacgggagcccgggggccgcagccctgcttttgtgcagttggcccctctgagcagcaaagtcaggctgagcagcccaagcattaaggaccttcctgcggggcgccacagccatgcggtcagcaccgctgccatgacccgttccagcgtgggtgctggggagccccgcatggcacctgtgtgcgagagcctccagggtggctcgcccagcaccacagtgactgtgacagccctggaggcactgctgtgcccctcggccaccgtgacccaagtctgctccaacccaccatgtgagacccacgagacaggcaccaccaacaccgccactacctcgaatgcaggcagcgcccagagggtgtgctccaacccgccatgcgagacccacgagacgggcaccacccacacggccaccaccgctacttcaaacgggggcacgggccagcccgagggtgggcagcagccccctgctggtcgcccctgtgagacacaccagaccacttccactggcaccaccatgtcggtcagcgtgggtgccctgcttcccgacgccacttcttcccacaggaccgtggagtctggcctagaggtggcggcggcacccagcgtcaccccccaggctggcaccgcgctgctggctcctttcccaacacagagggtgtgctccaaccccccctgtgagacccacgagacgggcaccactcacacggccaccactgtcacttccaacatgagttcaaaccaagaccccccacctgctgccagcgatcagggagaggtggagagcacccagggcgacagcgtgaacatcaccagctccagtgccatcacgacaaccgtgtcctccacactgacgcgggctgtgaccaccgtgacgcagtccacaccggtcccgggcccctctgtgccgcccccagaggaactccaggtgtcgccaggtcctcgccagcagctgccgccacggcagcttctgcagtcggcttccacagccctgatgggggagtccgccgaggtcctgtcagcctcccagacccctgagctcccggccgccgtggatctgagcagcacaggggagccatcttcgggccaggagtctgccggctctgcggtggtggccactgtggtggtccagccacccccacccacacagtccgaagtagaccagttatcacttccccaagagctaatggccgaggcccaagctggcaccaccaccctcatggtaacggggctcacccccgaggagctggcagtgacggctgctgcagaagcagctgcccaggccgcagccacggaggaagcccaggccctggccatccaggcggtgctccaggccgcgcagcaggccgtcatgggcaccggcgagcccatggacacctccgaggcagcagcaaccgtgactcaggcggagctggggcacctgtcggccgagggtcaggagggccaggccaccaccatacccattgtgctgacacagcaggagctggctgccctggtgcagcagcagcagctgcaggaggcccaggcccagcagcagcatcaccacctccccactgaggccctggcccctgccgacagtctcaacgacccagccattgagagcaattgcctcaatgagctggccggcacggtccccagcactgtggcgctgctgccctcaacggccactgagagcctggctccatccaacacatttgtggccccccagccggttgtggtggccagcccagccaagctgcaggctgcagctaccctgaccgaagtggccaatggcatcgagtccctgggtgtgaagccagacctgccgcccccacccagcaaagcccccatgaagaaggaaaaccagtggtttgatgtgggagtcattaagggcaccaatgtaatggtgacacactatttcctgccaccagatgatgctgtcccatcagacgatgatttgggcaccgtccctgactataaccagctgaagaagcaggagctgcagccaggcacagcctataagtttcgtgttgccggaatcaatgcctgtggccgggggcccttcagcgaaatctcagcctttaagacgtgcctgcctggtttcccaggggccccttgtgccattaaaatcagcaaaagtccggatggtgctcacctcacctgggagccaccctctgtgacctccggcaagattatcgagtactccgtgtacctggccatccagagctcacaggctgggggcgagctcaagagctccaccccggcccagctggccttcatgcgggtgtactgcgggcccagcccctcctgcctggtgcagtcctccagcctttccaacgcccacatcgactacaccaccaagcccgccatcatcttccgcatcgccgcccgcaatgagaagggctatggcccggccacacaagtgaggtggctgcaggaaaccagtaaagacagctctggcaccaagccagccaacaagcggcccatgtcctctccagaaatgaaatctgctccaaagaaatctaaggccgatggtcagtgagaggaagctgactagcccctggattcttctccagacccccctgcttcaggaacacccgccagggcccacccctcccaccccgtcccagcattcgcacttcaccctcgcgagccgctgttcactcctctcccctttctctttctctctgtttttaaaataatctaaagaaagcacattttaccattgctgttgggaggaagcagaggcagatgggaaagcagagagaggagcgcgcttcctttcctccccgctgccgcccaccctggggagagacttttgcggggagggaaggcggagctgaggacagccagctccgccctcccaaggctgtgcgttcctgagggccaggtcgggggcaggcatggaggggaggaaaggcgtccctcttggccctccccagagtggctttcctggcaccctggcctgggtgtctggttctgttttcttttcttccccttgtgtttccagtcacctaacttcccttcctcaggctcccccggcccaccctgctcagtgaccccacaggaagcttacacattttctcagaggcctttgtgctcccacctcttctaccctccccctcttctttcccattttaaaaaagaaaagaaggaaaaagaaaaaaggggcaaggagccccgcggcggcctgggcagcgcctgtgcagacctccctgcaggccgcactgccaactgctgcatttgttgtgttttttaggttgcaattggtgaagttcacactttcattgtaattttagcgtgtggggttttgtcccttttttgttgttgttagctgtgtacagaatgtgtaatcttttttcttttctcttttttttgttttgttttgttttgtttttgtttttttacttttttcttcttggctaattcttggcagggatctttctggaggaaaagctggggccagccagggcaggagaggtgtgaaatctgccacgaggggcctgctgtttgccacccagcccaacttcctgttgctggcccctgccctctgcccttttgcctgtcctcaggccgctggaacaaaggaaggacagctcattcctcatgggcgatcactccgcatctatagggtcgagcctaggggagcttgagggagggctggggcctccttgtcctggatttccagctctccccatgccccctccctgagcaccaccggcaccgctcccaaacagggctgctggtttccgcagccactgctccacctcccccaaatcgtcatggaaagggtggagaatggaggggaaccaggcgtccttggaggcagcttgggagggtgactgtgtagtgtcacccacaagggaggctagggcaatggagcaggccaccagcagcagctgtgcagcatggaactcaggccaggctccgaggctgggggatctgcttggagttttctgccccccaccccaaacttctgtcgaggagcaaggcttgccagcaagtcagaaggatttgaaccgagcagccaatctttccagccctcccctaccgacctctgcctggagacgcagcagcctgtgtcctccagggcctctggtttgttgtattatagtatatttcgctgtggaaaatgtcacgtttagtcaccttggagcccactcacctggtcctgttgttttaccccatcccttctctcgcgcgcctattgatttgtttctgaggagagtacaccgttcactattgtagagtaacccctgtgactcaatattaccatagtgcgatgtcgttttgtgctattttgaacaattaaaagactttttttgaaataaccaaactaggtgt

SEQ ID NO: 452688 - DNA, 8585 bp, Homo sapiens
cggctcccagggaggaggcatgagcgccctgccgttaccgcttcttctgccgtacagttgccgcttcggggcctaactctagctctttgaagcggctcctgtgggaaggagtcataaggcgggaagtgaggatcggacaccgccttgagtttggtgtgcagtggaagaactgacctaggaggaagagaataggggggaacggggagctagtctcaagatggcggctcccacggcggcaggcgcagcctgagcagcagaggcggactaaggggagaggcgcgagacttcacaagccgtacggcgcgagcccccaaacggccctcgagagctcgagctggttccaccggcctccggcccgcctccattcgttaggtgtgtcgaggctgtttcgggagcggcggctgcactaaggcgctgggcggggaagcgggacggtctcaagatggcggctcccacaattgtggtctgagcgccggcggggctgcgacgaccgcggcgcttgtggctcctttccacccgccccggaagccggccagtgctggggacttgggggtgtgggaaccgggccggggctccgccatttccggcgggggagggctacgactgaggaagggaggagagagaggcggctcaagatggcggctcccagggcctcccgcccgagcttgtaagcgggagcgcccggacaagtagtcggggcgacgggactcagcggcctccagcttcttgagcctaggcgctcgacagtttcgggcggctcttgcggagacggggtgagcgagaagaaagggaagagccaaagggaaggagggcagttaagatggcggcctccatggagtcgtctaccgctgtgtgagaaaccgcttctccgtgagagctgccttagacgaaagggggtgtgtgaaaggaattgaggggctcccttcccgcttgttgacttctccccaccgcaccctttcccggaactatggcttcggccgtgtcgcccgccaacttgccagcggtgcttctgcagccccgctggaagcgagtggtgggctggtcgggtccggtgccacggccccgccacggccaccgcgccgtggccatcaaggagctcatcgtggtgtttggcggcggcaacgagggaatagtggacgaactgcacgtgtacaacacggcaaccaaccagtggttcatcccagccgtgaggggggacattccccctgggtgtgcagcctatggcttcgtgtgtgacgggactcgcctcctggtgtttggtgggatggtggagtatgggaaatacagcaatgacctctacgaactccaggcgagccggtgggagtggaagagactcaaagcaaagacgcccaaaaacgggccccctccgtgtcctcgactcgggcacagcttctcccttgtgggcaacaaatgctacctgtttgggggtctggccaatgatagcgaggacccaaagaacaacattccaaggtacctgaatgacttatatatcctggaattacggccaggctctggagtggtagcctgggacattcccatcacttacggggtcctaccaccaccccgggagtcacatactgccgtggtctacaccgaaaaagacaataagaagtccaagctggtgatctacggcgggatgagtggctgcaggctgggggacctgtggaccctagatattgacaccctgacgtggaataagcccagtctcagcggggtggcgcctcttcctcgcagtctccactcggcaaccaccatcggaaataaaatgtacgtgtttggtggctgggtgcctctcgtcatggatgacgtcaaagtggccacacacgagaaggagtggaagtgtaccaacacgctggcttgtctcaacctggataccatggcctgggagaccatcctgatggatacactggaggacaacatcccccgtgctcgggctggccactgcgcagtcgccatcaacacccgcctgtacatttggagtgggcgtgacggctaccgcaaggcctggaacaaccaggtctgctgcaaggacctctggtacctagagacagaaaagccaccacccccagcccgagtacaactggtacgcgccaacaccaactccctggaggtgagctggggggcagtggcaacagccgacagctaccttctccagctccagaaatatgacattcctgccacggctgctactgccacctcccctacacccaatccggtcccatctgtgcctgccaaccctcccaagagccctgccccagcagcagccgcacctgctgtgcagccgctgacccaagtaggcatcacgctcctgccccaggctgcccccgcacccccgaccaccaccaccatccaggtcttgccaacggtgcctggcagctccatttctgtgcccaccgcagccaggactcaaggtgtccctgctgttctcaaagtgaccggtcctcaggctacaacaggaactccattggtcaccatgcgacctgccagccaggctgggaaagcccctgtcaccgtgacctcccttcccgccggagtgcggatggttgtgccaacacagagtgcccagggaacggtgattggcagtagcccacagatgagtgggatggccgcactggccgctgcggccgctgccacccagaagatccccccttcctcggcacccacggtgctgagtgtcccagcgggtaccaccatcgtgaagaccatggctgtgacacctggcactaccaccctcccagccactgtgaaggtggcctcctcgccagtcatggtgagcaaccctgccactcgcatgctgaagactgcagccgcccaggtggggacatcggtttcctccgccaccaacacgtctacccgccctatcatcacagtgcacaagtcaggcactgtgacagtggcccagcaagcccaggtggtgaccacagttgtgggcggggtcaccaagaccatcaccctggtgaagagccccatctctgtcccaggaggcagtgctctgatttccaatctgggcaaagtgatgtcggtggtccagaccaaaccagttcagacttcagcagtcacaggccaggcgtccacgggtcctgtgactcagatcatccagaccaaagggcccctgccagcgggaacaatcctgaagctggtgacctcagcagatggcaagcccaccaccatcatcactaccacgcaggccagtggggcggggaccaagcccaccatcctgggcatcagcagcgtctcccccagtaccaccaagcccggcacgaccaccatcatcaaaaccatccccatgtcggccatcatcacccaggcgggcgccacgggtgtgaccagcagtcctggcatcaagtcccccatcaccatcatcaccaccaaggtgatgacttcaggaactggagcacctgcgaaaatcatcactgctgtccccaaaattgccactggccacgggcagcagggagtgacccaggtggtgcttaagggggccccgggacagccaggcaccatcctccgcactgtgcccatggggggtgttcgcctggtcacacccgtcaccgtctccgccgtcaagccagccgtcaccacgttggttgtgaaaggcaccacaggtgtcacgaccctaggcacagtgacaggcaccgtctccaccagccttgccggggcggggggccacagcactagtgcttccctggccacgcccatcaccaccttgggcaccattgccaccctctcaagccaggtgatcaaccccactgccatcactgtgtcggccgcacagaccacgctgacagcggcaggcgggctcacaaccccaaccatcaccatgcagcccgtgtcccagcccacccaggtaactctgatcacggcacctagtggggtggaggcccagcctgtgcatgacctccctgtgtccattctggcctccccgactacagaacagcccaccgccacagttaccatcgccgactcaggccagggtgatgtgcagcctggcactgtcaccttggtgtgctccaacccaccctgtgagacccacgagactggcaccaccaacacggccaccactactgttgtggctaaccttgggggacacccccagcccacccaagtgcagttcgtctgtgacagacaggaggcagctgcttctcttgtgacctcgactgtgggccagcagaatggtagcgtggtccgagtctgttcgaacccgccctgcgagacccacgagacgggcaccaccaacaccgccaccaccgccacctccaacatggccgggcagcatggctgctcaaacccaccctgcgagacccacgagacgggcaccaccaacactgccactacagccatgtcgagcgtcggcgccaaccaccagcgagatgcccgtcgggcctgtgcagctggcacccctgccgtgatccggatcagtgtggccactggggcgctggaggcagcccagggctctaagtcccagtgccaaacccgccagaccagcgcgaccagcaccaccatgactgtgatggccaccggggccccgtgctcggccggcccactccttgggccgagcatggcacgggagcccgggggccgcagccctgcttttgtgcagttggcccctctgagcagcaaagtcaggctgagcagcccaagcattaaggaccttcctgcggggcgccacagccatgcggtcagcaccgctgccatgacccgttccagcgtgggtgctggggagccccgcatggcacctgtgtgcgagagcctccagggtggctcgcccagcaccacagtgactgtgacagccctggaggcactgctgtgcccctcggccaccgtgacccaagtctgctccaacccaccatgtgagacccacgagacaggcaccaccaacaccgccactacctcgaatgcaggcagcgcccagagggtgtgctccaacccgccatgcgagacccacgagacgggcaccacccacacggccaccaccgctacttcaaacgggggcacgggccagcccgagggtgggcagcagccccctgctggtcgcccctgtgagacacaccagaccacttccactggcaccaccatgtcggtcagcgtgggtgccctgcttcccgacgccacttcttcccacaggaccgtggagtctggcctagaggtggcggcggcacccagcgtcaccccccaggctggcaccgcgctgctggctcctttcccaacacagagggtgtgctccaaccccccctgtgagacccacgagacgggcaccactcacacggccaccactgtcacttccaacatgagttcaaaccaagaccccccacctgctgccagcgatcagggagaggtggagagcacccagggcgacagcgtgaacatcaccagctccagtgccatcacgacaaccgtgtcctccacactgacgcgggctgtgaccaccgtgacgcagtccacaccggtcccgggcccctctgtgccgcccccagaggaactccaggtgtcgccaggtcctcgccagcagctgccgccacggcagcttctgcagtcggcttccacagccctgatgggggagtccgccgaggtcctgtcagcctcccagacccctgagctcccggccgccgtggatctgagcagcacaggggagccatcttcgggccaggagtctgccggctctgcggtggtggccactgtggtggtccagccacccccacccacacagtccgaagtagaccagttatcacttccccaagagctaatggccgaggcccaagctggcaccaccaccctcatggtaacggggctcacccccgaggagctggcagtgacggctgctgcagaagcagctgcccaggccgcagccacggaggaagcccaggccctggccatccaggcggtgctccaggccgcgcagcaggccgtcatgggcaccggcgagcccatggacacctccgaggcagcagcaaccgtgactcaggcggagctggggcacctgtcggccgagggtcaggagggccaggccaccaccatacccattgtgctgacacagcaggagctggctgccctggtgcagcagcagcagctgcaggaggcccaggcccagcagcagcatcaccacctccccactgaggccctggcccctgccgacagtctcaacgacccagccattgagagcaattgcctcaatgagctggccggcacggtccccagcactgtggcgctgctgccctcaacggccactgagagcctggctccatccaacacatttgtggccccccagccggttgtggtggccagcccagccaagctgcaggctgcagctaccctgaccgaagtggccaatggcatcgagtccctgggtgtgaagccagacctgccgcccccacccagcaaagcccccatgaagaaggaaaaccagtggtttgatgtgggagtcattaagggcaccaatgtaatggtgacacactatttcctgccaccagatgatgctgtcccatcagacgatgatttgggcaccgtccctgactataaccagctgaagaagcaggagctgcagccaggcacagcctataagtttcgtgttgccggaatcaatgcctgtggccgggggcccttcagcgaaatctcagcctttaagacgtgcctgcctggtttcccaggggccccttgtgccattaaaatcagcaaaagtccggatggtgctcacctcacctgggagccaccctctgtgacctccggcaagattatcgagtactccgtgtacctggccatccagagctcacaggctgggggcgagctcaagagctccaccccggcccagctggccttcatgcgggtgtactgcgggcccagcccctcctgcctggtgcagtcctccagcctttccaacgcccacatcgactacaccaccaagcccgccatcatcttccgcatcgccgcccgcaatgagaagggctatggcccggccacacaagtgaggtggctgcaggaaaccagtaaagacagctctggcaccaagccagccaacaagcggcccatgtcctctccagaaatgaaatctgctccaaagaaatctaaggccgatggtcagtgagaggaagctgactagcccctggattcttctccagacccccctgcttcaggaacacccgccagggcccacccctcccaccccgtcccagcattcgcacttcaccctcgcgagccgctgttcactcctctcccctttctctttctctctgtttttaaaataatctaaagaaagcacattttaccattgctgttgggaggaagcagaggcagatgggaaagcagagagaggagcgcgcttcctttcctccccgctgccgcccaccctggggagagacttttgcggggagggaaggcggagctgaggacagccagctccgccctcccaaggctgtgcgttcctgagggccaggtcgggggcaggcatggaggggaggaaaggcgtccctcttggccctccccagagtggctttcctggcaccctggcctgggtgtctggttctgttttcttttcttccccttgtgtttccagtcacctaacttcccttcctcaggctcccccggcccaccctgctcagtgaccccacaggaagcttacacattttctcagaggcctttgtgctcccacctcttctaccctccccctcttctttcccattttaaaaaagaaaagaaggaaaaagaaaaaaggggcaaggagccccgcggcggcctgggcagcgcctgtgcagacctccctgcaggccgcactgccaactgctgcatttgttgtgttttttaggttgcaattggtgaagttcacactttcattgtaattttagcgtgtggggttttgtcccttttttgttgttgttagctgtgtacagaatgtgtaatcttttttcttttctcttttttttgttttgttttgttttgtttttgtttttttacttttttcttcttggctaattcttggcagggatctttctggaggaaaagctggggccagccagggcaggagaggtgtgaaatctgccacgaggggcctgctgtttgccacccagcccaacttcctgttgctggcccctgccctctgcccttttgcctgtcctcaggccgctggaacaaaggaaggacagctcattcctcatgggcgatcactccgcatctatagggtcgagcctaggggagcttgagggagggctggggcctccttgtcctggatttccagctctccccatgccccctccctgagcaccaccggcaccgctcccaaacagggctgctggtttccgcagccactgctccacctcccccaaatcgtcatggaaagggtggagaatggaggggaaccaggcgtccttggaggcagcttgggagggtgactgtgtagtgtcacccacaagggaggctagggcaatggagcaggccaccagcagcagctgtgcagcatggaactcaggccaggctccgaggctgggggatctgcttggagttttctgccccccaccccaaacttctgtcgaggagcaaggcttgccagcaagtcagaaggatttgaaccgggcggtgcggcgtggggtaccgggctcgaa

SEQ ID NO: 452689 - DNA, 7526 bp, Homo sapiens
cggctcccagggaggaggcatgagcgccctgccgttaccgcttcttctgccgtacagttgccgcttcggggcctaactctagctctttgaagcggctcctgtgggaaggagtcataaggcgggaagtgaggatcggacaccgccttgagtttggtgtgcagtggaagaactgacctaggaggaagagaataggggggaacggggagctagtctcaagatggcggctcccacggcggcaggcgcagcctgagcagcagaggcggactaaggggagaggcgcgagacttcacaagccgtacggcgcgagcccccaaacggccctcgagagctcgagctggttccaccggcctccggcccgcctccattcgttaggtgtgtcgaggctgtttcgggagcggcggctgcactaaggcgctgggcggggaagcgggacggtctcaagatggcggctcccacaattgtggtctgagcgccggcggggctgcgacgaccgcggcgcttgtggctcctttccacccgccccggaagccggccagtgctggggacttgggggtgtgggaaccgggccggggctccgccatttccggcgggggagggctacgactgaggaagggaggagagagaggcggctcaagatggcggctcccagggcctcccgcccgagcttgtaagcgggagcgcccggacaagtagtcggggcgacgggactcagcggcctccagcttcttgagcctaggcgctcgacagtttcgggcggctcttgcggagacggggtgagcgagaagaaagggaagagccaaagggaaggagggcagttaagatggcggcctccatggagtcgtctaccgctgtgtgagaaaccgcttctccgtgagagctgccttagacgaaagggggtgtgtgaaaggaattgaggggctcccttcccgcttgttgacttctccccaccgcaccctttcccggaactatggcttcggccgtgtcgcccgccaacttgccagcggtgcttctgcagccccgctggaagcgagtggtgggctggtcgggtccggtgccacggccccgccacggccaccgcgccgtggccatcaaggagctcatcgtggtgtttggcggcggcaacgagggaatagtggacgaactgcacgtgtacaacacggcaaccaaccagtggttcatcccagccgtgaggggggacattccccctgggtgtgcagcctatggcttcgtgtgtgacgggactcgcctcctggtgtttggtgggatggtggagtatgggaaatacagcaatgacctctacgaactccaggcgagccggtgggagtggaagagactcaaagcaaagacgcccaaaaacgggccccctccgtgtcctcgactcgggcacagcttctcccttgtgggcaacaaatgctacctgtttgggggtctggccaatgatagcgaggacccaaagaacaacattccaaggtacctgaatgacttatatatcctggaattacggccaggctctggagtggtagcctgggacattcccatcacttacggggtcctaccaccaccccgggagtcacatactgccgtggtctacaccgaaaaagacaataagaagtccaagctggtgatctacggcgggatgagtggctgcaggctgggggacctgtggaccctagatattgacaccctgacgtggaataagcccagtctcagcggggtggcgcctcttcctcgcagtctccactcggcaaccaccatcggaaataaaatgtacgtgtttggtggctgggtgcctctcgtcatggatgacgtcaaagtggccacacacgagaaggagtggaagtgtaccaacacgctggcttgtctcaacctggataccatggcctgggagaccatcctgatggatacactggaggacaacatcccccgtgctcgggctggccactgcgcagtcgccatcaacacccgcctgtacatttggagtgggcgtgacggctaccgcaaggcctggaacaaccaggtctgctgcaaggacctctggtacctagagacagaaaagccaccacccccagcccgagtacaactggtacgcgccaacaccaactccctggaggtgagctggggggcagtggcaacagccgacagctaccttctccagctccagaaatatgacattcctgccacggctgctactgccacctcccctacacccaatccggtcccatctgtgcctgccaaccctcccaagagccctgccccagcagcagccgcacctgctgtgcagccgctgacccaagtaggcatcacgctcctgccccaggctgcccccgcacccccgaccaccaccaccatccaggtcttgccaacggtgcctggcagctccatttctgtgcccaccgcagccaggactcaaggtgtccctgctgttctcaaagtgaccggtcctcaggctacaacaggaactccattggtcaccatgcgacctgccagccaggctgggaaagcccctgtcaccgtgacctcccttcccgccggagtgcggatggttgtgccaacacagagtgcccagggaacggtgattggcagtagcccacagatgagtgggatggccgcactggccgctgcggccgctgccacccagaagatccccccttcctcggcacccacggtgctgagtgtcccagcgggtaccaccatcgtgaagaccatggctgtgacacctggcactaccaccctcccagccactgtgaaggtggcctcctcgccagtcatggtgagcaaccctgccactcgcatgctgaagactgcagccgcccaggtggggacatcggtttcctccgccaccaacacgtctacccgccctatcatcacagtgcacaagtcaggcactgtgacagtggcccagcaagcccaggtggtgaccacagttgtgggcggggtcaccaagaccatcaccctggtgaagagccccatctctgtcccaggaggcagtgctctgatttccaatctgggcaaagtgatgtcggtggtccagaccaaaccagttcagacttcagcagtcacaggccaggcgtccacgggtcctgtgactcagatcatccagaccaaagggcccctgccagcgggaacaatcctgaagctggtgacctcagcagatggcaagcccaccaccatcatcactaccacgcaggccagtggggcggggaccaagcccaccatcctgggcatcagcagcgtctcccccagtaccaccaagcccggcacgaccaccatcatcaaaaccatccccatgtcggccatcatcacccaggcgggcgccacgggtgtgaccagcagtcctggcatcaagtcccccatcaccatcatcaccaccaaggtgatgacttcaggaactggagcacctgcgaaaatcatcactgctgtccccaaaattgccactggccacgggcagcagggagtgacccaggtggtgcttaagggggccccgggacagccaggcaccatcctccgcactgtgcccatggggggtgttcgcctggtcacacccgtcaccgtctccgccgtcaagccagccgtcaccacgttggttgtgaaaggcaccacaggtgtcacgaccctaggcacagtgacaggcaccgtctccaccagccttgccggggcggggggccacagcactagtgcttccctggccacgcccatcaccaccttgggcaccattgccaccctctcaagccaggtgatcaaccccactgccatcactgtgtcggccgcacagaccacgctgacagcggcaggcgggctcacaaccccaaccatcaccatgcagcccgtgtcccagcccacccaggtaactctgatcacggcacctagtggggtggaggcccagcctgtgcatgacctccctgtgtccattctggcctccccgactacagaacagcccaccgccacagttaccatcgccgactcaggccagggtgatgtgcagcctggcactgtcaccttggtgtgctccaacccaccctgtgagacccacgagactggcaccaccaacacggccaccactactgttgtggctaaccttgggggacacccccagcccacccaagtgcagttcgtctgtgacagacaggaggcagctgcttctcttgtgacctcgactgtgggccagcagaatggtagcgtggtccgagtctgttcgaacccgccctgcgagacccacgagacgggcaccaccaacaccgccaccaccgccacctccaacatggccgggcagcatggctgctcaaacccaccctgcgagacccacgagacgggcaccaccaacactgccactacagccatgtcgagcgtcggcgccaaccaccagcgagatgcccgtcgggcctgtgcagctggcacccctgccgtgatccggatcagtgtggccactggggcgctggaggcagcccagggctctaagtcccagtgccaaacccgccagaccagcgcgaccagcaccaccatgactgtgatggccaccggggccccgtgctcggccggcccactccttgggccgagcatggcacgggagcccgggggccgcagccctgcttttgtgcagttggcccctctgagcagcaaagtcaggctgagcagcccaagcattaaggaccttcctgcggggcgccacagccatgcggtcagcaccgctgccatgacccgttccagcgtgggtgctggggagccccgcatggcacctgtgtgcgagagcctccagggtggctcgcccagcaccacagtgactgtgacagccctggaggcactgctgtgcccctcggccaccgtgacccaagtctgctccaacccaccatgtgagacccacgagacaggcaccaccaacaccgccactacctcgaatgcaggcagcgcccagagggtgtgctccaacccgccatgcgagacccacgagacgggcaccacccacacggccaccaccgctacttcaaacgggggcacgggccagcccgagggtgggcagcagccccctgctggtcgcccctgtgagacacaccagaccacttccactggcaccaccatgtcggtcagcgtgggtgccctgcttcccgacgccacttcttcccacaggaccgtggagtctggcctagaggtggcggcggcacccagcgtcaccccccaggctggcaccgcgctgctggctcctttcccaacacagagggtgtgctccaaccccccctgtgagacccacgagacgggcaccactcacacggccaccactgtcacttccaacatgagttcaaaccaagaccccccacctgctgccagcgatcagggagaggtggagagcacccagggcgacagcgtgaacatcaccagctccagtgccatcacgacaaccgtgtcctccacactgacgcgggctgtgaccaccgtgacgcagtccacaccggtcccgggcccctctgtgccgcccccagaggaactccaggtgtcgccaggtcctcgccagcagctgccgccacggcagcttctgcagtcggcttccacagccctgatgggggagtccgccgaggtcctgtcagcctcccagacccctgagctcccggccgccgtggatctgagcagcacaggggagccatcttcgggccaggagtctgccggctctgcggtggtggccactgtggtggtccagccacccccacccacacagtccgaagtagaccagttatcacttccccaagagctaatggccgaggcccaagctggcaccaccaccctcatggtaacggggctcacccccgaggagctggcagtgacggctgctgcagaagcagctgcccaggccgcagccacggaggaagcccaggccctggccatccaggcggtgctccaggccgcgcagcaggccgtcatgggcaccggcgagcccatggacacctccgaggcagcagcaaccgtgactcaggcggagctggggcacctgtcggccgagggtcaggagggccaggccaccaccatacccattgtgctgacacagcaggagctggctgccctggtgcagcagcagcagctgcaggaggcccaggcccagcagcagcatcaccacctccccactgaggccctggcccctgccgacagtctcaacgacccagccattgagagcaattgcctcaatgagctggccggcacggtccccagcactgtggcgctgctgccctcaacggccactgagagcctggctccatccaacacatttgtggccccccagccggttgtggtggccagcccagccaagctgcaggctgcagctaccctgaccgaagtggccaatggcatcgagtccctgggtgtgaagccagacctgccgcccccacccagcaaagcccccatgaagaaggaaaaccagtggtttgatgtgggagtcattaagggcaccaatgtaatggtgacacactatttcctgccaccagatgatgctgtcccatcagacgatgatttgggcaccgtccctgactataaccagctgaagaagcaggagctgcagccaggcacagcctataagtttcgtgttgccggaatcaatgcctgtggccgggggcccttcagcgaaatctcagcctttaagacgtgcctgcctggtttcccaggggccccttgtgccattaaaatcagcaaaagtccggatggtgctcacctcacctgggagccaccctctgtgacctccggcaagattatcgagtactccgtgtacctggccatccagagctcacaggctgggggcgagctcaagagctccaccccggcccagctggccttcatgcgggtgtactgcgggcccagcccctcctgcctggtgcagtcctccagcctttccaacgcccacatcgactacaccaccaagcccgccatcatcttccgcatcgccgcccgcaatgagaagggctatggcccggccacacaagtgaggtggctgcaggaaaccagtaaagacagctctggcaccaagccagccaacaagcggcccatgtcctctccagaaatgaaatctgctccaaagaaatctaaggccgatggtcagtgagaggaagctgactagcccctggattcttctccagacccccctgcttcaggaacacccgcaccagggcaccagccgctgccgccattgctcgtccatagaaatgcagtaccattcaacacctcgcagagacctggtgatacacgtacctcatccaaattaaaataccgtgacgtactcgtggtgaggaaaaaagtaaatctgaaagaaagcacgagtacatacacacataagacaagcacaaggcgccgagcaaaggcacgacaaagacagaagtgcgcgcaaacaacaaaaacaagaaagggaagaccgccacgatgacacctaagacccatacaccgaaaagaacacagagcccaaccacatggaagaagacgaaacacacaacagacaagaaggggaaagggcaggagcatagaacgaaaagaaagagaaaacaccaaacaaacaacaa

SEQ ID NO: 452690 - DNA, 2441 bp, Homo sapiens
cggctcccagggaggaggcatgagcgccctgccgttaccgcttcttctgccgtacagttgccgcttcggggcctaactctagctctttgaagcggctcctgtgggaaggagtcataaggcgggaagtgaggatcggacaccgccttgagtttggtgtgcagtggaagaactgacctaggaggaagagaataggggggaacggggagctagtctcaagatggcggctcccacggcggcaggcgcagcctgagcagcagaggcggactaaggggagaggcgcgagacttcacaagccgtacggcgcgagcccccaaacggccctcgagagctcgagctggttccaccggcctccggcccgcctccattcgttaggtgtgtcgaggctgtttcgggagcggcggctgcactaaggcgctgggcggggaagcgggacggtctcaagatggcggctcccacaattgtggtctgagcgccggcggggctgcgacgaccgcggcgcttgtggctcctttccacccgccccggaagccggccagtgctggggacttgggggtgtgggaaccgggccggggctccgccatttccggcgggggagggctacgactgaggaagggaggagagagaggcggctcaagatggcggctcccagggcctcccgcccgagcttgtaagcgggagcgcccggacaagtagtcggggcgacgggactcagcggcctccagcttcttgagcctaggcgctcgacagtttcgggcggctcttgcggagacggggtgagcgagaagaaagggaagagccaaagggaaggagggcagttaagatggcggcctccatggagtcgtctaccgctgtgtgagaaaccgcttctccgtgagagctgccttagacgaaagggggtgtgtgaaaggaattgaggggctcccttcccgcttgttgacttctccccaccgcaccctttcccggaactatggcttcggccgtgtcgcccgccaacttgccagcggtgcttctgcagccccgctggaagcgagtggtgggctggtcgggtccggtgccacggccccgccacggccaccgcgccgtggccatcaaggagctcatcgtggtgtttggcggcggcaacgagggaatagtggacgaactgcacgtgtacaacacggcaaccaaccagtggttcatcccagccgtgaggggggacattccccctgggtgtgcagcctatggcttcgtgtgtgacgggactcgcctcctggtgtttggtgggatggtggagtatgggaaatacagcaatgacctctacgaactccaggcgagccggtgggagtggaagagactcaaagcaaagacgcccaaaaacgggccccctccgtgtcctcgactcgggcacagcttctcccttgtgggcaacaaatgctacctgtttgggggtctggccaatgatagcgaggacccaaagaacaacattccaaggtacctgaatgacttatatatcctggaattacggccaggctctggagtggtagcctgggacattcccatcacttacggggtcctaccaccaccccgggagtcacatactgccgtggtctacaccgaaaaagacaataagaagtccaagctggtgatctacggcgggatgagtggctgcaggctgggggacctgtggaccctagatattgacaccctgacgtggaataagcccagtctcagcggggtggcgcctcttcctcgcagtctccactcggcaaccaccatcggaaataaaatgtacgtgtttggtggctgggtgcctctcgtcatggatgacgtcaaagtggccacacacgagaaggagtggaagtgtaccaacacgctggcttgtctcaacctggataccatggcctgggagaccatcctgatggatacactggaggacaacatcccccgtgctcgggctggccactgcgcagtcgccatcaacacccgcctgtacatttggagtgggcgtgacggctaccgcaaggcctggaacaaccaggtctgctgcaaggacctctggtacctagagacagaaaagccaccacccccagcccgagtacaactggtacgcgccaacaccaactccctggaggtgagctggggggcagtggcaacagccgacagctaccttctccagctccagaaatatgacattcctgccacggctgctactgccacctcccctacacccaatccggtcccatctgtgcctgccaaccctcccaagagccctgccccagcagcagccgcacctgctgtgcagccgctgacccaagtaggcatcacgctcctgccccaggctgcccccgcacccccgaccaccaccaccatccaggtcttgccaacggtgcctggcagctccatttctgtgcccaccgcagccaggactcaaggtgagccaggggaccagggacgtttgaaag

SEQ ID NO: 452691 - DNA, 391 bp, Homo sapiens
tgggcaggttccggtgaggtccaccaagcagggaggtgggtggcacctgtgacctggcctcacatgcccgtgcctgctgcaggtgattggcagtagcccacagatgagtgggatggccgcactggccgctgcggccgctgccacccagaagatccccccttcctcggcacccacggtgctgagtgtcccagcgggtaccaccatcgtgaagaccatggctgtgacacctggcactaccaccctcccagccactgtgaaggtggcctcctcgccagtcatggtgagcgtcttccggggcttgtcactgtggtcaaacaagcatagtcattccctccgggctttagagttagccgttggaccgtgggctgcagaataagctgtctccattagg

SEQ ID NO: 452692 - DNA, 7786 bp, Homo sapiens
ctgtaggtgatctagaggatcccggggctcattcaggatagtggacgaactgcacgttgtacaacacggcaaccaaccagtggttcatcccagccgtgaggggggacattccccctgggtgtgcagcctatggcttcgtgtgtgacgggactcgcctcctggtgtttggtgggatggtggagtatgggaaatacagcaatgacctctacgaactccaggcgagccggtgggagtggaagagactcaaagcaaagacgcccaaaaacgggccccctccgtgtcctcgactcgggcacagcttctcccttgtgggcaacaaatgctacctgtttgggggtctggccaatgatagcgaggacccaaagaacaacattccaaggtacctgaatgacttatatatcctggaattacggccaggctctggagtggtagcctgggacattcccatcacttacggggtcctaccaccaccccgggagtcacatactgccgtggtctacaccgaaaaagacaataagaagtccaagctggtgatctacggcgggatgagtggctgcaggctgggggacctgtggaccctagatattgacaccctgacgtggaataagcccagtctcagcggggtggcgcctcttcctcgcagtctccactcggcaaccaccatcggaaataaaatgtacgtgtttggtggctgggtgcctctcgtcatggatgacgtcaaagtggccacacacgagaaggagtggaagtgtaccaacacgctggcttgtctcaacctggataccatggcctgggagaccatcctgatggatacactggaggacaacatcccccgtgctcgggctggccactgcgcagtcgccatcaacacccgcctgtacatttggagtgggcgtgacggctaccgcaaggcctggaacaaccaggtctgctgcaaggacctctggtacctagagacagaaaagccaccacccccagcccgagtacaactggtacgcgccaacaccaactccctggaggtgagctggggggcagtggcaacagccgacagctaccttctccagctccagaaatatgacattcctgccacggctgctactgccacctcccctacacccaatccggtcccatctgtgcctgccaaccctcccaagagccctgccccagcagcagccgcacctgctgtgcagccgctgacccaagtaggcatcacgctcctgccccaggctgcccccgcacccccgaccaccaccaccatccaggtcttgccaacggtgcctggcagctccatttctgtgcccaccgcagccaggactcaaggtgtccctgctgttctcaaagtgaccggtcctcaggctacaacaggaactccattggtcaccatgcgacctgccagccaggctgggaaagcccctgtcaccgtgacctcccttcccgccggagtgcggatggttgtgccaacacagagtgcccagggaacggtgattggcagtagcccacagatgagtgggatggccgcactggccgctgcggccgctgccacccagaagatccccccttcctcggcacccacggtgctgagtgtcccagcgggtaccaccatcgtgaagaccatggctgtgacacctggcactaccaccctcccagccactgtgaaggtggcctcctcgccagtcatggtgagcaaccctgccactcgcatgctgaagactgcagccgcccaggtggggacatcggtttcctccgccaccaacacgtctacccgccctatcatcacagtgcacaagtcaggcactgtgacagtggcccagcaagcccaggtggtgaccacagttgtgggcggggtcaccaagaccatcaccctggtgaagagccccatctctgtcccaggaggcagtgctctgatttccaatctgggcaaagtgatgtcggtggtccagaccaaaccagttcagacttcagcagtcacaggccaggcgtccacgggtcctgtgactcagatcatccagaccaaagggcccctgccagcgggaacaatcctgaagctggtgacctcagcagatggcaagcccaccaccatcatcactaccacgcaggccagtggggcggggaccaagcccaccatcctgggcatcagcagcgtctcccccagtaccaccaagcccggcacgaccaccatcatcaaaaccatccccatgtcggccatcatcacccaggcgggcgccacgggtgtgaccagcagtcctggcatcaagtcccccatcaccatcatcaccaccaaggtgatgacttcaggaactggagcacctgcgaaaatcatcactgctgtccccaaaattgccactggccacgggcagcagggagtgacccaggtggtgcttaagggggccccgggacagccaggcaccatcctccgcactgtgcccatggggggtgttcgcctggtcacacccgtcaccgtctccgccgtcaagccagccgtcaccacgttggttgtgaaaggcaccacaggtgtcacgaccctaggcacagtgacaggcaccgtctccaccagccttgccggggcggggggccacagcactagtgcttccctggccacgcccatcaccaccttgggcaccattgccaccctctcaagccaggtgatcaaccccactgccatcactgtgtcggccgcacagaccacgctgacagcggcaggcgggctcacaaccccaaccatcaccatgcagcccgtgtcccagcccacccaggtaactctgatcacggcacctagtggggtggaggcccagcctgtgcatgacctccctgtgtccattctggcctccccgactacagaacagcccaccgccacagttaccatcgccgactcaggccagggtgatgtgcagcctggcactgtcaccttggtgtgctccaacccaccctgtgagacccacgagactggcaccaccaacacggccaccactactgttgtggctaaccttgggggacacccccagcccacccaagtgcagttcgtctgtgacagacaggaggcagctgcttctcttgtgacctcgactgtgggccagcagaatggtagcgtggtccgagtctgttcgaacccgccctgcgagacccacgagacgggcaccaccaacaccgccaccaccgccacctccaacatggccgggcagcatggctgctcaaacccaccctgcgagacccacgagacgggcaccaccaacactgccactacagccatgtcgagcgtcggcgccaaccaccagcgagatgcccgtcgggcctgtgcagctggcacccctgccgtgatccggatcagtgtggccactggggcgctggaggcagcccagggctctaagtcccagtgccaaacccgccagaccagcgcgaccagcaccaccatgactgtgatggccaccggggccccgtgctcggccggcccactccttgggccgagcatggcacgggagcccgggggccgcagccctgcttttgtgcagttggcccctctgagcagcaaagtcaggctgagcagcccaagcattaaggaccttcctgcggggcgccacagccatgcggtcagcaccgctgccatgacccgttccagcgtgggtgctggggagccccgcatggcacctgtgtgcgagagcctccagggtggctcgcccagcaccacagtgactgtgacagccctggaggcactgctgtgcccctcggccaccgtgacccaagtctgctccaacccaccatgtgagacccacgagacaggcaccaccaacaccgccactacctcgaatgcaggcagcgcccagagggtgtgctccaacccgccatgcgagacccacgagacgggcaccacccacacggccaccaccgctacttcaaacgggggcacgggccagcccgagggtgggcagcagccccctgctggtcgcccctgtgagacacaccagaccacttccactggcaccaccatgtcggtcagcgtgggtgccctgcttcccgacgccacttcttcccacaggaccgtggagtctggcctagaggtggcggcggcacccagcgtcaccccccaggctggcaccgcgctgctggctcctttcccaacacagagggtgtgctccaaccccccctgtgagacccacgagacgggcaccactcacacggccaccactgtcacttccaacatgagttcaaaccaagaccccccacctgctgccagcgatcagggagaggtggagagcacccagggcgacagcgtgaacatcaccagctccagtgccatcacgacaaccgtgtcctccacactgacgcgggctgtgaccaccgtgacgcagtccacaccggtcccgggcccctctgtgccgcccccagaggaactccaggtgtcgccaggtcctcgccagcagctgccgccacggcagcttctgcagtcggcttccacagccctgatgggggagtccgccgaggtcctgtcagcctcccagacccctgagctcccggccgccgtggatctgagcagcacaggggagccatcttcgggccaggagtctgccggctctgcggtggtggccactgtggtggtccagccacccccacccacacagtccgaagtagaccagttatcacttccccaagagctaatggccgaggcccaagctggcaccaccaccctcatggtaacggggctcacccccgaggagctggcagtgacggctgctgcagaagcagctgcccaggccgcagccacggaggaagcccaggccctggccatccaggcggtgctccaggccgcgcagcaggccgtcatgggcaccggcgagcccatggacacctccgaggcagcagcaaccgtgactcaggcggagctggggcacctgtcggccgagggtcaggagggccaggccaccaccatacccattgtgctgacacagcaggagctggctgccctggtgcagcagcagcagctgcaggaggcccaggcccagcagcagcatcaccacctccccactgaggccctggcccctgccgacagtctcaacgacccagccattgagagcaattgcctcaatgagctggccggcacggtccccagcactgtggcgctgctgccctcaacggccactgagagcctggctccatccaacacatttgtggccccccagccggttgtggtggccagcccagccaagctgcaggctgcagctaccctgaccgaagtggccaatggcatcgagtccctgggtgtgaagccagacctgccgcccccacccagcaaagcccccatgaagaaggaaaaccagtggtttgatgtgggagtcattaagggcaccaatgtaatggtgacacactatttcctgccaccagatgatgctgtcccatcagacgatgatttgggcaccgtccctgactataaccagctgaagaagcaggagctgcagccaggcacagcctataagtttcgtgttgccggaatcaatgcctgtggccgggggcccttcagcgaaatctcagcctttaagacgtgcctgcctggtttcccaggggccccttgtgccattaaaatcagcaaaagtccggatggtgctcacctcacctgggagccaccctctgtgacctccggcaagattatcgagtactccgtgtacctggccatccagagctcacaggctgggggcgagctcaagagctccaccccggcccagctggccttcatgcgggtgtactgcgggcccagcccctcctgcctggtgcagtcctccagcctttccaacgcccacatcgactacaccaccaagcccgccatcatcttccgcatcgccgcccgcaatgagaagggctatggcccggccacacaagtgaggtggctgcaggaaaccagtaaagacagctctggcaccaagccagccaacaagcggcccatgtcctctccagaaatgaaatctgctccaaagaaatctaaggccgatggtcagtgagaggaagctgactagcccctggattcttctccagacccccctgcttcaggaacacccgccagggcccacccctcccaccccgtcccagcattcgcacttcaccctcgcgagccgctgttcactcctctcccctttctctttctctctgtttttaaaataatctaaagaaagcacattttaccattgctgttgggaggaagcagaggcagatgggaaagcagagagaggagcgcgcttcctttcctccccgctgccgcccaccctggggagagacttttgcggggagggaaggcggagctgaggacagccagctccgccctcccaaggctgtgcgttcctgagggccaggtcgggggcaggcatggaggggaggaaaggcgtccctcttggccctccccagagtggctttcctggcaccctggcctgggtgtctggttctgttttcttttcttccccttgtgtttccagtcacctaacttcccttcctcaggctcccccggcccaccctgctcagtgaccccacaggaagcttacacattttctcagaggcctttgtgctcccacctcttctaccctccccctcttctttcccattttaaaaaagaaaagaaggaaaaagaaaaaaggggcaaggagccccgcggcggcctgggcagcgcctgtgcagacctccctgcaggccgcactgccaactgctgcatttgttgtgttttttaggttgcaattggtgaagttcacactttcattgtaattttagcgtgtggggttttgtcccttttttgttgttgttagctgtgtacagaatgtgtaatcttttttcttttctcttttttttgttttgttttgttttgtttttgtttttttacttttttcttcttggctaattcttggcagggatctttctggaggaaaagctggggccagccagggcaggagaggtgtgaaatctgccacgaggggcctgctgtttgccacccagcccaacttcctgttgctggcccctgccctctgcccttttgcctgtcctcaggccgctggaacaaaggaaggacagctcattcctcatgggcgatcactccgcatctatagggtcgagcctaggggagcttgagggagggctggggcctccttgtcctggatttccagctctccccatgccccctccctgagcaccaccggcaccgctcccaaacagggctgctggtttccgcagccactgctccacctcccccaaatcgtcatggaaagggtggagaatggaggggaaccaggcgtccttggaggcagcttgggagggtgactgtgtagtgtcacccacaagggaggctagggcaatggagcaggccaccagcagcagctgtgcagcatggaactcaggccaggctccgaggctgggggatctgcttggagttttctgccccccaccccaaacttctgtcgaggagcaaggcttgccagcaagtcagaaggatttgaaccgagcagccaatctttccagccctcccctaccgacctctgcctggagacgcagcagcctgtgtcctccagggcctctggtttgttgtattatagtatatttcgctgtggaaaatgtcacgtttagtcaccttggagcccactcacctggtcctgttgttttaccccatcccttctctcgcgcgcctattgatttgtttctgaggagagtacaccgttcactattgtagagtaacccctgtgactcaatattaccatagtgcgatgtcgttttgtgctattttgaacaattaaaagactttttttgaaataaccaaactaggtgt

SEQ ID NO: 452693 - DNA, 8123 bp, Homo sapiens
aaaagagtcactatggctcaggacacaaggcagggagctgccaggcctgtgcccatgctgggggagaaggaggctcgggacaaagtgggagaagtgctgggaagggctgaccggtaagggcccacgaaagttccggtgcgcaacgctgtcggcccctaccgctcatcccttcccgcttgttgacttctccccaccgcaccctttcccggaactatggcttcggccgtgtcgcccgccaacttgccagcggtgcttctgcagccccgctggaagcgagtggtgggctggtcgggtccggtgccacggccccgccacggccaccgcgccgtggccatcaaggagctcatcgtggtgtttggcggcggcaacgagggaatagtggacgaactgcacgtgtacaacacggcaaccaaccagtggttcatcccagccgtgaggggggacattccccctgggtgtgcagcctatggcttcgtgtgtgacgggactcgcctcctggtgtttggtgggatggtggagtatgggaaatacagcaatgacctctacgaactccaggcgagccggtgggagtggaagagactcaaagcaaagacgcccaaaaacgggccccctccgtgtcctcgactcgggcacagcttctcccttgtgggcaacaaatgctacctgtttgggggtctggccaatgatagcgaggacccaaagaacaacattccaaggtacctgaatgacttatatatcctggaattacggccaggctctggagtggtagcctgggacattcccatcacttacggggtcctaccaccaccccgggagtcacatactgccgtggtctacaccgaaaaagacaataagaagtccaagctggtgatctacggcgggatgagtggctgcaggctgggggacctgtggaccctagatattgacaccctgacgtggaataagcccagtctcagcggggtggcgcctcttcctcgcagtctccactcggcaaccaccatcggaaataaaatgtacgtgtttggtggctgggtgcctctcgtcatggatgacgtcaaagtggccacacacgagaaggagtggaagtgtaccaacacgctggcttgtctcaacctggataccatggcctgggagaccatcctgatggatacactggaggacaacatcccccgtgctcgggctggccactgcgcagtcgccatcaacacccgcctgtacatttggagtgggcgtgacggctaccgcaaggcctggaacaaccaggtctgctgcaaggacctctggtacctagagacagaaaagccaccacccccagcccgagtacaactggtacgcgccaacaccaactccctggaggtgagctggggggcagtggcaacagccgacagctaccttctccagctccagaaatatgacattcctgccacggctgctactgccacctcccctacacccaatccggtcccatctgtgcctgccaaccctcccaagagccctgccccagcagcagccgcacctgctgtgcagccgctgacccaagtaggcatcacgctcctgccccaggctgcccccgcacccccgaccaccaccaccatccaggtcttgccaacggtgcctggcagctccatttctgtgcccaccgcagccaggactcaaggtgtccctgctgttctcaaagtgaccggtcctcaggctacaacaggaactccattggtcaccatgcgacctgccagccaggctgggaaagcccctgtcaccgtgacctcccttcccgccggagtgcggatggttgtgccaacacagagtgcccagggaacggtgattggcagtagcccacagatgagtgggatggccgcactggccgctgcggccgctgccacccagaagatccccccttcctcggcacccacggtgctgagtgtcccagcgggtaccaccatcgtgaagaccatggctgtgacacctggcactaccaccctcccagccactgtgaaggtggcctcctcgccagtcatggtgagcaaccctgccactcgcatgctgaagactgcagccgcccaggtggggacatcggtttcctccgccaccaacacgtctacccgccctatcatcacagtgcacaagtcaggcactgtgacagtggcccagcaagcccaggtggtgaccacagttgtgggcggggtcaccaagaccatcaccctggtgaagagccccatctctgtcccaggaggcagtgctctgatttccaatctgggcaaagtgatgtcggtggtccagaccaaaccagttcagacttcagcagtcacaggccaggcgtccacgggtcctgtgactcagatcatccagaccaaagggcccctgccagcgggaacaatcctgaagctggtgacctcagcagatggcaagcccaccaccatcatcactaccacgcaggccagtggggcggggaccaagcccaccatcctgggcatcagcagcgtctcccccagtaccaccaagcccggcacgaccaccatcatcaaaaccatccccatgtcggccatcatcacccaggcgggcgccacgggtgtgaccagcagtcctggcatcaagtcccccatcaccatcatcaccaccaaggtgatgacttcaggaactggagcacctgcgaaaatcatcactgctgtccccaaaattgccactggccacgggcagcagggagtgacccaggtggtgcttaagggggccccgggacagccaggcaccatcctccgcactgtgcccatggggggtgttcgcctggtcacacccgtcaccgtctccgccgtcaagccagccgtcaccacgttggttgtgaaaggcaccacaggtgtcacgaccctaggcacagtgacaggcaccgtctccaccagccttgccggggcggggggccacagcactagtgcttccctggccacgcccatcaccaccttgggcaccattgccaccctctcaagccaggtgatcaaccccactgccatcactgtgtcggccgcacagaccacgctgacagcggcaggcgggctcacaaccccaaccatcaccatgcagcccgtgtcccagcccacccaggtaactctgatcacggcacctagtggggtggaggcccagcctgtgcatgacctccctgtgtccattctggcctccccgactacagaacagcccaccgccacagttaccatcgccgactcaggccagggtgatgtgcagcctggcactgtcaccttggtgtgctccaacccaccctgtgagacccacgagactggcaccaccaacacggccaccactactgttgtggctaaccttgggggacacccccagcccacccaagtgcagttcgtctgtgacagacaggaggcagctgcttctcttgtgacctcgactgtgggccagcagaatggtagcgtggtccgagtctgttcgaacccgccctgcgagacccacgagacgggcaccaccaacaccgccaccaccgccacctccaacatggccgggcagcatggctgctcaaacccaccctgcgagacccacgagacgggcaccaccaacactgccactacagccatgtcgagcgtcggcgccaaccaccagcgagatgcccgtcgggcctgtgcagctggcacccctgccgtgatccggatcagtgtggccactggggcgctggaggcagcccagggctctaagtcccagtgccaaacccgccagaccagcgcgaccagcaccaccatgactgtgatggccaccggggccccgtgctcggccggcccactccttgggccgagcatggcacgggagcccgggggccgcagccctgcttttgtgcagttggcccctctgagcagcaaagtcaggctgagcagcccaagcattaaggaccttcctgcggggcgccacagccatgcggtcagcaccgctgccatgacccgttccagcgtgggtgctggggagccccgcatggcacctgtgtgcgagagcctccagggtggctcgcccagcaccacagtgactgtgacagccctggaggcactgctgtgcccctcggccaccgtgacccaagtctgctccaacccaccatgtgagacccacgagacaggcaccaccaacaccgccactacctcgaatgcaggcagcgcccagagggtgtgctccaacccgccatgcgagacccacgagacgggcaccacccacacggccaccaccgctacttcaaacgggggcacgggccagcccgagggtgggcagcagccccctgctggtcgcccctgtgagacacaccagaccacttccactggcaccaccatgtcggtcagcgtgggtgccctgcttcccgacgccacttcttcccacaggaccgtggagtctggcctagaggtggcggcggcacccagcgtcaccccccaggctggcaccgcgctgctggctcctttcccaacacagagggtgtgctccaaccccccctgtgagacccacgagacgggcaccactcacacggccaccactgtcacttccaacatgagttcaaaccaagaccccccacctgctgccagcgatcagggagaggtggagagcacccagggcgacagcgtgaacatcaccagctccagtgccatcacgacaaccgtgtcctccacactgacgcgggctgtgaccaccgtgacgcagtccacaccggtcccgggcccctctgtgccgcccccagaggaactccaggtgtcgccaggtcctcgccagcagctgccgccacggcagcttctgcagtcggcttccacagccctgatgggggagtccgccgaggtcctgtcagcctcccagacccctgagctcccggccgccgtggatctgagcagcacaggggagccatcttcgggccaggagtctgccggctctgcggtggtggccactgtggtggtccagccacccccacccacacagtccgaagtagaccagttatcacttccccaagagctaatggccgaggcccaagctggcaccaccaccctcatggtaacggggctcacccccgaggagctggcagtgacggctgctgcagaagcagctgcccaggccgcagccacggaggaagcccaggccctggccatccaggcggtgctccaggccgcgcagcaggccgtcatgggcaccggcgagcccatggacacctccgaggcagcagcaaccgtgactcaggcggagctggggcacctgtcggccgagggtcaggagggccaggccaccaccatacccattgtgctgacacagcaggagctggctgccctggtgcagcagcagcagctgcaggaggcccaggcccagcagcagcatcaccacctccccactgaggccctggcccctgccgacagtctcaacgacccagccattgagagcaattgcctcaatgagctggccggcacggtccccagcactgtggcgctgctgccctcaacggccactgagagcctggctccatccaacacatttgtggccccccagccggttgtggtggccagcccagccaagctgcaggctgcagctaccctgaccgaagtggccaatggcatcgagtccctgggtgtgaagccagacctgccgcccccacccagcaaagcccccatgaagaaggaaaaccagtggtttgatgtgggagtcattaagggcaccaatgtaatggtgacacactatttcctgccaccagatgatgctgtcccatcagacgatgatttgggcaccgtccctgactataaccagctgaagaagcaggagctgcagccaggcacagcctataagtttcgtgttgccggaatcaatgcctgtggccgggggcccttcagcgaaatctcagcctttaagacgtgcctgcctggtttcccaggggccccttgtgccattaaaatcagcaaaagtccggatggtgctcacctcacctgggagccaccctctgtgacctccggcaagattatcgagtactccgtgtacctggccatccagagctcacaggctgggggcgagctcaagagctccaccccggcccagctggccttcatgcgggtgtactgcgggcccagcccctcctgcctggtgcagtcctccagcctttccaacgcccacatcgactacaccaccaagcccgccatcatcttccgcatcgccgcccgcaatgagaagggctatggcccggccacacaagtgaggtggctgcaggaaaccagtaaagacagctctggcaccaagccagccaacaagcggcccatgtcctctccagaaatgaaatctgctccaaagaaatctaaggccgatggtcagtgagaggaagctgactagcccctggattcttctccagacccccctgcttcaggaacacccgccagggcccacccctcccaccccgtcccagcattcgcacttcaccctcgcgagccgctgttcactcctctcccctttctctttctctctgtttttaaaataatctaaagaaagcacattttaccattgctgttgggaggaagcagaggcagatgggaaagcagagagaggagcgcgcttcctttcctccccgctgccgcccaccctggggagagacttttgcggggagggaaggcggagctgaggacagccagctccgccctcccaaggctgtgcgttcctgagggccaggtcgggggcaggcatggaggggaggaaaggcgtccctcttggccctccccagagtggctttcctggcaccctggcctgggtgtctggttctgttttcttttcttccccttgtgtttccagtcacctaacttcccttcctcaggctcccccggcccaccctgctcagtgaccccacaggaagcttacacattttctcagaggcctttgtgctcccacctcttctaccctccccctcttctttcccattttaaaaaagaaaagaaggaaaaagaaaaaaggggcaaggagccccgcggcggcctgggcagcgcctgtgcagacctccctgcaggccgcactgccaactgctgcatttgttgtgttttttaggttgcaattggtgaagttcacactttcattgtaattttagcgtgtggggttttgtcccttttttgttgttgttagctgtgtacagaatgtgtaatcttttttcttttctcttttttttgttttgttttgttttgtttttgtttttttacttttttcttcttggctaattcttggcagggatctttctggaggaaaagctggggccagccagggcaggagaggtgtgaaatctgccacgaggggcctgctgtttgccacccagcccaacttcctgttgctggcccctgccctctgcccttttgcctgtcctcaggccgctggaacaaaggaaggacagctcattcctcatgggcgatcactccgcatctatagggtcgagcctaggggagcttgagggagggctggggcctccttgtcctggatttccagctctccccatgccccctccctgagcaccaccggcaccgctcccaaacagggctgctggtttccgcagccactgctccacctcccccaaatcgtcatggaaagggtggagaatggaggggaaccaggcgtccttggaggcagcttgggagggtgactgtgtagtgtcacccacaagggaggctagggcaatggagcaggccaccagcagcagctgtgcagcatggaactcaggccaggctccgaggctgggggatctgcttggagttttctgccccccaccccaaacttctgtcgaggagcaaggcttgccagcaagtcagaaggatttgaaccgagcagccaatctttccagccctcccctaccgacctctgcctggagacgcagcagcctgtgtcctccagggcctctggtttgttgtattatagtatatttcgctgtggaaaatgtcacgtttagtcaccttggagcccactcacctggtcctgttgttttaccccatcccttctctcgcgcgcctattgatttgtttctgaggagagtacaccgttcactattgtagagtaacccctgtgactcaatattaccatagtgcgatgtcgttttgtgctattttgaacaattaaaagactttttttgaaataaccaaactaggtgt

SEQ ID NO: 452694 - DNA, 6855 bp, Homo sapiens
cggctcccagggaggaggcatgagcgccctgccgttaccgcttcttctgccgtacagttgccgcttcggggcctaactctagctctttgaagcggctcctgtgggaaggagtcataaggcgggaagtgaggatcggacaccgccttgagtttggtgtgcagtggaagaactgacctaggaggaagagaataggggggaacggggagctagtctcaagatggcggctcccacggcggcaggcgcagcctgagcagcagaggcggactaaggggagaggcgcgagacttcacaagccgtacggcgcgagcccccgaccaccaccaccatccaggtcttgccaacggtgcctggcagctccatttctgtgcccaccgcagccaggactcaaggtgtccctgctgttctcaaagtgaccggtcctcaggctacaacaggaactccattggtcaccatgcgacctgccagccaggctgggaaagcccctgtcaccgtgacctcccttcccgccggagtgcggatggttgtgccaacacagagtgcccagggaacggtgattggcagtagcccacagatgagtgggatggccgcactggccgctgcggccgctgccacccagaagatccccccttcctcggcacccacggtgctgagtgtcccagcgggtaccaccatcgtgaagaccatggctgtgacacctggcactaccaccctcccagccactgtgaaggtggcctcctcgccagtcatggtgagcaaccctgccactcgcatgctgaagactgcagccgcccaggtggggacatcggtttcctccgccaccaacacgtctacccgccctatcatcacagtgcacaagtcaggcactgtgacagtggcccagcaagcccaggtggtgaccacagttgtgggcggggtcaccaagaccatcaccctggtgaagagccccatctctgtcccaggaggcagtgctctgatttccaatctgggcaaagtgatgtcggtggtccagaccaaaccagttcagacttcagcagtcacaggccaggcgtccacgggtcctgtgactcagatcatccagaccaaagggcccctgccagcgggaacaatcctgaagctggtgacctcagcagatggcaagcccaccaccatcatcactaccacgcaggccagtggggcggggaccaagcccaccatcctgggcatcagcagcgtctcccccagtaccaccaagcccggcacgaccaccatcatcaaaaccatccccatgtcggccatcatcacccaggcgggcgccacgggtgtgaccagcagtcctggcatcaagtcccccatcaccatcatcaccaccaaggtgatgacttcaggaactggagcacctgcgaaaatcatcactgctgtccccaaaattgccactggccacgggcagcagggagtgacccaggtggtgcttaagggggccccgggacagccaggcaccatcctccgcactgtgcccatggggggtgttcgcctggtcacacccgtcaccgtctccgccgtcaagccagccgtcaccacgttggttgtgaaaggcaccacaggtgtcacgaccctaggcacagtgacaggcaccgtctccaccagccttgccggggcggggggccacagcactagtgcttccctggccacgcccatcaccaccttgggcaccattgccaccctctcaagccaggtgatcaaccccactgccatcactgtgtcggccgcacagaccacgctgacagcggcaggcgggctcacaaccccaaccatcaccatgcagcccgtgtcccagcccacccaggtaactctgatcacggcacctagtggggtggaggcccagcctgtgcatgacctccctgtgtccattctggcctccccgactacagaacagcccaccgccacagttaccatcgccgactcaggccagggtgatgtgcagcctggcactgtcaccttggtgtgctccaacccaccctgtgagacccacgagactggcaccaccaacacggccaccactactgttgtggctaaccttgggggacacccccagcccacccaagtgcagttcgtctgtgacagacaggaggcagctgcttctcttgtgacctcgactgtgggccagcagaatggtagcgtggtccgagtctgttcgaacccgccctgcgagacccacgagacgggcaccaccaacaccgccaccaccgccacctccaacatggccgggcagcatggctgctcaaacccaccctgcgagacccacgagacgggcaccaccaacactgccactacagccatgtcgagcgtcggcgccaaccaccagcgagatgcccgtcgggcctgtgcagctggcacccctgccgtgatccggatcagtgtggccactggggcgctggaggcagcccagggctctaagtcccagtgccaaacccgccagaccagcgcgaccagcaccaccatgactgtgatggccaccggggccccgtgctcggccggcccactccttgggccgagcatggcacgggagcccgggggccgcagccctgcttttgtgcagttggcccctctgagcagcaaagtcaggctgagcagcccaagcattaaggaccttcctgcggggcgccacagccatgcggtcagcaccgctgccatgacccgttccagcgtgggtgctggggagccccgcatggcacctgtgtgcgagagcctccagggtggctcgcccagcaccacagtgactgtgacagccctggaggcactgctgtgcccctcggccaccgtgacccaagtctgctccaacccaccatgtgagacccacgagacaggcaccaccaacaccgccactacctcgaatgcaggcagcgcccagagggtgtgctccaacccgccatgcgagacccacgagacgggcaccacccacacggccaccaccgctacttcaaacgggggcacgggccagcccgagggtgggcagcagccccctgctggtcgcccctgtgagacacaccagaccacttccactggcaccaccatgtcggtcagcgtgggtgccctgcttcccgacgccacttcttcccacaggaccgtggagtctggcctagaggtggcggcggcacccagcgtcaccccccaggctggcaccgcgctgctggctcctttcccaacacagagggtgtgctccaaccccccctgtgagacccacgagacgggcaccactcacacggccaccactgtcacttccaacatgagttcaaaccaagaccccccacctgctgccagcgatcagggagaggtggagagcacccagggcgacagcgtgaacatcaccagctccagtgccatcacgacaaccgtgtcctccacactgacgcgggctgtgaccaccgtgacgcagtccacaccggtcccgggcccctctgtgccgcccccagaggaactccaggtgtcgccaggtcctcgccagcagctgccgccacggcagcttctgcagtcggcttccacagccctgatgggggagtccgccgaggtcctgtcagcctcccagacccctgagctcccggccgccgtggatctgagcagcacaggggagccatcttcgggccaggagtctgccggctctgcggtggtggccactgtggtggtccagccacccccacccacacagtccgaagtagaccagttatcacttccccaagagctaatggccgaggcccaagctggcaccaccaccctcatggtaacggggctcacccccgaggagctggcagtgacggctgctgcagaagcagctgcccaggccgcagccacggaggaagcccaggccctggccatccaggcggtgctccaggccgcgcagcaggccgtcatgggcaccggcgagcccatggacacctccgaggcagcagcaaccgtgactcaggcggagctggggcacctgtcggccgagggtcaggagggccaggccaccaccatacccattgtgctgacacagcaggagctggctgccctggtgcagcagcagcagctgcaggaggcccaggcccagcagcagcatcaccacctccccactgaggccctggcccctgccgacagtctcaacgacccagccattgagagcaattgcctcaatgagctggccggcacggtccccagcactgtggcgctgctgccctcaacggccactgagagcctggctccatccaacacatttgtggccccccagccggttgtggtggccagcccagccaagctgcaggctgcagctaccctgaccgaagtggccaatggcatcgagtccctgggtgtgaagccagacctgccgcccccacccagcaaagcccccatgaagaaggaaaaccagtggtttgatgtgggagtcattaagggcaccaatgtaatggtgacacactatttcctgccaccagatgatgctgtcccatcagacgatgatttgggcaccgtccctgactataaccagctgaagaagcaggagctgcagccaggcacagcctataagtttcgtgttgccggaatcaatgcctgtggccgggggcccttcagcgaaatctcagcctttaagacgtgcctgcctggtttcccaggggccccttgtgccattaaaatcagcaaaagtccggatggtgctcacctcacctgggagccaccctctgtgacctccggcaagattatcgagtactccgtgtacctggccatccagagctcacaggctgggggcgagctcaagagctccaccccggcccagctggccttcatgcgggtgtactgcgggcccagcccctcctgcctggtgcagtcctccagcctttccaacgcccacatcgactacaccaccaagcccgccatcatcttccgcatcgccgcccgcaatgagaagggctatggcccggccacacaagtgaggtggctgcaggaaaccagtaaagacagctctggcaccaagccagccaacaagcggcccatgtcctctccagaaatgaaatctgctccaaagaaatctaaggccgatggtcagtgagaggaagctgactagcccctggattcttctccagacccccctgcttcaggaacacccgccagggcccacccctcccaccccgtcccagcattcgcacttcaccctcgcgagccgctgttcactcctctcccctttctctttctctctgtttttaaaataatctaaagaaagcacattttaccattgctgttgggaggaagcagaggcagatgggaaagcagagagaggagcgcgcttcctttcctccccgctgccgcccaccctggggagagacttttgcggggagggaaggcggagctgaggacagccagctccgccctcccaaggctgtgcgttcctgagggccaggtcgggggcaggcatggaggggaggaaaggcgtccctcttggccctccccagagtggctttcctggcaccctggcctgggtgtctggttctgttttcttttcttccccttgtgtttccagtcacctaacttcccttcctcaggctcccccggcccaccctgctcagtgaccccacaggaagcttacacattttctcagaggcctttgtgctcccacctcttctaccctccccctcttctttcccattttaaaaaagaaaagaaggaaaaagaaaaaaggggcaaggagccccgcggcggcctgggcagcgcctgtgcagacctccctgcaggccgcactgccaactgctgcatttgttgtgttttttaggttgcaattggtgaagttcacactttcattgtaattttagcgtgtggggttttgtcccttttttgttgttgttagctgtgtacagaatgtgtaatcttttttcttttctcttttttttgttttgttttgttttgtttttgtttttttacttttttcttcttggctaattcttggcagggatctttctggaggaaaagctggggccagccagggcaggagaggtgtgaaatctgccacgaggggcctgctgtttgccacccagcccaacttcctgttgctggcccctgccctctgcccttttgcctgtcctcaggccgctggaacaaaggaaggacagctcattcctcatgggcgatcactccgcatctatagggtcgagcctaggggagcttgagggagggctggggcctccttgtcctggatttccagctctccccatgccccctccctgagcaccaccggcaccgctcccaaacagggctgctggtttccgcagccactgctccacctcccccaaatcgtcatggaaagggtggagaatggaggggaaccaggcgtccttggaggcagcttgggagggtgactgtgtagtgtcacccacaagggaggctagggcaatggagcaggccaccagcagcagctgtgcagcatggaactcaggccaggctccgaggctgggggatctgcttggagttttctgccccccaccccaaacttctgtcgaggagcaaggcttgccagcaagtcagaaggatttgaaccgagcagccaatctttccagccctcccctaccgacctctgcctggagacgcagcagcctgtgtcctccagggcctctggtttgttgtattatagtatatttcgctgtggaaaatgtcacgtttagtcaccttggagcccactcacctggtcctgttgttttaccccatcccttctctcgcgcgcctattgatttgtttctgaggagagtacaccgttcactattgtagagtaacccctgtgactcaatattaccatagtgcgatgtcgttttgtgctattttgaacaattaaaagactttttttgaaataaccaaactaggtgt

SEQ ID NO: 452695 - DNA, 5612 bp, Homo sapiens
ttcctggtgttgcgctgctgccgggtgcagccatggcaggcctttcctcacctggggcattttccctggtgtcacatggtccctgtgtcatagtccgtggtttggctgtcatggtttggccatgcctggtgtttgaacaccgggttcttcctctcgcagtgttctacaggacgccgcagctcgtctgcatgtgtgtgcagtgttctgttcatacatattaaggaaaacggtgaaacgtttgttgttggcctttgagcattgagggggatttccattctctgacaaaggacttgacttcagccagcctcctgccttccccttgccctgtcctcacagcctcttcctcatcccagttgcctttgaggcaaagtggtgcctcttccctggcctctgagcaagtcagtgtcttgggggcaggggtgagtgggtcttacgtctgccagggccgttgagaagtggtcagtggtcccagcctgtgtggtgacagtgcaggacagtgggagggacaggcagacagccagctgcagcactaactctcctcctcgtgtgtctccccagcccgtgtcccagcccacccaggtaactctgatcacggcacctagtggggtggaggcccagcctgtgcatgacctccctgtgtccattctggcctccccgactacagaacagcccaccgccacagttaccatcgccgactcaggccagggtgatgtgcagcctggcactgtcaccttggtgtgctccaacccaccctgtgagacccacgagactggcaccaccaacacggccaccactactgttgtggctaaccttgggggacacccccagcccacccaagtgcagttcgtctgtgacagacaggaggcagctgcttctcttgtgacctcgactgtgggccagcagaatggtagcgtggtccgagtctgttcgaacccgccctgcgagacccacgagacgggcaccaccaacaccgccaccaccgccacctccaacatggccgggcagcatggctgctcaaacccaccctgcgagacccacgagacgggcaccaccaacactgccactacagccatgtcgagcgtcggcgccaaccaccagcgagatgcccgtcgggcctgtgcagctggcacccctgccgtgatccggatcagtgtggccactggggcgctggaggcagcccagggctctaagtcccagtgccaaacccgccagaccagcgcgaccagcaccaccatgactgtgatggccaccggggccccgtgctcggccggcccactccttgggccgagcatggcacgggagcccgggggccgcagccctgcttttgtgcagttggcccctctgagcagcaaagtcaggctgagcagcccaagcattaaggaccttcctgcggggcgccacagccatgcggtcagcaccgctgccatgacccgttccagcgtgggtgctggggagccccgcatggcacctgtgtgcgagagcctccagggtggctcgcccagcaccacagtgactgtgacagccctggaggcactgctgtgcccctcggccaccgtgacccaagtctgctccaacccaccatgtgagacccacgagacaggcaccaccaacaccgccactacctcgaatgcaggcagcgcccagagggtgtgctccaacccgccatgcgagacccacgagacgggcaccacccacacggccaccaccgctacttcaaacgggggcacgggccagcccgagggtgggcagcagccccctgctggtcgcccctgtgagacacaccagaccacttccactggcaccaccatgtcggtcagcgtgggtgccctgcttcccgacgccacttcttcccacaggaccgtggagtctggcctagaggtggcggcggcacccagcgtcaccccccaggctggcaccgcgctgctggctcctttcccaacacagagggtgtgctccaaccccccctgtgagacccacgagacgggcaccactcacacggccaccactgtcacttccaacatgagttcaaaccaagaccccccacctgctgccagcgatcagggagaggtggagagcacccagggcgacagcgtgaacatcaccagctccagtgccatcacgacaaccgtgtcctccacactgacgcgggctgtgaccaccgtgacgcagtccacaccggtcccgggcccctctgtgccgcccccagaggaactccaggtgtcgccaggtcctcgccagcagctgccgccacggcagcttctgcagtcggcttccacagccctgatgggggagtccgccgaggtcctgtcagcctcccagacccctgagctcccggccgccgtggatctgagcagcacaggggagccatcttcgggccaggagtctgccggctctgcggtggtggccactgtggtggtccagccacccccacccacacagtccgaagtagaccagttatcacttccccaagagctaatggccgaggcccaagctggcaccaccaccctcatggtaacggggctcacccccgaggagctggcagtgacggctgctgcagaagcagctgcccaggccgcagccacggaggaagcccaggccctggccatccaggcggtgctccaggccgcgcagcaggccgtcatgggcaccggcgagcccatggacacctccgaggcagcagcaaccgtgactcaggcggagctggggcacctgtcggccgagggtcaggagggccaggccaccaccatacccattgtgctgacacagcaggagctggctgccctggtgcagcagcagcagctgcaggaggcccaggcccagcagcagcatcaccacctccccactgaggccctggcccctgccgacagtctcaacgacccagccattgagagcaattgcctcaatgagctggccggcacggtccccagcactgtggcgctgctgccctcaacggccactgagagcctggctccatccaacacatttgtggccccccagccggttgtggtggccagcccagccaagctgcaggctgcagctaccctgaccgaagtggccaatggcatcgagtccctgggtgtgaagccagacctgccgcccccacccagcaaagcccccatgaagaaggaaaaccagtggtttgatgtgggagtcattaagggcaccaatgtaatggtgacacactatttcctgccaccagatgatgctgtcccatcagacgatgatttgggcaccgtccctgactataaccagctgaagaagcaggagctgcagccaggcacagcctataagtttcgtgttgccggaatcaatgcctgtggccgggggcccttcagcgaaatctcagcctttaagacgtgcctgcctggtttcccaggggccccttgtgccattaaaatcagcaaaagtccggatggtgctcacctcacctgggagccaccctctgtgacctccggcaagattatcgagtactccgtgtacctggccatccagagctcacaggctgggggcgagctcaagagctccaccccggcccagctggccttcatgcgggtgtactgcgggcccagcccctcctgcctggtgcagtcctccagcctttccaacgcccacatcgactacaccaccaagcccgccatcatcttccgcatcgccgcccgcaatgagaagggctatggcccggccacacaagtgaggtggctgcaggaaaccagtaaagacagctctggcaccaagccagccaacaagcggcccatgtcctctccagaaatgaaatctgctccaaagaaatctaaggccgatggtcagtgagaggaagctgactagcccctggattcttctccagacccccctgcttcaggaacacccgccagggcccacccctcccaccccgtcccagcattcgcacttcaccctcgcgagccgctgttcactcctctcccctttctctttctctctgtttttaaaataatctaaagaaagcacattttaccattgctgttgggaggaagcagaggcagatgggaaagcagagagaggagcgcgcttcctttcctccccgctgccgcccaccctggggagagacttttgcggggagggaaggcggagctgaggacagccagctccgccctcccaaggctgtgcgttcctgagggccaggtcgggggcaggcatggaggggaggaaaggcgtccctcttggccctccccagagtggctttcctggcaccctggcctgggtgtctggttctgttttcttttcttccccttgtgtttccagtcacctaacttcccttcctcaggctcccccggcccaccctgctcagtgaccccacaggaagcttacacattttctcagaggcctttgtgctcccacctcttctaccctccccctcttctttcccattttaaaaaagaaaagaaggaaaaagaaaaaaggggcaaggagccccgcggcggcctgggcagcgcctgtgcagacctccctgcaggccgcactgccaactgctgcatttgttgtgttttttaggttgcaattggtgaagttcacactttcattgtaattttagcgtgtggggttttgtcccttttttgttgttgttagctgtgtacagaatgtgtaatcttttttcttttctcttttttttgttttgttttgttttgtttttgtttttttacttttttcttcttggctaattcttggcagggatctttctggaggaaaagctggggccagccagggcaggagaggtgtgaaatctgccacgaggggcctgctgtttgccacccagcccaacttcctgttgctggcccctgccctctgcccttttgcctgtcctcaggccgctggaacaaaggaaggacagctcattcctcatgggcgatcactccgcatctatagggtcgagcctaggggagcttgagggagggctggggcctccttgtcctggatttccagctctccccatgccccctccctgagcaccaccggcaccgctcccaaacagggctgctggtttccgcagccactgctccacctcccccaaatcgtcatggaaagggtggagaatggaggggaaccaggcgtccttggaggcagcttgggagggtgactgtgtagtgtcacccacaagggaggctagggcaatggagcaggccaccagcagcagctgtgcagcatggaactcaggccaggctccgaggctgggggatctgcttggagttttctgccccccaccccaaacttctgtcgaggagcaaggcttgccagcaagtcagaaggatttgaaccgagcagccaatctttccagccctcccctaccgacctctgcctggagacgcagcagcctgtgtcctccagggcctctggtttgttgtattatagtatatttcgctgtggaaaatgtcacgtttagtcaccttggagcccactcacctggtcctgttgttttaccccatcccttctctcgcgcgcctattgatttgtttctgaggagagtacaccgttcactattgtagagtaacccctgtgactcaatattaccatagtgcgatgtcgttttgtgctattttgaacaattaaaagactttttttgaaataaccaaactaggtgt

SEQ ID NO: 452696 - DNA, 7776 bp, Homo sapiens
cggctcccagggaggaggcatgagcgccctgccgttaccgcttcttctgccgtacagttgccgcttcggggcctaactctagctctttgaagcggctcctgtgggaaggagtcataaggcgggaagtgaggatcggacaccgccttgagtttggtgtgcagtggaagaactgacctaggaggaagagaataggggggaacggggagctagtctcaagatggcggctcccacggcggcaggcgcagcctgagcagcagaggcggactaaggggagaggcgcgagacttcacaagccgtacggcgcgagcccccaaacggccctcgagagctcgagctggttccaccggcctccggcccgcctccattcgttaggtgtgtcgaggctgtttcgggagcggcggctgcactaaggcgctgggcggggaagcgggacggtctcaagatggcggctcccacaattgtggtctgagcgccggcggggctgcgacgaccgcggcgcttgtggctcctttccacccgccccggaagccggccagtgctggggacttgggggtgtgggaaccgggccggggctccgccatttccggcgggggagggctacgactgaggaagggaggagagagaggcggctcaagatggcggctcccagggcctcccgcccgagcttgtaagcgggagcgcccggacaagtagtcggggcgacgggactcagcggcctccagcttcttgagcctaggcgctcgacagtttcgggcggctcttgcggagacggggtgagcgagaagaaagggaagagccaaagggaaggagggcagttaagatggcggcctccatggagtcgtctaccgctgtgtgagaaaccgcttctccgtgagagctgccttagacgaaagggggtgtgtgaaaggaattgaggggctcccttcccgcttgttgacttctccccaccgcaccctttcccggaactatggcttcggccgtgtcgcccgccaacttgccagcggtgcttctgcagccccgctggaagcgagtggtgggctggtcgggtccggtgccacggccccgccacggccaccgcgccgtggccatcaaggagctcatcgtggtgtttggcggcggcaacgagggaatagtggacgaactgcacgtgtacaacacggcaaccaaccagtggttcatcccagccgtgaggggggacattccccctgggtgtgcagcctatggcttcgtgtgtgacgggactcgcctcctggtgtttggtgggatggtggagtatgggaaatacagcaatgacctctacgaactccaggcgagccggtgggagtggaagagactcaaagcaaagacgcccaaaaacgggccccctccgtgtcctcgactcgggcacagcttctcccttgtgggcaacaaatgctacctgtttgggggtctggccaatgatagcgaggacccaaagaacaacattccaaggtacctgaatgacttatatatcctggaattacggccaggctctggagtggtagcctgggacattcccatcacttacggggtcctaccaccaccccgggagtcacatactgccgtggtctacaccgaaaaagacaataagaagtccaagctggtgatctacggcgggatgagtggctgcaggctgggggacctgtggaccctagatattgacaccctgacgtggaataagcccagtctcagcggggtggcgcctcttcctcgcagtctccactcggcaaccaccatcggaaataaaatgtacgtgtttggtggctgggtgcctctcgtcatggatgacgtcaaagtggccacacacgagaaggagtggaagtgtaccaacacgctggcttgtctcaacctggataccatggcctgggagaccatcctgatggatacactggaggacaacatcccccgtgctcgggctggccactgcgcagtcgccatcaacacccgcctgtacatttggagtgggcgtgacggctaccgcaaggcctggaacaaccaggtctgctgcaaggacctctggtacctagagacagaaaagccaccacccccagcccgagtacaactggtacgcgccaacaccaactccctggaggtgagctggggggcagtggcaacagccgacagctaccttctccagctccagaaatatgacattcctgccacggctgctactgccacctcccctacacccaatccggtcccatctgtgcctgccaaccctcccaagagccctgccccagcagcagccgcacctgctgtgcagccgctgacccaagtaggcatcacgctcctgccccaggctgcccccgcacccccgaccaccaccaccatccaggtcttgccaacggtgcctggcagctccatttctgtgcccaccgcagccaggactcaaggtgtccctgctgttctcaaagtgaccggtcctcaggctacaacaggaactccattggtcaccatgcgacctgccagccaggctgggaaagcccctgtcaccgtgacctcccttcccgccggagtgcggatggttgtgccaacacagagtgcccagggaacggtgattggcagtagcccacagatgagtgggatggccgcactggccgctgcggccgctgccacccagaagatccccccttcctcggcacccacggtgctgagtgtcccagcgggtaccaccatcgtgaagaccatggctgtgacacctggcactaccaccctcccagccactgtgaaggtggcctcctcgccagtcatggtgagcaaccctgccactcgcatgctgaagactgcagccgcccaggtggggacatcggtttcctccgccaccaacacgtctacccgccctatcatcacagtgcacaagtcaggcactgtgacagtggcccagcaagcccaggtggtgaccacagttgtgggcggggtcaccaagaccatcaccctggtgaagagccccatctctgtcccaggaggcagtgctctgatttccaatctgggcaaagtgatgtcggtggtccagaccaaaccagttcagacttcagcagtcacaggccaggcgtccacgggtcctgtgactcagatcatccagaccaaagggcccctgccagcgggaacaatcctgaagctggtgacctcagcagatggcaagcccaccaccatcatcactaccacgcaggccagtggggcggggaccaagcccaccatcctgggcatcagcagcgtctcccccagtaccaccaagcccggcacgaccaccatcatcaaaaccatccccatgtcggccatcatcacccaggcgggcgccacgggtgtgaccagcagtcctggcatcaagtcccccatcaccatcatcaccaccaaggtgatgacttcaggaactggagcacctgcgaaaatcatcactgctgtccccaaaattgccactggccacgggcagcagggagtgacccaggtggtgcttaagggggccccgggacagccaggcaccatcctccgcactgtgcccatggggggtgttcgcctggtcacacccgtcaccgtctccgccgtcaagccagccgtcaccacgttggttgtgaaaggcaccacaggtgtcacgaccctaggcacagtgacaggcaccgtctccaccagccttgccggggcggggggccacagcactagtgcttccctggccacgcccatcaccaccttgggcaccattgccaccctctcaagccaggtgatcaaccccactgccatcactgtgtcggccgcacagaccacgctgacagcggcaggcgggctcacaaccccaaccatcaccatgcagcccgtgtcccagcccacccaggtaactctgatcacggcacctagtggggtggaggcccagcctgtgcatgacctccctgtgtccattctggcctccccgactacagaacagcccaccgccacagttaccatcgccgactcaggccagggtgatgtgcagcctggcactgtcaccttggtgtgctccaacccaccctgtgagacccacgagactggcaccaccaacacggccaccactactgttgtggctaaccttgggggacacccccagcccacccaagtgcagttcgtctgtgacagacaggaggcagctgcttctcttgtgacctcgactgtgggccagcagaatggtagcgtggtccgagtctgttcgaacccgccctgcgagacccacgagacgggcaccaccaacaccgccaccaccgccacctccaacatggccgggcagcatggctgctcaaacccaccctgcgagacccacgagacgggcaccaccaacactgccactacagccatgtcgagcgtcggcgccaaccaccagcgagatgcccgtcgggcctgtgcagctggcacccctgccgtgatccggatcagtgtggccactggggcgctggaggcagcccagggctctaagtcccagtgccaaacccgccagaccagcgcgaccagcaccaccatgactgtgatggccaccggggccccgtgctcggccggcccactccttgggccgagcatggcacgggagcccgggggccgcagccctgcttttgtgcagttggcccctctgagcagcaaagtcaggctgagcagcccaagcattaaggaccttcctgcggggcgccacagccatgcggtcagcaccgctgccatgacccgttccagcgtgggtgctggggagccccgcatggcacctgtgtgcgagagcctccagggtggctcgcccagcaccacagtgactgtgacagccctggaggcactgctgtgcccctcggccaccgtgacccaagtctgctccaacccaccatgtgagacccacgagacaggcaccaccaacaccgccactacctcgaatgcaggcagcgcccagagggtgtgctccaacccgccatgcgagacccacgagacgggcaccacccacacggccaccaccgctacttcaaacgggggcacgggccagcccgagggtgggcagcagccccctgctggtcgcccctgtgagacacaccagaccacttccactggcaccaccatgtcggtcagcgtgggtgccctgcttcccgacgccacttcttcccacaggaccgtggagtctggcctagaggtggcggcggcacccagcgtcaccccccaggctggcaccgcgctgctggctcctttcccaacacagagggtgtgctccaaccccccctgtgagacccacgagacgggcaccactcacacggccaccactgtcacttccaacatgagttcaaaccaagaccccccacctgctgccagcgatcagggagaggtggagagcacccagggcgacagcgtgaacatcaccagctccagtgccatcacgacaaccgtgtcctccacactgacgcgggctgtgaccaccgtgacgcagtccacaccggtcccgggcccctctgtgccgcccccagaggaactccaggtgtcgccaggtcctcgccagcagctgccgccacggcagcttctgcagtcggcttccacagccctgatgggggagtccgccgaggtcctgtcagcctcccagacccctgagctcccggccgccgtggatctgagcagcacaggggagccatcttcgggccaggagtctgccggctctgcggtggtggccactgtggtggtccagccacccccacccacacagtccgaagtagaccagttatcacttccccaagagctaatggccgaggcccaagctggcaccaccaccctcatggtaacggggctcacccccgaggagctggcagtgacggctgctgcagaagcagctgcccaggccgcagccacggaggaagcccaggccctggccatccaggcggtgctccaggccgcgcagcaggccgtcatgggcaccggcgagcccatggacacctccgaggcagcagcaaccgtgactcaggcggagctggggcacctgtcggccgagggtcaggagggccaggccaccaccatacccattgtgctgacacagcaggagctggctgccctggtgcagcagcagcagctgcaggaggcccaggcccagcagcagcatcatcctctcccctttctctttctctctgtttttaaaataatctaaagaaagcacattttaccattgctgttgggaggaagcagaggcagatgggaaagcagagagaggagcgcgcttcctttcctccccgctgccgcccaccctggggagagacttttgcggggagggaaggcggagctgaggacagccagctccgccctcccaaggctgtgcgttcctgagggccaggtcgggggcaggcatggaggggaggaaaggcgtccctcttggccctccccagagtggctttcctggcaccctggcctgggtgtctggttctgttttcttttcttccccttgtgtttccagtcacctaacttcccttcctcaggctcccccggcccaccctgctcagtgaccccacaggaagcttacacattttctcagaggcctttgtgctcccacctcttctaccctccccctcttctttcccattttaaaaaagaaaagaaggaaaaagaaaaaaggggcaaggagccccgcggcggcctgggcagcgcctgtgcagacctccctgcaggccgcactgccaactgctgcatttgttgtgttttttaggttgcaattggtgaagttcacactttcattgtaattttagcgtgtggggttttgtcccttttttgttgttgttagctgtgtacagaatgtgtaatcttttttcttttctcttttttttgttttgttttgttttgtttttgtttttttacttttttcttcttggctaattcttggcagggatctttctggaggaaaagctggggccagccagggcaggagaggtgtgaaatctgccacgaggggcctgctgtttgccacccagcccaacttcctgttgctggcccctgccctctgcccttttgcctgtcctcaggccgctggaacaaaggaaggacagctcattcctcatgggcgatcactccgcatctatagggtcgagcctaggggagcttgagggagggctggggcctccttgtcctggatttccagctctccccatgccccctccctgagcaccaccggcaccgctcccaaacagggctgctggtttccgcagccactgctccacctcccccaaatcgtcatggaaagggtggagaatggaggggaaccaggcgtccttggaggcagcttgggagggtgactgtgtagtgtcacccacaagggaggctagggcaatggagcaggccaccagcagcagctgtgcagcatggaactcaggccaggctccgaggctgggggatctgcttggagttttctgccccccaccccaaacttctgtcgaggagcaaggcttgccagcaagtcagaaggatttgaaccgagcagccaatctttccagccctcccctaccgacctctgcctggagacgcagcagcctgtgtcctccagggcctctggtttgttgtattatagtatatttcgctgtggaaaatgtcacgtttagtcaccttggagcccactcacctggtcctgttgttttaccccatcccttctctcgcgcgcctattgatttgtttctgaggagagtacaccgttcactattgtagagtaacccctgtgactcaatattaccatagtgcgatgtcgttttgtgctattttgaacaattaaaagactttttttgaaataaccaaactaggtgt

SEQ ID NO: 452697 - DNA, 2956 bp, Homo sapiens
cggctcccagggaggaggcatgagcgccctgccgttaccgcttcttctgccgtacagttgccgcttcggggcctaactctagctctttgaagcggctcctgtgggaaggagtcataaggcgggaagtgaggatcggacaccgccttgagtttggtgtgcagtggaagaactgacctaggaggaagagaataggggggaacggggagctagtctcaagatggcggctcccacggcggcaggcgcagcctgagcagcagaggcggactaaggggagaggcgcgagacttcacaagccgtacggcgcgagcccccaaacggccctcgagagctcgagctggttccaccggcctccggcccgcctccattcgttaggtgtgtcgaggctgtttcgggagcggcggctgcactaaggcgctgggcggggaagcgggacggtctcaagatggcggctcccacaattgtggtctgagcgccggcggggctgcgacgaccgcggcgcttgtggctcctttccacccgccccggaagccggccagtgctggggacttgggggtgtgggaaccgggccggggctccgccatttccggcgggggagggctacgactgaggaagggaggagagagaggcggctcaagatggcggctcccagggcctcccgcccgagcttgtaagcgggagcgcccggacaagtagtcggggcgacgggactcagcggcctccagcttcttgagcctaggcgctcgacagtttcgggcggctcttgcggagacggggtgagcgagaagaaagggaagagccaaagggaaggagggcagttaagatggcggcctccatggagtcgtctaccgctgtgtgagaaaccgcttctccgtgagagctgccttagacgaaagggggtgtgtgaaaggaattgaggggctcccttcccgcttgttgacttctccccaccgcaccctttcccggaactatggcttcggccgtgtcgcccgccaacttgccagcggtgcttctgcagccccgctggaagcgagtggtgggctggtcgggtccggtgccacggccccgccacggccaccgcgccgtggccatcaaggagctcatcgtggtgtttggcggcggcaacgagggaatagtggacgaactgcacgtgtacaacacggcaaccaaccagtggttcatcccagccgtgaggggggacattccccctgggtgtgcagcctatggcttcgtgtgtgacgggactcgcctcctggtgtttggtgggatggtggagtatgggaaatacagcaatgacctctacgaactccaggcgagccggtgggagtggaagagactcaaagcaaagacgcccaaaaacgggccccctccgtgtcctcgactcgggcacagcttctcccttgtgggcaacaaatgctacctgtttgggggtctggccaatgatagcgaggacccaaagaacaacattccaaggtacctgaatgacttatatatcctggaattacggccaggctctggagtggtagcctgggacattcccatcacttacggggtcctaccaccaccccgggagtcacatactgccgtggtctacaccgaaaaagacaataagaagtccaagctggtgatctacggcgggatgagtggctgcaggctgggggacctgtggaccctagatattgacaccctgacgtggaataagcccagtctcagcggggtggcgcctcttcctcgcagtctccactcggcaaccaccatcggaaataaaatgtacgtgtttggtggctgggtgcctctcgtcatggatgacgtcaaagtggccacacacgagaaggagtggaagtgtaccaacacgctggcttgtctcaacctggataccatggcctgggagaccatcctgatggatacactggaggacaacatcccccgtgctcgggctggccactgcgcagtcgccatcaacacccgcctgtacatttggagtgggcgtgacggctaccgcaaggcctggaacaaccaggtctgctgcaaggacctctggtacctagagacagaaaagccaccacccccagcccgagtacaactggtacgcgccaacaccaactccctggaggtgagctggggggcagtggcaacagccgacagctaccttctccagctccagaaatatgacattcctgccacggctgctactgccacctcccctacacccaatccggtcccatctgtgcctgccaaccctcccaagagccctgccccagcagcagccgcacctgctgtgcagccgctgacccaagtaggcatcacgctcctgccccaggctgcccccgcacccccgaccaccaccaccatccaggtcttgccaacggtgcctggcagctccatttctgtgcccaccgcagccaggactcaaggtgtccctgctgttctcaaagtgaccggtcctcaggctacaacaggaactccattggtcaccatgcgacctgccagccaggctgggaaagcccctgtcaccgtgacctcccttcccgccggagtgcggatggttgtgccaacacagagtgcccagggaacggtgattggcagtagcccacagatgagtgggatggccgcactggccgctgcggccgctgccacccagaagatccccccttcctcggcacccacggtgctgagtgtcccagcgggtaccaccatcgtgaagaccatggctgtgacacctggcactaccaccctcccagccactgtgaaggtggcctcctcgccagtcatggtgagcgtcttccggggcttgtcactgtggtcaaacaagcatagtcattccctccgggctttagagttagccgttggaccgtgggctgcagaataagctgtctccattaggggcgtcatggcctcaggtgagagctgcaggctcagcctcctcccttgcctgttaaaggaagggggaaccaagctg

SEQ ID NO: 452698 - DNA, 1992 bp, Homo sapiens
cggctcccagggaggaggcatgagcgccctgccgttaccgcttcttctgccgtacagttgccgcttcggggcctaactctagctctttgaagcggctcctgtgggaaggagtcataaggcgggaagtgaggatcggacaccgccttgagtttggtgtgcagtggaagaactgacctaggaggaagagaataggggggaacggggagctagtctcaagatggcggctcccacggcggcaggcgcagcctgagcagcagaggcggactaaggggagaggcgcgagacttcacaagccgtacggcgcgagcccccaaacggccctcgagagctcgagctggttccaccggcctccggcccgcctccattcgttaggtgtgtcgaggctgtttcgggagcggcggctgcactaaggcgctgggcggggaagcgggacggtctcaagatggcggctcccacaattgtggtctgagcgccggcggggctgcgacgaccgcggcgcttgtggctcctttccacccgccccggaagccggccagtgctggggacttgggggtgtgggaaccgggccggggctccgccatttccggcgggggagggctacgactgaggaagggaggagagagaggcggctcaagatggcggctcccagggcctcccgcccgagcttgtaagcgggagcgcccggacaagtagtcggggcgacgggactcagcggcctccagcttcttgagcctaggcgctcgacagtttcgggcggctcttgcggagacggggtgagcgagaagaaagggaagagccaaagggaaggagggcagttaagatggcggcctccatggagtcgtctaccgctgtgtgagaaaccgcttctccgtgagagctgccttagacgaaagggggtgtgtgaaaggaattgaggggctcccttcccgcttgttgacttctccccaccgcaccctttcccggaactatggcttcggccgtgtcgcccgccaacttgccagcggtgcttctgcagccccgctggaagcgagtggtgggctggtcgggtccggtgccacggccccgccacggccaccgcgccgtggccatcaaggagctcatcgtggtgtttggcggcggcaacgagggaatagtggacgaactgcacgtgtacaacacggcaaccaaccagtggttcatcccagccgtgaggggggacattccccctgggtgtgcagcctatggcttcgtgtgtgacgggactcgcctcctggtgtttggtgggatggtggagtatgggaaatacagcaatgacctctacgaactccaggcgagccggtgggagtggaagagactcaaagcaaagacgcccaaaaacgggccccctccgtgtcctcgactcgggcacagcttctcccttgtgggcaacaaatgctacctgtttgggggtctggccaatgatagcgaggacccaaagaacaacattccaaggtacctgaatgacttatatatcctggaattacggccaggctctggagtggtagcctgggacattcccatcacttacggggtcctaccaccaccccgggagtcacatactgccgtggtctacaccgaaaaagacaataagaagtccaagctggtgatctacggcgggatgagtggctgcaggctgggggacctgtggaccctagatattgacaccctgacgtggaataagcccagtctcagcggggtggcgcctcttcctcgcagtctccactcggcaaccaccatcggaaataaaatgtacgtgtttggtggctgggtgcctctcgtcatggatgacgtcaaagtggccacacacgagaaggagtggaagtgtaccaacacgctggcttgtctcaacctgggtatggcctcctcgggctccgagtggcctgtgggaggctgcaggaggctggcccttctcagcctaagagctgtgtggggtgtgcggggagcaagctgggcccccggctccctttggaatcc

SEQ ID NO: 452699 - DNA, 298 bp, Homo sapiens
caacacccaggaccttcttgctccagcaaggcacctcgctcacccccggccatttcctcctccaccacaagttgccccgggtccctagtggtggccttctcatcccacggttcagtctccaggtcttgattttgcaggcgagccggtgggagtggaagagactcaaagcaaagacgcccaaaaacgggccccctccgtgtcctcgactcgggcacagcttctcccttgtgggcaacaaatgctacctgtttgggggtctggccaatgatagcgaggacccaaagaacaacattccaag

SEQ ID NO: 452700 - DNA, 4028 bp, Homo sapiens
ggaagctcgtatttacattttaagtgtatctggtgagtgggctggagccctcgtctgggccggaaaaaaaaaagccctccgatccgtcttttagttgcttctcttccttttttctctccggtttctcatcactccaaccagccgcgaccatgcccaggaagaaggcggcggcggcggcctgggaggagccgagctcgggcaacggcactgcccgcgccgggcccaggaaacgcggcggcccggcgggcaggaagcgcgagcggcccgagcgctgcagtagcagcagcggcggcggcagcagcggcgacgaggacggcctggagctcgacggggcccccggcgggggcaagcgctgcggcgcggccggcgacagcaggcaaggcgggcggcgcggccgtggtcatcaccgaacccgagcacaccaaggagcgcgtcaaacttgaagggtcaaagtgcaaagggcagcttttgatttttggggcaaccaactgggacttgattggtcgaaaagaagtgcctaaacagcaagctgcttaccgcaatctcggtcagaatttgtgggggccccacagatatgggtgcctggcgggggtccgggtgcggacagtggtctcgggctcgtgtgctgcacacagcctcctcatcaccacggaagggaagctgtggagctggggtcgaaatgagaaggggcagctgggacatggtgacaccaagagagtagaagcccctagactcatcgagggtcttagccacgaagtgattgtgtctgcagcatgtgggcggaaccacaccttggccttgacggaaacgggctccgtgtttgcgtttggggaaaacaagatggggcagctgggccttggcaaccagacagacgctgttcccagccccgcgcagataatgtacaacggccagccaattaccaaaatggcctgtggggctgaattcagtatgataatggactgcaaaggaaacctctattcctttgggtgccctgaatatggtcagctgggacacaactcagatgggaagttcatcgcccgggcacagcggatagagtacgactgtgaactagttccccggcgagtggccatcttcattgagaagacgaaagatggacagattctgcctgtaccaaacgtggttgtacgagacgtggcctgtggcgctaaccacacgctggtcctggactcccagaagcgagtcttctcctggggctttggtggctatggccggctgggccacgcagagcagaaggatgagatggtcccccgcctggtgaagctgtttgacttccctgggcgtggggcttcccagatctatgctggttacacctgctcctttgctgtcagtgaagtgggtggtctgtttttctggggggccaccaacacctcccgtgaatctaccatgtacccaaaagcagtgcaggacctctgcggctggagaatccggagcctggcttgtgggaagagcagcatcattgtggccgccgatgagagcaccatcagctggggtccgtcaccgacctttggggaactgggctacggggaccacaagcccaagtcttccactgcagcccaggaggtaaagactctggatggcattttctcagagcaggtcgccatgggctactcacactccttggtgatagcaagagatgaaagtgagactgagaaagagaagatcaagaaactgccagaatacaacccccgaaccctctgatgctcccggagactcctccgactccacacctctcgcggcagctgtcatttccatgtgcactgggacgggaagtcaaacgaggaatttaaaaaagcaaaagttgaccgaaggtgcatttttgtttagactccctgaggttccgttttacacatgatccaacgttaactacctttttttctgtatgctttccaaagtccttttttttcccttaatgttgaattaaaatacttgctcatagttgatttaccattcctacaaaagaggcagaaactttgagcaatctaggttttttttttttttaagttttttctttcttcctctcctgaatacactccccaaaacacccctttccagttacaattagcatcgtgatccaagcagatgccacatggaagaggaatcgccatttactcagaaaaaatgtcccttacaggaaccggcagcagctaggcagtcaccggcccgcctccatccaaaatcacgctcgcgtgcttcggaagcatccgggtcactccttctccgctttttcttgcagatgggcctaggccggtgtcggttctgtttctccccttggctgcctgtacgcccacagccttctggctgcgacattatagaatcggccgtgtcccccctggtgggggattggggatctgtgtttagccatttatatctactttagctgttaaagaggtccaaatgaaaatcaggtgattgtggaaccatggggacttgggggtggggcagaggtgggaacatttgtatcagttgagtcagcttggtggctccctgtggagccagggctgagccttgtcacgcgcactcgccaattaagagatggaccagccagcagtcaagtgcattctccagtccttgcaagaaggatcagccctttctgtgccagcctcgatcgccttgtgctttggtctctttttctcccccccgcctggatcctgcctcgcgcgggccgtcctgttgctgagactcggggtaccgttctgctgacccagctccctttagtcacgtttgcttggctctggtaccaaatagttgggattaccgaagagtccccttccttgcgtgtcagcacggatgctgtgactgccacctgcgtcctcgtcaagtgcccgagctcgccgccgtgtgtgctgcgctgagtgagttatgaggtgcctttcccggaaccctcctctcgcctggacccaagagaggcgacagctgtggctggggctcttggtttccagagggtctggactggtttgggtgctttaaaatagatatttagttcagtggtgcttatgggggagatgggactagaacttaagtgtgagacttgggtggatgggaaagttaaatattggtctcttcaagtttttttttcttttgctttgttaccacttgtcactgtctccatgttaaaatgccaaaaatgatgtagttgttgttgcttttttccctattttccaccccagtcgctccttaccgtgactcctgcccttggagggcatgtagcagtgtctgtcctgccagtcccaaggccctgtgggaggagactggcctgcatctctctaagacttagtctgacgccacgcgcatctcttgttctgtgttcaatcagtagtccaggggagaagcttctgctacttcagagctttgctaaactaacctaatttgtccaaatcaccccaaaaccaccatctctgacgtaagcttccatgcgacagcctgatccgtttccctggacaggtctctttcctggaatgcagcccaggcacctgtgctcctggcacccttgaggtctctcctttgagccgtggtcaccgagagggttgaggacgcagcacccgaggtcccagcctttgcaggagcctccctgggcttagctggacttagatcttcggtggcctcatgtaaacgtggcagccagcctcttctagaaccctagcccagggactggagcaggaaagggaccttcaaagtgaagactgccttgtcccgcagctccttctggcttagattgaaacatgggcttcctaatgggttaaatcctttaaaacaaggagttgtgggggaagggtgtcgtgcactcctagagaaaggtacacagttgcccggttgggaatgtgcttggcgctgaccctgcgggcatctgactggtcttccagctcaggaaaaagaatttgaaagaggcttagcgtgaaggggaatcaaagaggaggttgtgatttggtcgaaggtgcctggtttagtgctgtaattgtcttattattttttttatatatatatttcttggagtaaacattttaaataaa

SEQ ID NO: 452701 - DNA, 533 bp, Homo sapiens
agtccgtgtgagcacactgacacgtcccttgtgcttgtgctgctgctgatggccggctctgtggtctctacaggacacaactcagatgggaagttcatcgcccgggcacagcggatagagtacgactgtgaactagttccccggcgagtggccatcttcattgagaagacgaaagatggacagattctgcctgtaccaaacgtggttgtacgagacgtggcctgtggcgctaaccacacggtgaggctcggcttttctcacttcctgagagtcgcaccaggatggaaggggtgtttatgctcaagtttcctgacgcttggctttggctaggaactgatcccaggtagacatctgcttgcttcttcaagagggctttgcaccttggccaaagggtccttggtcccagggcagggttccctgtcactgcctcctatgttaacttctcccgtgatttaaatagacacatcttaaacacgtagatgttttgccgccctcacctgggcgacagaacgagaccccatctcaaaaaaaaa

SEQ ID NO: 452702 - DNA, 268 bp, Homo sapiens
ggctcagactgatacgttgatatcgaatgcgcgcgtcgtgcgctcctagagaaaggtacacagttgcccggttgggaatgtgcttggcgctgaccctgcgggcatctgactggtcttccagctcaggaaaaagaatttgaaagaggcttagcgtgaaggggaatcaaagaggaggttgtgatttggtcgaaggtgcctggtttagtgctgtaattgtcttattattttttttatatatatatttcttggagtaaacattttaaataaa

SEQ ID NO: 452703 - DNA, 4111 bp, Homo sapiens
ggaagctcgtatttacattttaagtgtatctggtgagtgggctggagccctcgtctgggccggaaaaaaaaaagccctccgatccgtcttttagttgcttctcttccttttttctctccggtttctcatcactccaaccagccgcgaccatgcccaggaagaaggcggcggcggcggcctgggaggagccgagctcgggcaacggcactgcccgcgccgggcccaggaaacgcggcggcccggcgggcaggaagcgcgagcggcccgagcgctgcagtagcagcagcggcggcggcagcagcggcgacgaggacggcctggagctcgacggggcccccggcgggggcaagcgctgcggcgcggccggcgacagcaggcaaggcgggcggcgcggccgtggtcatcaccgaacccgagcacaccaaggagcgcgtcaaacttgaagggtcaaagtgcaaagggcagcttttgatttttggggcaaccaactgggacttgattggtcgaaaagaagtgcctaaacagcaagctgcttaccgcaatctcggtcagaatttgtgggggccccacagatatgggtgcctggcgggggtccgggtgcggacagtggtctcgggctcgtgtgctgcacacagcctcctcatcaccacggaagggaagctgtggagctggggtcgaaatgagaaggggcagctgggacatggtgacaccaagagagtagaagcccctagactcatcgagggtcttagccacgaagtgattgtgtctgcagcatgtgggcggaaccacaccttggccttgacggaaacgggctccgtgtttgcgtttggggaaaacaagatggggcagctgggccttggcaaccagacagacgctgttcccagccccgcgcagataatgtacaacggccagccaattaccaaaatggcctgtggggctgaattcagtatgataatggactgcaaaggaaacctctattcctttgggtgccctgaatatggtcagctgggacacaactcagatgggaagttcatcgcccgggcacagcggatagagtacgactgtgaactagttccccggcgagtggccatcttcattgagaagacgaaagatggacagattctgcctgtaccaaacgtggttgtacgagacgtggcctgtggcgctaaccacacgctggtcctggactcccagaagcgagtcttctcctggggctttggtggctatggccggctgggccacgcagagcagaaggatgagatggtcccccgcctggtgaagctgtttgacttccctgggcgtggggcttcccagatctatgctggttacacctgctcctttgctgtcagtgaagtgggtggtctgtttttctggggggccaccaacacctcccgtgaatctaccatgtacccaaaagcagtgcaggacctctgcggctggagaatccggagcctggcttgtgggaagagcagcatcattgtggccgccgatgagagcaccatcagctggggtccgtcaccgacctttggggaactgggctacggggaccacaagcccaagtcttccactgcagcccaggaggtaaagactctggatggcattttctcagagcaggtcgccatgggctactcacactccttggtgatagcaagagatgaaagtgagactgagaaagagaagatcaagaaactgccagaatacaacccccgaaccctctgatgctcccggagactcctccgactccacacctctcgcggcagctgtcatttccatgtgcactgggacgggaagtcaaacgaggaatttaaaaaagcaaaagttgaccgaaggtgcatttttgtttagactccctgaggttccgttttacacatgatccaacgttaactacctttttttctgtatgctttccaaagtccttttttttcccttaatgttgaattaaaatacttgctcatagttgatttaccattcctacaaaagaggcagaaactttgagcaatctaggttttttttttttttaagttttttctttcttcctctcctgaatacactccccaaaacacccctttccagttacaattagcatcgtgatccaagcagatgccacatggaagaggaatcgccatttactcagaaaaaatgtcccttacaggaaccggcagcagctaggcagtcaccggcccgcctccatccaaaatcacgctcgcgtgcttcggaagcatccgggtcactccttctccgctttttcttgcagatgggcctaggccggtgtcggttctgtttctccccttggctgcctgtacgcccacagccttctggctgcgacattatagaatcggccgtgtcccccctggtgggggattggggatctgtgtttagccatttatatctactttagctgttaaagaggtccaaatgaaaatcaggtgattgtggaaccatggggacttgggggtggggcagaggtgggaacatttgtatcagttgagtcagcttggtggctccctgtggagccagggctgagccttgtcacgcgcactcgccaattaagagatggaccagccagcagtcaagtgcattctccagtccttgcaagaaggatcagccctttctgtgccagcctcgatcgccttgtgctttggtctctttttctcccccccgcctggatcctgcctcgcgcgggccgtcctgttgctgagactcggggtaccgttctgctgacccagctccctttagtcacgtttgcttggctctggtaccaaatagttgggattaccgaagagtccccttccttgcgtgtcagcacggatgctgtgactgccacctgcgtcctcgtcaagtgcccgagctcgccgccgtgtgtgctgcgctgagtgagttatgaggtgcctttcccggaaccctcctctcgcctggacccaagagaggcgacagctgtggctggggctcttggtttccagagggtctggactggtttgggtgctttaaaatagatatttagttcagtggtgcttatgggggagatgggactagaacttaagtgtgagacttgggtggatgggaaagttaaatattggtctcttcaagtttttttttcttttgctttgttaccacttgtcactgtctccatgttaaaatgccaaaaatgatgtagttgttgttgcttttttccctattttccaccccagtcgctccttaccgtgactcctgcccttggagggcatgtagcagtgtctgtcctgccagtcccaaggccctgtgggaggagactggcctgcatctctctaagacttagtctgacgccacgcgcatctcttgttctgtgttcaatcagtagtccaggggagaagcttctgctacttcagagctttgctaaactaacctaatttgtccaaatcaccccaaaaccaccatctctgacgtaagcttccatgcgacagcctgatccgtttccctggacaggtctctttcctggaatgcagcccaggcacctgtgctcctggcacccttgaggtctctcctttgagccgtggtcaccgagagggttgaggacgcagcacccgaggtcccagcctttgcaggagcctccctgggcttagctggacttagatcttcggtggcctcatgtaaacgtggcagccagcctcttctagaaccctagcccagggactggagcaggaaagggaccttcaaagtgaagactgccttgtcccgcagctccttctggcttagattgaaacatgggcttcctaatgggttaaatcctttaaaacaaggagttgtgggggaagggtgtcgtgcactcctagagaaaggtacacagttgcccggttgggaatgtgcttggcgctgaccctgcgggcatctgactggtcttccagctcaggaaaaagaatttgaaagaggcttagcgtgaaggggaatcaaagaggaggttgtgatttggtcgaaggtgcctggtttagtgctgtaattgtcttattattttttttatatatatatttcttggagtaaacattttaaataaacaacaacattgtctactgtcaaaaaaaaaacacaaaaagacaagaaaagaagttcagggggatttgtagattgttgggttgag

SEQ ID NO: 452704 - DNA, 4085 bp, Homo sapiens
ggaagctcgtatttacattttaagtgtatctggtgagtgggctggagccctcgtctgggccggaaaaaaaaaagccctccgatccgtcttttagttgcttctcttccttttttctctccggtttctcatcactccaaccagccgcgaccatgcccaggaagaaggcggcggcggcggcctgggaggagccgagctcgggcaacggcactgcccgcgccgggcccaggaaacgcggcggcccggcgggcaggaagcgcgagcggcccgagcgctgcagtagcagcagcggcggcggcagcagcggcgacgaggacggcctggagctcgacggggcccccggcgggggcaagcgctgcggcgcggccggcgacagcaggcaaggcgggcggcgcggccgtggtcatcaccgaacccgagcacaccaaggagcgcgtcaaacttgaagggtcaaagtgcaaagggcagcttttgatttttggggcaaccaactgggacttgattggtcgaaaagaagtgcctaaacagcaagctgcttaccgcaatctcggtcagaatttgtgggggccccacagatatgggtgcctggcgggggtccgggtgcggacagtggtctcgggctcgtgtgctgcacacagcctcctcatcaccacggaagggaagctgtggagctggggtcgaaatgagaaggggcagctgggacatggtgacaccaagagagtagaagcccctagactcatcgagggtcttagccacgaagtgattgtgtctgcagcatgtgggcggaaccacaccttggccttgacggaaacgggctccgtgtttgcgtttggggaaaacaagatggggcagctgggccttggcaaccagacagacgctgttcccagccccgcgcagataatgtacaacggccagccaattaccaaaatggcctgtggggctgaattcagtatgataatggactgcaaaggaaacctctattcctttgggtgccctgaatatggtcagctgggacacaactcagatgggaagttcatcgcccgggcacagcggatagagtacgactgtgaactagttccccggcgagtggccatcttcattgagaagacgaaagatggacagattctgcctgtaccaaacgtggttgtacgagacgtggcctgtggcgctaaccacacgctggtcctggactcccagaagcgagtcttctcctggggctttggtggctatggccggctgggccacgcagagcagaaggatgagatggtcccccgcctggtgaagctgtttgacttccctgggcgtggggcttcccagatctatgctggttacacctgctcctttgctgtcagtgaagtgggtggtctgtttttctggggggccaccaacacctcccgtgaatctaccatgtacccaaaagcagtgcaggacctctgcggctggagaatccggagcctggcttgtgggaagagcagcatcattgtggccgccgatgagagcaccatcagctggggtccgtcaccgacctttggggaactgggctacggggaccacaagcccaagtcttccactgcagcccaggaggtaaagactctggatggcattttctcagagcaggtcgccatgggctactcacactccttggtgatagcaagagatgaaagtgagactgagaaagagaagatcaagaaactgccagaatacaacccccgaaccctctgatgctcccggagactcctccgactccacacctctcgcggcagctgtcatttccatgtgcactgggacgggaagtcaaacgaggaatttaaaaaagcaaaagttgaccgaaggtgcatttttgtttagactccctgaggttccgttttacacatgatccaacgttaactacctttttttctgtatgctttccaaagtccttttttttcccttaatgttgaattaaaatacttgctcatagttgatttaccattcctacaaaagaggcagaaactttgagcaatctaggttttttttttttttaagttttttctttcttcctctcctgaatacactccccaaaacacccctttccagttacaattagcatcgtgatccaagcagatgccacatggaagaggaatcgccatttactcagaaaaaatgtcccttacaggaaccggcagcagctaggcagtcaccggcccgcctccatccaaaatcacgctcgcgtgcttcggaagcatccgggtcactccttctccgctttttcttgcagatgggcctaggccggtgtcggttctgtttctccccttggctgcctgtacgcccacagccttctggctgcgacattatagaatcggccgtgtcccccctggtgggggattggggatctgtgtttagccatttatatctactttagctgttaaagaggtccaaatgaaaatcaggtgattgtggaaccatggggacttgggggtggggcagaggtgggaacatttgtatcagttgagtcagcttggtggctccctgtggagccagggctgagccttgtcacgcgcactcgccaattaagagatggaccagccagcagtcaagtgcattctccagtccttgcaagaaggatcagccctttctgtgccagcctcgatcgccttgtgctttggtctctttttctcccccccgcctggatcctgcctcgcgcgggccgtcctgttgctgagactcggggtaccgttctgctgacccagctccctttagtcacgtttgcttggctctggtaccaaatagttgggattaccgaagagtccccttccttgcgtgtcagcacggatgctgtgactgccacctgcgtcctcgtcaagtgcccgagctcgccgccgtgtgtgctgcgctgagtgagttatgaggtgcctttcccggaaccctcctctcgcctggacccaagagaggcgacagctgtggctggggctcttggtttccagagggtctggactggtttgggtgctttaaaatagatatttagttcagtggtgcttatgggggagatgggactagaacttaagtgtgagacttgggtggatgggaaagttaaatattggtctcttcaagtttttttttcttttgctttgttaccacttgtcactgtctccatgttaaaatgccaaaaatgatgtagttgttgttgcttttttccctattttccaccccagtcgctccttaccgtgactcctgcccttggagggcatgtagcagtgtctgtcctgccagtcccaaggccctgtgggaggagactggcctgcatctctctaagacttagtctgacgccacgcgcatctcttgttctgtgttcaatcagtagtccaggggagaagcttctgctacttcagagctttgctaaactaacctaatttgtccaaatcaccccaaaaccaccatctctgacgtaagcttccatgcgacagcctgatccgtttccctggacaggtctctttcctggaatgcagcccaggcacctgtgctcctggcacccttgaggtctctcctttgagccgtggtcaccgagagggttgaggacgcagcacccgaggtcccagcctttgcaggagcctccctgggcttagctggacttagatcttcggtggcctcatgtaaacgtggcagccagcctcttctagaaccctagcccagggactggagcaggaaagggaccttcaaagtgaagactgccttgtcccgcagctccttctggcttagattgaaacatgggcttcctaatgggttaaatcctttaaaacaaggagttgtgggggaagggtgtcgtgcactcctagagaaaggtacacagttgcccggttgggaatgtgcttggcgctgaccctgcgggcatctgactggtcttccagctcaggaaaaagaatttgaaagaggcttagcgtgaaggggaatcaaagaggaggttgtgatttggtcgaaggtgcctggtttagtgctgtaattgtcttattattttttttatatatatatttcttggagtaaacattttaaataaacaacaacattgtctactgtcataaaaacaacatcaaaaacaaacaaacaaaaaaaaa

SEQ ID NO: 452705 - DNA, 2733 bp, Homo sapiens
ggctgggtgtaatcggacgaggctacatgtacccaaaagcagtgcaggacctctgcggctggagaatccggagcctggcttgtgggaagagcagcatcattgtggccgccgatgagagcaccatcagctggggtccgtcaccgacctttggggaactgggctacggggaccacaagcccaagtcttccactgcagcccaggaggtaaagactctggatggcattttctcagagcaggtcgccatgggctactcacactccttggtgatagcaagagatgaaagtgagactgagaaagagaagatcaagaaactgccagaatacaacccccgaaccctctgatgctcccggagactcctccgactccacacctctcgcggcagctgtcatttccatgtgcactgggacgggaagtcaaacgaggaatttaaaaaagcaaaagttgaccgaaggtgcatttttgtttagactccctgaggttccgttttacacatgatccaacgttaactacctttttttctgtatgctttccaaagtccttttttttcccttaatgttgaattaaaatacttgctcatagttgatttaccattcctacaaaagaggcagaaactttgagcaatctaggttttttttttttttaagttttttctttcttcctctcctgaatacactccccaaaacacccctttccagttacaattagcatcgtgatccaagcagatgccacatggaagaggaatcgccatttactcagaaaaaatgtcccttacaggaaccggcagcagctaggcagtcaccggcccgcctccatccaaaatcacgctcgcgtgcttcggaagcatccgggtcactccttctccgctttttcttgcagatgggcctaggccggtgtcggttctgtttctccccttggctgcctgtacgcccacagccttctggctgcgacattatagaatcggccgtgtcccccctggtgggggattggggatctgtgtttagccatttatatctactttagctgttaaagaggtccaaatgaaaatcaggtgattgtggaaccatggggacttgggggtggggcagaggtgggaacatttgtatcagttgagtcagcttggtggctccctgtggagccagggctgagccttgtcacgcgcactcgccaattaagagatggaccagccagcagtcaagtgcattctccagtccttgcaagaaggatcagccctttctgtgccagcctcgatcgccttgtgctttggtctctttttctcccccccgcctggatcctgcctcgcgcgggccgtcctgttgctgagactcggggtaccgttctgctgacccagctccctttagtcacgtttgcttggctctggtaccaaatagttgggattaccgaagagtccccttccttgcgtgtcagcacggatgctgtgactgccacctgcgtcctcgtcaagtgcccgagctcgccgccgtgtgtgctgcgctgagtgagttatgaggtgcctttcccggaaccctcctctcgcctggacccaagagaggcgacagctgtggctggggctcttggtttccagagggtctggactggtttgggtgctttaaaatagatatttagttcagtggtgcttatgggggagatgggactagaacttaagtgtgagacttgggtggatgggaaagttaaatattggtctcttcaagtttttttttcttttgctttgttaccacttgtcactgtctccatgttaaaatgccaaaaatgatgtagttgttgttgcttttttccctattttccaccccagtcgctccttaccgtgactcctgcccttggagggcatgtagcagtgtctgtcctgccagtcccaaggccctgtgggaggagactggcctgcatctctctaagacttagtctgacgccacgcgcatctcttgttctgtgttcaatcagtagtccaggggagaagcttctgctacttcagagctttgctaaactaacctaatttgtccaaatcaccccaaaaccaccatctctgacgtaagcttccatgcgacagcctgatccgtttccctggacaggtctctttcctggaatgcagcccaggcacctgtgctcctggcacccttgaggtctctcctttgagccgtggtcaccgagagggttgaggacgcagcacccgaggtcccagcctttgcaggagcctccctgggcttagctggacttagatcttcggtggcctcatgtaaacgtggcagccagcctcttctagaaccctagcccagggactggagcaggaaagggaccttcaaagtgaagactgccttgtcccgcagctccttctggcttagattgaaacatgggcttcctaatgggttaaatcctttaaaacaaggagttgtgggggaagggtgtcgtgcactcctagagaaaggtacacagttgcccggttgggaatgtgcttggcgctgaccctgcgggcatctgactggtcttccagctcaggaaaaagaatttgaaagaggcttagcgtgaaggggaatcaaagaggaggttgtgatttggtcgaaggtgcctggtttagtgctgtaattgtcttattattttttttatatatatatttcttggagtaaacattttaaataaacaacaacattgtctactgtcaaaaaaaaaacacaaaaagacaagaaaagaagttcagggggatttgtagattgttgggttgag

SEQ ID NO: 452706 - DNA, 2743 bp, Homo sapiens
aaaagtggcagctcacactcatgcccttgagccatagctgcgtgggtgcaggtctggggctgctggccctgcagtgacagcctgcctgtttgcaggaagagcagcatcattgtggccgccgatgagagcaccatcagctggggtccgtcaccgacctttggggaactgggctacggggaccacaagcccaagtcttccactgcagcccaggaggtaaagactctggatggcattttctcagagcaggtcgccatgggctactcacactccttggtgatagcaagagatgaaagtgagactgagaaagagaagatcaagaaactgccagaatacaacccccgaaccctctgatgctcccggagactcctccgactccacacctctcgcggcagctgtcatttccatgtgcactgggacgggaagtcaaacgaggaatttaaaaaagcaaaagttgaccgaaggtgcatttttgtttagactccctgaggttccgttttacacatgatccaacgttaactacctttttttctgtatgctttccaaagtccttttttttcccttaatgttgaattaaaatacttgctcatagttgatttaccattcctacaaaagaggcagaaactttgagcaatctaggttttttttttttttaagttttttctttcttcctctcctgaatacactccccaaaacacccctttccagttacaattagcatcgtgatccaagcagatgccacatggaagaggaatcgccatttactcagaaaaaatgtcccttacaggaaccggcagcagctaggcagtcaccggcccgcctccatccaaaatcacgctcgcgtgcttcggaagcatccgggtcactccttctccgctttttcttgcagatgggcctaggccggtgtcggttctgtttctccccttggctgcctgtacgcccacagccttctggctgcgacattatagaatcggccgtgtcccccctggtgggggattggggatctgtgtttagccatttatatctactttagctgttaaagaggtccaaatgaaaatcaggtgattgtggaaccatggggacttgggggtggggcagaggtgggaacatttgtatcagttgagtcagcttggtggctccctgtggagccagggctgagccttgtcacgcgcactcgccaattaagagatggaccagccagcagtcaagtgcattctccagtccttgcaagaaggatcagccctttctgtgccagcctcgatcgccttgtgctttggtctctttttctcccccccgcctggatcctgcctcgcgcgggccgtcctgttgctgagactcggggtaccgttctgctgacccagctccctttagtcacgtttgcttggctctggtaccaaatagttgggattaccgaagagtccccttccttgcgtgtcagcacggatgctgtgactgccacctgcgtcctcgtcaagtgcccgagctcgccgccgtgtgtgctgcgctgagtgagttatgaggtgcctttcccggaaccctcctctcgcctggacccaagagaggcgacagctgtggctggggctcttggtttccagagggtctggactggtttgggtgctttaaaatagatatttagttcagtggtgcttatgggggagatgggactagaacttaagtgtgagacttgggtggatgggaaagttaaatattggtctcttcaagtttttttttcttttgctttgttaccacttgtcactgtctccatgttaaaatgccaaaaatgatgtagttgttgttgcttttttccctattttccaccccagtcgctccttaccgtgactcctgcccttggagggcatgtagcagtgtctgtcctgccagtcccaaggccctgtgggaggagactggcctgcatctctctaagacttagtctgacgccacgcgcatctcttgttctgtgttcaatcagtagtccaggggagaagcttctgctacttcagagctttgctaaactaacctaatttgtccaaatcaccccaaaaccaccatctctgacgtaagcttccatgcgacagcctgatccgtttccctggacaggtctctttcctggaatgcagcccaggcacctgtgctcctggcacccttgaggtctctcctttgagccgtggtcaccgagagggttgaggacgcagcacccgaggtcccagcctttgcaggagcctccctgggcttagctggacttagatcttcggtggcctcatgtaaacgtggcagccagcctcttctagaaccctagcccagggactggagcaggaaagggaccttcaaagtgaagactgccttgtcccgcagctccttctggcttagattgaaacatgggcttcctaatgggttaaatcctttaaaacaaggagttgtgggggaagggtgtcgtgcactcctagagaaaggtacacagttgcccggttgggaatgtgcttggcgctgaccctgcgggcatctgactggtcttccagctcaggaaaaagaatttgaaagaggcttagcgtgaaggggaatcaaagaggaggttgtgatttggtcgaaggtgcctggtttagtgctgtaattgtcttattattttttttatatatatatttcttggagtaaacattttaaataaacaacaacattgtctactgtcaaaaaaaaaacacaaaaagacaagaaaagaagttcagggggatttgtagattgttgggttgag

SEQ ID NO: 452707 - DNA, 2652 bp, Homo sapiens
tagctgtcttgggcagaggggctttttgcagttttcaagggcactctgtttttctccatgctgacccgctttagcagcccagtttccagagtctcttcaacgcattgattagtccaggcgcctcaggcacacccaacgctgatttgtccccccaggtcgccatgggctactcacactccttggtgatagcaagagatgaaagtgagactgagaaagagaagatcaagaaactgccagaatacaacccccgaaccctctgatgctcccggagactcctccgactccacacctctcgcggcagctgtcatttccatgtgcactgggacgggaagtcaaacgaggaatttaaaaaagcaaaagttgaccgaaggtgcatttttgtttagactccctgaggttccgttttacacatgatccaacgttaactacctttttttctgtatgctttccaaagtccttttttttcccttaatgttgaattaaaatacttgctcatagttgatttaccattcctacaaaagaggcagaaactttgagcaatctaggttttttttttttttaagttttttctttcttcctctcctgaatacactccccaaaacacccctttccagttacaattagcatcgtgatccaagcagatgccacatggaagaggaatcgccatttactcagaaaaaatgtcccttacaggaaccggcagcagctaggcagtcaccggcccgcctccatccaaaatcacgctcgcgtgcttcggaagcatccgggtcactccttctccgctttttcttgcagatgggcctaggccggtgtcggttctgtttctccccttggctgcctgtacgcccacagccttctggctgcgacattatagaatcggccgtgtcccccctggtgggggattggggatctgtgtttagccatttatatctactttagctgttaaagaggtccaaatgaaaatcaggtgattgtggaaccatggggacttgggggtggggcagaggtgggaacatttgtatcagttgagtcagcttggtggctccctgtggagccagggctgagccttgtcacgcgcactcgccaattaagagatggaccagccagcagtcaagtgcattctccagtccttgcaagaaggatcagccctttctgtgccagcctcgatcgccttgtgctttggtctctttttctcccccccgcctggatcctgcctcgcgcgggccgtcctgttgctgagactcggggtaccgttctgctgacccagctccctttagtcacgtttgcttggctctggtaccaaatagttgggattaccgaagagtccccttccttgcgtgtcagcacggatgctgtgactgccacctgcgtcctcgtcaagtgcccgagctcgccgccgtgtgtgctgcgctgagtgagttatgaggtgcctttcccggaaccctcctctcgcctggacccaagagaggcgacagctgtggctggggctcttggtttccagagggtctggactggtttgggtgctttaaaatagatatttagttcagtggtgcttatgggggagatgggactagaacttaagtgtgagacttgggtggatgggaaagttaaatattggtctcttcaagtttttttttcttttgctttgttaccacttgtcactgtctccatgttaaaatgccaaaaatgatgtagttgttgttgcttttttccctattttccaccccagtcgctccttaccgtgactcctgcccttggagggcatgtagcagtgtctgtcctgccagtcccaaggccctgtgggaggagactggcctgcatctctctaagacttagtctgacgccacgcgcatctcttgttctgtgttcaatcagtagtccaggggagaagcttctgctacttcagagctttgctaaactaacctaatttgtccaaatcaccccaaaaccaccatctctgacgtaagcttccatgcgacagcctgatccgtttccctggacaggtctctttcctggaatgcagcccaggcacctgtgctcctggcacccttgaggtctctcctttgagccgtggtcaccgagagggttgaggacgcagcacccgaggtcccagcctttgcaggagcctccctgggcttagctggacttagatcttcggtggcctcatgtaaacgtggcagccagcctcttctagaaccctagcccagggactggagcaggaaagggaccttcaaagtgaagactgccttgtcccgcagctccttctggcttagattgaaacatgggcttcctaatgggttaaatcctttaaaacaaggagttgtgggggaagggtgtcgtgcactcctagagaaaggtacacagttgcccggttgggaatgtgcttggcgctgaccctgcgggcatctgactggtcttccagctcaggaaaaagaatttgaaagaggcttagcgtgaaggggaatcaaagaggaggttgtgatttggtcgaaggtgcctggtttagtgctgtaattgtcttattattttttttatatatatatttcttggagtaaacattttaaataaacaacaacattgtctactgtcaaaaaaaaaacacaaaaagacaagaaaagaagttcagggggatttgtagattgttgggttgag

SEQ ID NO: 452708 - DNA, 2065 bp, Homo sapiens
  misc_feature (2)..(2): n is a, c, g, or t
tnggcaccgaaggcctgaaggtgcaggcttcctggcagaagatggtgaactgcagtggccagtgccctgtcctccaagataccactgagcctcttgcccatgattcagaggtatctggaggacaaggtcaccggcccgcctccatccaaaatcacgctcgcgtgcttcggaagcatccgggtcactccttctccgctttttcttgcagatgggcctaggccggtgtcggttctgtttctccccttggctgcctgtacgcccacagccttctggctgcgacattatagaatcggccgtgtcccccctggtgggggattggggatctgtgtttagccatttatatctactttagctgttaaagaggtccaaatgaaaatcaggtgattgtggaaccatggggacttgggggtggggcagaggtgggaacatttgtatcagttgagtcagcttggtggctccctgtggagccagggctgagccttgtcacgcgcactcgccaattaagagatggaccagccagcagtcaagtgcattctccagtccttgcaagaaggatcagccctttctgtgccagcctcgatcgccttgtgctttggtctctttttctcccccccgcctggatcctgcctcgcgcgggccgtcctgttgctgagactcggggtaccgttctgctgacccagctccctttagtcacgtttgcttggctctggtaccaaatagttgggattaccgaagagtccccttccttgcgtgtcagcacggatgctgtgactgccacctgcgtcctcgtcaagtgcccgagctcgccgccgtgtgtgctgcgctgagtgagttatgaggtgcctttcccggaaccctcctctcgcctggacccaagagaggcgacagctgtggctggggctcttggtttccagagggtctggactggtttgggtgctttaaaatagatatttagttcagtggtgcttatgggggagatgggactagaacttaagtgtgagacttgggtggatgggaaagttaaatattggtctcttcaagtttttttttcttttgctttgttaccacttgtcactgtctccatgttaaaatgccaaaaatgatgtagttgttgttgcttttttccctattttccaccccagtcgctccttaccgtgactcctgcccttggagggcatgtagcagtgtctgtcctgccagtcccaaggccctgtgggaggagactggcctgcatctctctaagacttagtctgacgccacgcgcatctcttgttctgtgttcaatcagtagtccaggggagaagcttctgctacttcagagctttgctaaactaacctaatttgtccaaatcaccccaaaaccaccatctctgacgtaagcttccatgcgacagcctgatccgtttccctggacaggtctctttcctggaatgcagcccaggcacctgtgctcctggcacccttgaggtctctcctttgagccgtggtcaccgagagggttgaggacgcagcacccgaggtcccagcctttgcaggagcctccctgggcttagctggacttagatcttcggtggcctcatgtaaacgtggcagccagcctcttctagaaccctagcccagggactggagcaggaaagggaccttcaaagtgaagactgccttgtcccgcagctccttctggcttagattgaaacatgggcttcctaatgggttaaatcctttaaaacaaggagttgtgggggaagggtgtcgtgcactcctagagaaaggtacacagttgcccggttgggaatgtgcttggcgctgaccctgcgggcatctgactggtcttccagctcaggaaaaagaatttgaaagaggcttagcgtgaaggggaatcaaagaggaggttgtgatttggtcgaaggtgcctggtttagtgctgtaattgtcttattattttttttatatatatatttcttggagtaaacattttaaataaacaacaacattgtctactgtcaaaaaaaaaacacaaaaagacaagaaaagaagttcagggggatttgtagattgttgggttgag

SEQ ID NO: 452709 - DNA, 4010 bp, Homo sapiens
ggaagctcgtatttacattttaagtgtatctggtgagtgggctggagccctcgtctgggccggaaaaaaaaaagccctccgatccgtcttttagttgcttctcttccttttttctctccggtttctcatcactccaaccagccgcgaccatgcccaggaagaaggcggcggcggcggcctgggaggagccgagctcgggcaacggcactgcccgcgccgggcccaggaaacgcggcggcccggcgggcaggaagcgcgagcggcccgagcgctgcagtagcagcagcggcggcggcagcagcggcgacgaggacggcctggagctcgacggggcccccggcgggggcaagcgctgcggcgcggccggcgacagcaggcaaggcgggcggcgcggccgtggtcatcaccgaacccgagcacaccaaggagcgcgtcaaacttgaagggtcaaagtgcaaagggcagcttttgatttttggggcaaccaactgggacttgattggtcgaaaagaagtgcctaaacagcaagctgcttaccgcaatctcggtcagaatttgtgggggccccacagatatgggtgcctggcgggggtccgggtgcggacagtggtctcgggctcgtgtgctgcacacagcctcctcatcaccacggaagggaagctgtggagctggggtcgaaatgagaaggggcagctgggacatggtgacaccaagagagtagaagcccctagactcatcgagggtcttagccacgaagtgattgtgtctgcagcatgtgggcggaaccacaccttggccttgacggaaacgggctccgtgtttgcgtttggggaaaacaagatggggcagctgggccttggcaaccagacagacgctgttcccagccccgcgcagataatgtacaacggccagccaattaccaaaatggcctgtggggctgaattcagtatgataatggactgcaaaggaaacctctattcctttgggtgccctgaatatggtcagctgggacacaactcagatgggaagttcatcgcccgggcacagcggatagagtacgactgtgaactagttccccggcgagtggccatcttcattgagaagacgaaagatggacagattctgcctgtaccaaacgtggttgtacgagacgtggcctgtggcgctaaccacacgctggtcctggactcccagaagcgagtcttctcctggggctttggtggctatggccggctgggccacgcagagcagaaggatgagatggtcccccgcctggtgaagctgtttgacttccctgggcgtggggcttcccagatctatgctggttacacctgctcctttgctgtcagtgaagtgggtggtctgtttttctggggggccaccaacacctcccgtgaatctaccatgtacccaaaagcagtgcaggacctctgcggctggagaatccggagcctggcttgtgggaagagcagcatcattgtggccgccgatgagagcaccatcagctggggtccgtcaccgacctttggggaactgggctacggggaccacaagcccaagtcttccactgcagcccaggaggtaaagactctggatggcattttctcagagcaggtcgccatgggctactcacactccttggtgatagcaagagatgaaagtgagactgagaaagagaagatcaagaaactgccagaatacaacccccgaaccctctgatgctcccggagactcctccgactccacacctctcgcggcagctgtcatttccatgtgcactgggacgggaagtcaaacgaggaatttaaaaaagcaaaagttgaccgaaggtgcatttttgtttagactccctgaggttccgttttacacatgatccaacgttaactacctttttttctgtatgctttccaaagtccttttttttcccttaatgttgaattaaaatacttgctcatagttgatttaccattcctacaaaagaggcagaaactttgagcaatctaggttttttttttttttaagttttttctttcttcctctcctgaatacactccccaaaacacccctttccagttacaattagcatcgtgatccaagcagatgccacatggaagaggaatcgccatttactcagaaaaaatgtcccttacaggaaccggcagcagctaggcagtcaccggcccgcctccatccaaaatcacgctcgcgtgcttcggaagcatccgggtcactccttctccgctttttcttgcagatgggcctaggccggtgtcggttctgtttctccccttggctgcctgtacgcccacagccttctggctgcgacattatagaatcggccgtgtcccccctggtgggggattggggatctgtgtttagccatttatatctactttagctgttaaagaggtccaaatgaaaatcaggtgattgtggaaccatggggacttgggggtggggcagaggtgggaacatttgtatcagttgagtcagcttggtggctccctgtggagccagggctgagccttgtcacgcgcactcgccaattaagagatggaccagccagcagtcaagtgcattctccagtccttgcaagaaggatcagccctttctgtgccagcctcgatcgccttgtgctttggtctctttttctcccccccgcctggatcctgcctcgcgcgggccgtcctgttgctgagactcggggtaccgttctgctgacccagctccctttagtcacgtttgcttggctctggtaccaaatagttgggattaccgaagagtccccttccttgcgtgtcagcacggatgctgtgactgccacctgcgtcctcgtcaagtgcccgagctcgccgccgtgtgtgctgcgctgagtgagttatgaggtgcctttcccggaaccctcctctcgcctggacccaagagaggcgacagctgtggctggggctcttggtttccagagggtctggactggtttgggtgctttaaaatagatatttagttcagtggtgcttatgggggagatgggactagaacttaagtgtgagacttgggtggatgggaaagttaaatattggtctcttcaagtttttttttcttttgctttgttaccacttgtcactgtctccatgttaaaatgccaaaaatgatgtagttgttgttgcttttttccctattttccaccccagtcgctccttaccgtgactcctgcccttggagggcatgtagcagtgtctgtcctgccagtcccaaggccctgtgggaggagactggcctgcatctctctaagacttagtctgacgccacgcgcatctcttgttctgtgttcaatcagtagtccaggggagaagcttctgctacttcagagctttgctaaactaacctaatttgtccaaatcaccccaaaaccaccatctctgacgtaagcttccatgcgacagcctgatccgtttccctggacaggtctctttcctggaatgcagcccaggcacctgtgctcctggcacccttgaggtctctcctcatgtaaacgtggcagccagcctcttctagaaccctagcccagggactggagcaggaaagggaccttcaaagtgaagactgccttgtcccgcagctccttctggcttagattgaaacatgggcttcctaatgggttaaatcctttaaaacaaggagttgtgggggaagggtgtcgtgcactcctagagaaaggtacacagttgcccggttgggaatgtgcttggcgctgaccctgcgggcatctgactggtcttccagctcaggaaaaagaatttgaaagaggcttagcgtgaaggggaatcaaagaggaggttgtgatttggtcgaaggtgcctggtttagtgctgtaattgtcttattattttttttatatatatatttcttggagtaaacattttaaataaacaacaacattgtctactgtcaaaaaaaaaacacaaaaagacaagaaaagaagttcagggggatttgtagattgttgggttgag

SEQ ID NO: 452710 - DNA, 1792 bp, Homo sapiens
acactagaaggcccggttatcggacgaggccctggtgggggattggggatctgtgtttagccatttatatctactttagctgttaaagaggtccaaatgaaaatcaggtgattgtggaaccatggggacttgggggtggggcagaggtgggaacatttgtatcagttgagtcagcttggtggctccctgtggagccagggctgagccttgtcacgcgcactcgccaattaagagatggaccagccagcagtcaagtgcattctccagtccttgcaagaaggatcagccctttctgtgccagcctcgatcgccttgtgctttggtctctttttctcccccccgcctggatcctgcctcgcgcgggccgtcctgttgctgagactcggggtaccgttctgctgacccagctccctttagtcacgtttgcttggctctggtaccaaatagttgggattaccgaagagtccccttccttgcgtgtcagcacggatgctgtgactgccacctgcgtcctcgtcaagtgcccgagctcgccgccgtgtgtgctgcgctgagtgagttatgaggtgcctttcccggaaccctcctctcgcctggacccaagagaggcgacagctgtggctggggctcttggtttccagagggtctggactggtttgggtgctttaaaatagatatttagttcagtggtgcttatgggggagatgggactagaacttaagtgtgagacttgggtggatgggaaagttaaatattggtctcttcaagtttttttttcttttgctttgttaccacttgtcactgtctccatgttaaaatgccaaaaatgatgtagttgttgttgcttttttccctattttccaccccagtcgctccttaccgtgactcctgcccttggagggcatgtagcagtgtctgtcctgccagtcccaaggccctgtgggaggagactggcctgcatctctctaagacttagtctgacgccacgcgcatctcttgttctgtgttcaatcagtagtccaggggagaagcttctgctacttcagagctttgctaaactaacctaatttgtccaaatcaccccaaaaccaccatctctgacgtaagcttccatgcgacagcctgatccgtttccctggacaggtctctttcctggaatgcagcccaggcacctgtgctcctggcacccttgaggtctctcctttgagccgtggtcaccgagagggttgaggacgcagcacccgaggtcccagcctttgcaggagcctccctgggcttagctggacttagatcttcggtggcctcatgtaaacgtggcagccagcctcttctagaaccctagcccagggactggagcaggaaagggaccttcaaagtgaagactgccttgtcccgcagctccttctggcttagattgaaacatgggcttcctaatgggttaaatcctttaaaacaaggagttgtgggggaagggtgtcgtgcactcctagagaaaggtacacagttgcccggttgggaatgtgcttggcgctgaccctgcgggcatctgactggtcttccagctcaggaaaaagaatttgaaagaggcttagcgtgaaggggaatcaaagaggaggttgtgatttggtcgaaggtgcctggtttagtgctgtaattgtcttattattttttttatatatatatttcttggagtaaacattttaaataaacaacaacattgtctactgtcaaaaaaaaaacacaaaaagacaagaaaagaagttcagggggatttgtagattgttgggttgag

SEQ ID NO: 452711 - DNA, 3773 bp, Homo sapiens
ggaagctcgtatttacattttaagtgtatctggtgagtgggctggagccctcgtctgggccggaaaaaaaaaagccctccgatccgtcttttagttgcttctcttccttttttctctccggtttctcatcactccaaccagccgcgaccatgcccaggaagaaggcggcggcggcggcctgggaggagccgagctcgggcaacggcactgcccgcgccgggcccaggaaacgcggcggcccggcgggcaggaagcgcgagcggcccgagcgctgcagtagcagcagcggcggcggcagcagcggcgacgaggacggcctggagctcgacggggcccccggcgggggcaagcgctgcggcgcggccggcgacagcaggcaaggcgggcggcgcggccgtggtcatcaccgaacccgagcacaccaaggagcgcgtcaaacttgaagggtcaaagtgcaaagggcagcttttgatttttggggcaaccaactgggacttgattggtcgaaaagaagtgcctaaacagcaagctgcttaccgcaatctcggtcagaatttgtgggggccccacagatatgggtgcctggcgggggtccgggtgcggacagtggtctcgggctcgtgtgctgcacacagcctcctcatcaccacggaagggaagctgtggagctggggtcgaaatgagaaggggcagctgggacatggtgacaccaagagagtagaagcccctagactcatcgagggtcttagccacgaagtgattgtgtctgcagcatgtgggcggaaccacaccttggccttgacggaaacgggctccgtgtttgcgtttggggaaaacaagatggggcagctgggccttggcaaccagacagacgctgttcccagccccgcgcagataatgtacaacggccagccaattaccaaaatggcctgtggggctgaattcagtatgataatggactgcaaaggaaacctctattcctttgggtgccctgaatatggtcagctgggacacaactcagatgggaagttcatcgcccgggcacagcggatagagtacgactgtgaactagttccccggcgagtggccatcttcattgagaagacgaaagatggacagattctgcctgtaccaaacgtggttgtacgagacgtggcctgtggcgctaaccacacgctggtcctggactcccagaagcgagtcttctcctggggctttggtggctatggccggctgggccacgcagagcagaaggatgagatggtcccccgcctggtgaagctgtttgacttccctgggcgtggggcttcccagatctatgctggttacacctgctcctttgctgtcagtgaagtgggtggtctgtttttctggggggccaccaacacctcccgtgaatctaccatgtacccaaaagcagtgcaggacctctgcggctggagaatccggagcctggcttgtgggaagagcagcatcattgtggccgccgatgagagcaccatcagctggggtccgtcaccgacctttggggaactgggctacggggaccacaagcccaagtcttccactgcagcccaggaggtaaagactctggatggcattttctcagagcaggtcgccatgggctactcacactccttggtgatagcaagagatgaaagtgagactgagaaagagaagatcaagaaactgccagaatacaacccccgaaccctctgatgctcccggagactcctccgactccacacctctcgcggcagctgtcatttccatgtgcactgggacgggaagtcaaacgaggaatttaaaaaagcaaaagttgaccgaaggtgcatttttgtttagactccctgaggttccgttttacacatgatccaacgttaactacctttttttctgtatgctttccaaagtccttttttttcccttaatgttgaattaaaatacttgctcatagttgatttaccattcctacaaaagaggcagaaactttgagcaatctaggttttttttttttttaagttttttctttcttcctctcctgaatacactccccaaaacacccctttccagttacaattagcatcgtgatccaagcagatgccacatggaagaggaatcgccatttactcagaaaaaatgtcccttacaggaaccggcagcagctaggcagtcaccggcccgcctccatccaaaatcacgctcgcgtgcttcggaagcatccgggtcactccttctccgctttttcttgcagatgggcctaggccggtgtcggttctgtttctccccttggctgcctgtacgcccacagccttctggctgcgacattatagaatcggccgtgtcccccctggtgggggattggggatctgtgtttagccatttatatctactttagctgttaaagaggtccaaatgaaaatcaggtgattgtggaaccatggggacttgggggtggggcagaggtgggaacatttgtatcagttgagtcagcttggtggctccctgtggagccagggctgagccttgtcacgcgcactcgccaattaagagatggaccagccagcagtcaagtgcattctccagtccttgcaagaaggatcagccctttctgtgccagcctcgatcgccttgtgctttggtctctttttctcccccccgcctggatcctgcctcgcgcgggccgtcctgttgctgagactcggggtaccgttctgctgacccagctccctttagtcacgtttgcttggctctggtaccaaatagttgggattaccgaagagtccccttccttgcgtgtcagcacggatgctgtgactgccacctgcgtcctcgtcaagtgcccgagctcgccgccgtgtgtgctgcgctgagtgagttatgaggtgcctttcccggaaccctcctctcgcctggacccaagagaggcgacagctgtggctggggctcttggtttccagagggtctggactggtttgggtgctttaaaatagatatttagttcagtggtgcttatgggggagatgggactagaacttaagtgtgagacttgggtggatgggaaagttaaatattggtctcttcaagtttttttttcttttgctttgttaccacttgtcactgtctccatgttaaaatgccaaaaatgatgtagttgttgttgcttttttccctattttccaccccagtcgctccttaccgtgactcctgcccttggagggcatgtagcagtgtctgtcctgccagtcccaaggccctgtgggaggagactggcctgcatctctctaagacttagtctgacgccacgcgcatctcttgttctgtgttcaatcagtagtccaggggagaagcttctgctacttcagagctttgctaaactaacctaatttgtccaaatcaccccaaaaccaccatctctgacgtaagcttccatgcgacagcctgatccgtttccctggacaggtctctttcctggaatgcagcccaggcactcctagagaaaggtacacagttgcccggttgggaatgtgcttggcgctgaccctgcgggcatctgactggtcttccagctcaggaaaaagaatttgaaagaggcttagcgtgaaggggaatcaaagaggaggttgtgatttggtcgaaggtgcctggtttagtgctgtaattgtcttattattttttttatatatatatttcttggagtaaacattttaaataaacaacaacattgtctactgtcataaaaacaacatcaaaaacaaacaaacaaaaaaaaa

SEQ ID NO: 452712 - DNA, 3630 bp, Homo sapiens
ggaagctcgtatttacattttaagtgtatctggtgagtgggctggagccctcgtctgggccggaaaaaaaaaagccctccgatccgtcttttagttgcttctcttccttttttctctccggtttctcatcactccaaccagccgcgaccatgcccaggaagaaggcggcggcggcggcctgggaggagccgagctcgggcaacggcactgcccgcgccgggcccaggaaacgcggcggcccggcgggcaggaagcgcgagcggcccgagcgctgcagtagcagcagcggcggcggcagcagcggcgacgaggacggcctggagctcgacggggcccccggcgggggcaagcgctgcggcgcggccggcgacagcaggcaaggcgggcggcgcggccgtggtcatcaccgaacccgagcacaccaaggagcgcgtcaaacttgaagggtcaaagtgcaaagggcagcttttgatttttggggcaaccaactgggacttgattggtcgaaaagaagtgcctaaacagcaagctgcttaccgcaatctcggtcagaatttgtgggggccccacagatatgggtgcctggcgggggtccgggtgcggacagtggtctcgggctcgtgtgctgcacacagcctcctcatcaccacggaagggaagctgtggagctggggtcgaaatgagaaggggcagctgggacatggtgacaccaagagagtagaagcccctagactcatcgagggtcttagccacgaagtgattgtgtctgcagcatgtgggcggaaccacaccttggccttgacggaaacgggctccgtgtttgcgtttggggaaaacaagatggggcagctgggccttggcaaccagacagacgctgttcccagccccgcgcagataatgtacaacggccagccaattaccaaaatggcctgtggggctgaattcagtatgataatggactgcaaaggaaacctctattcctttgggtgccctgaatatggtcagctgggacacaactcagatgggaagttcatcgcccgggcacagcggatagagtacgactgtgaactagttccccggcgagtggccatcttcattgagaagacgaaagatggacagattctgcctgtaccaaacgtggttgtacgagacgtggcctgtggcgctaaccacacgctggtcctggactcccagaagcgagtcttctcctggggctttggtggctatggccggctgggccacgcagagcagaaggatgagatggtcccccgcctggtgaagctgtttgacttccctgggcgtggggcttcccagatctatgctggttacacctgctcctttgctgtcagtgaagtgggtggtctgtttttctggggggccaccaacacctcccgtgaatctaccatgtacccaaaagcagtgcaggacctctgcggctggagaatccggagcctggcttgtgggaagagcagcatcattgtggccgccgatgagagcaccatcagctggggtccgtcaccgacctttggggaactgggctacggggaccacaagcccaagtcttccactgcagcccaggaggtaaagactctggatggcattttctcagagcaggtcgccatgggctactcacactccttggtgatagcaagagatgaaagtgagactgagaaagagaagatcaagaaactgccagaatacaacccccgaaccctctgatgctcccggagactcctccgactccacacctctcgcggcagctgtcatttccatgtgcactgggacgggaagtcaaacgaggaatttaaaaaagcaaaagttgaccgaaggtgcatttttgtttagactccctgaggttccgttttacacatgatccaacgttaactacctttttttctgtatgctttccaaagtccttttttttcccttaatgttgaattaaaatacttgctcatagttgatttaccattcctacaaaagaggcagaaactttgagcaatctaggttttttttttttttaagttttttctttcttcctctcctgaatacactccccaaaacacccctttccagttacaattagcatcgtgatccaagcagatgccacatggaagaggaatcgccatttactcagaaaaaatgtcccttacaggaaccggcagcagctaggcagtcaccggcccgcctccatccaaaatcacgctcgcgtgcttcggaagcatccgggtcactccttctccgctttttcttgcagatgggcctaggccggtgtcggttctgtttctccccttggctgcctgtacgcccacagccttctggctgcgacattatagaatcggccgtgtcccccctggtgggggattggggatctgtgtttagccatttatatctactttagctgttaaagaggtccaaatgaaaatcaggtgattgtggaaccatggggacttgggggtggggcagaggtgggaacatttgtatcagttgagtcagcttggtggctccctgtggagccagggctgagccttgtcacgcgcactcgccaattaagagatggaccagccagcagtcaagtgcattctccagtccttgcaagaaggatcagccctttctgtgccagcctcgatcgccttgtgctttggtctctttttctcccccccgcctggatcctgcctcgcgcgggccgtcctgttgctgagactcggggtaccgttctgctgacccagctccctttagtcacgtttgcttggctctggtaccaaatagttgggattaccgaagagtccccttccttgcgtgtcagcacggatgctgtgactgccacctgcgtcctcgtcaagtgcccgagctcgccgccgtgtgtgctgcgctgagtgagttatgaggtgcctttcccggaaccctcctctcgcctggacccaagagaggcgacagctgtggctggggctcttggtttccagagggtctggactggtttgggtgctttaaaatagatatttagttcagtggtgcttatgggggagatgggactagaacttaagtgtgagacttgggtggatgggaaagttaaatattggtctcttcaagtttttttttcttttgctttgttaccacttgtcactgtctccatgttaaaatgccaaaaatgatgtagttgttgttgcttttttccctattttccaccccagtcgctccttaccgtgactcctgcccttggagggcatgtagcagtgtctgtcctgccagtcccaaggccctgtgggaggagactggcctgcatctctctaagacttagtctgacgccacgcgcatctcttgttctgtgttcaatcagtagtccaggggagaagcttctgctacttcagagctttgctaaactaacctaatttgtccaaatcaccccaaaaccaccatctctgacgtaagcttccatgcgacagcctgatccgtttccctggacaggtctctttcgtgcctggtttagtgctgtaattgtcttattattttttttatatatatatttcttggagtaaacattttaaataaacaacaacattgtctactgtcaaaaaaaaaacacaaaaagacaagaaaagaagttcagggggatttgtagattgttgggttgag

SEQ ID NO: 452713 - DNA, 1514 bp, Homo sapiens
  misc_feature (2)..(2): n is a, c, g, or t
tnaggctaggtacgaggctgggtgttgaatcggccgaggctttggtctctttttctcccccccgcctggatcctgcctcgcgcgggccgtcctgttgctgagactcggggtaccgttctgctgacccagctccctttagtcacgtttgcttggctctggtaccaaatagttgggattaccgaagagtccccttccttgcgtgtcagcacggatgctgtgactgccacctgcgtcctcgtcaagtgcccgagctcgccgccgtgtgtgctgcgctgagtgagttatgaggtgcctttcccggaaccctcctctcgcctggacccaagagaggcgacagctgtggctggggctcttggtttccagagggtctggactggtttgggtgctttaaaatagatatttagttcagtggtgcttatgggggagatgggactagaacttaagtgtgagacttgggtggatgggaaagttaaatattggtctcttcaagtttttttttcttttgctttgttaccacttgtcactgtctccatgttaaaatgccaaaaatgatgtagttgttgttgcttttttccctattttccaccccagtcgctccttaccgtgactcctgcccttggagggcatgtagcagtgtctgtcctgccagtcccaaggccctgtgggaggagactggcctgcatctctctaagacttagtctgacgccacgcgcatctcttgttctgtgttcaatcagtagtccaggggagaagcttctgctacttcagagctttgctaaactaacctaatttgtccaaatcaccccaaaaccaccatctctgacgtaagcttccatgcgacagcctgatccgtttccctggacaggtctctttcctggaatgcagcccaggcacctgtgctcctggcacccttgaggtctctcctttgagccgtggtcaccgagagggttgaggacgcagcacccgaggtcccagcctttgcaggagcctccctgggcttagctggacttagatcttcggtggcctcatgtaaacgtggcagccagcctcttctagaaccctagcccagggactggagcaggaaagggaccttcaaagtgaagactgccttgtcccgcagctccttctggcttagattgaaacatgggcttcctaatgggttaaatcctttaaaacaaggagttgtgggggaagggtgtcgtgcactcctagagaaaggtacacagttgcccggttgggaatgtgcttggcgctgaccctgcgggcatctgactggtcttccagctcaggaaaaagaatttgaaagaggcttagcgtgaaggggaatcaaagaggaggttgtgatttggtcgaaggtgcctggtttagtgctgtaattgtcttattattttttttatatatatatttcttggagtaaacattttaaataaacaacaacattgtctactgtcaaaaaaaaaacacaaaaagacaagaaaagaagttcagggggatttgtagattgttgggttgag

SEQ ID NO: 452714 - DNA, 1508 bp, Homo sapiens
aatagacgagacgagtgtgtaatcaggacgaggctttggtctctttttctcccccccgcctggatcctgcctcgcgcgggccgtcctgttgctgagactcggggtaccgttctgctgacccagctccctttagtcacgtttgcttggctctggtaccaaatagttgggattaccgaagagtccccttccttgcgtgtcagcacggatgctgtgactgccacctgcgtcctcgtcaagtgcccgagctcgccgccgtgtgtgctgcgctgagtgagttatgaggtgcctttcccggaaccctcctctcgcctggacccaagagaggcgacagctgtggctggggctcttggtttccagagggtctggactggtttgggtgctttaaaatagatatttagttcagtggtgcttatgggggagatgggactagaacttaagtgtgagacttgggtggatgggaaagttaaatattggtctcttcaagtttttttttcttttgctttgttaccacttgtcactgtctccatgttaaaatgccaaaaatgatgtagttgttgttgcttttttccctattttccaccccagtcgctccttaccgtgactcctgcccttggagggcatgtagcagtgtctgtcctgccagtcccaaggccctgtgggaggagactggcctgcatctctctaagacttagtctgacgccacgcgcatctcttgttctgtgttcaatcagtagtccaggggagaagcttctgctacttcagagctttgctaaactaacctaatttgtccaaatcaccccaaaaccaccatctctgacgtaagcttccatgcgacagcctgatccgtttccctggacaggtctctttcctggaatgcagcccaggcacctgtgctcctggcacccttgaggtctctcctttgagccgtggtcaccgagagggttgaggacgcagcacccgaggtcccagcctttgcaggagcctccctgggcttagctggacttagatcttcggtggcctcatgtaaacgtggcagccagcctcttctagaaccctagcccagggactggagcaggaaagggaccttcaaagtgaagactgccttgtcccgcagctccttctggcttagattgaaacatgggcttcctaatgggttaaatcctttaaaacaaggagttgtgggggaagggtgtcgtgcactcctagagaaaggtacacagttgcccggttgggaatgtgcttggcgctgaccctgcgggcatctgactggtcttccagctcaggaaaaagaatttgaaagaggcttagcgtgaaggggaatcaaagaggaggttgtgatttggtcgaaggtgcctggtttagtgctgtaattgtcttattattttttttatatatatatttcttggagtaaacattttaaataaacaacaacattgtctactgtcaaaaaaaaaacacaaaaagacaagaaaagaagttcagggggatttgtagattgttgggttgag

SEQ ID NO: 452715 - DNA, 980 bp, Homo sapiens
cggcacgaggtgatgttggagcggccgcataggttttttccctattttccaccccagtcgctccttaccgtgactcctgcccttggagggcatgtagcagtgtctgtcctgccagtcccaaggccctgtgggaggagactggcctgcatctctctaagacttagtctgacgccacgcgcatctcttgttctgtgttcaatcagtagtccaggggagaagcttctgctacttcagagctttgctaaactaacctaatttgtccaaatcaccccaaaaccaccatctctgacgtaagcttccatgcgacagcctgatccgtttccctggacaggtctctttcctggaatgcagcccaggcacctgtgctcctggcacccttgaggtctctcctttgagccgtggtcaccgagagggttgaggacgcagcacccgaggtcccagcctttgcaggagcctccctgggcttagctggacttagatcttcggtggcctcatgtaaacgtggcagccagcctcttctagaaccctagcccagggactggagcaggaaagggaccttcaaagtgaagactgccttgtcccgcagctccttctggcttagattgaaacatgggcttcctaatgggttaaatcctttaaaacaaggagttgtgggggaagggtgtcgtgcactcctagagaaaggtacacagttgcccggttgggaatgtgcttggcgctgaccctgcgggcatctgactggtcttccagctcaggaaaaagaatttgaaagaggcttagcgtgaaggggaatcaaagaggaggttgtgatttggtcgaaggtgcctggtttagtgctgtaattgtcttattattttttttatatatatatttcttggagtaaacattttaaataaacaacaacattgtctactgtcaaaaaaaaaacacaaaaagacaagaaaagaagttcagggggatttgtagattgttgggttgag

SEQ ID NO: 452716 - DNA, 995 bp, Homo sapiens
gtgtcgctgttgcctccgtgtcgctgttccctccgtgtcgctgttcctcgcccgtgtcgctgttccccccagtcgctccttaccgtgactcctgcccttggagggcatgtagcagtgtctgtcctgccagtcccaaggccctgtgggaggagactggcctgcatctctctaagacttagtctgacgccacgcgcatctcttgttctgtgttcaatcagtagtccaggggagaagcttctgctacttcagagctttgctaaactaacctaatttgtccaaatcaccccaaaaccaccatctctgacgtaagcttccatgcgacagcctgatccgtttccctggacaggtctctttcctggaatgcagcccaggcacctgtgctcctggcacccttgaggtctctcctttgagccgtggtcaccgagagggttgaggacgcagcacccgaggtcccagcctttgcaggagcctccctgggcttagctggacttagatcttcggtggcctcatgtaaacgtggcagccagcctcttctagaaccctagcccagggactggagcaggaaagggaccttcaaagtgaagactgccttgtcccgcagctccttctggcttagattgaaacatgggcttcctaatgggttaaatcctttaaaacaaggagttgtgggggaagggtgtcgtgcactcctagagaaaggtacacagttgcccggttgggaatgtgcttggcgctgaccctgcgggcatctgactggtcttccagctcaggaaaaagaatttgaaagaggcttagcgtgaaggggaatcaaagaggaggttgtgatttggtcgaaggtgcctggtttagtgctgtaattgtcttattattttttttatatatatatttcttggagtaaacattttaaataaacaacaacattgtctactgtcaaaaaaaaaacacaaaaagacaagaaaagaagttcagggggatttgtagattgttgggttgag

SEQ ID NO: 452717 - DNA, 3354 bp, Homo sapiens
ggaagctcgtatttacattttaagtgtatctggtgagtgggctggagccctcgtctgggccggaaaaaaaaaagccctccgatccgtcttttagttgcttctcttccttttttctctccggtttctcatcactccaaccagccgcgaccatgcccaggaagaaggcggcggcggcggcctgggaggagccgagctcgggcaacggcactgcccgcgccgggcccaggaaacgcggcggcccggcgggcaggaagcgcgagcggcccgagcgctgcagtagcagcagcggcggcggcagcagcggcgacgaggacggcctggagctcgacggggcccccggcgggggcaagcgctgcggcgcggccggcgacagcaggcaaggcgggcggcgcggccgtggtcatcaccgaacccgagcacaccaaggagcgcgtcaaacttgaagggtcaaagtgcaaagggcagcttttgatttttggggcaaccaactgggacttgattggtcgaaaagaagtgcctaaacagcaagctgcttaccgcaatctcggtcagaatttgtgggggccccacagatatgggtgcctggcgggggtccgggtgcggacagtggtctcgggctcgtgtgctgcacacagcctcctcatcaccacggaagggaagctgtggagctggggtcgaaatgagaaggggcagctgggacatggtgacaccaagagagtagaagcccctagactcatcgagggtcttagccacgaagtgattgtgtctgcagcatgtgggcggaaccacaccttggccttgacggaaacgggctccgtgtttgcgtttggggaaaacaagatggggcagctgggccttggcaaccagacagacgctgttcccagccccgcgcagataatgtacaacggccagccaattaccaaaatggcctgtggggctgaattcagtatgataatggactgcaaaggaaacctctattcctttgggtgccctgaatatggtcagctgggacacaactcagatgggaagttcatcgcccgggcacagcggatagagtacgactgtgaactagttccccggcgagtggccatcttcattgagaagacgaaagatggacagattctgcctgtaccaaacgtggttgtacgagacgtggcctgtggcgctaaccacacgctggtcctggactcccagaagcgagtcttctcctggggctttggtggctatggccggctgggccacgcagagcagaaggatgagatggtcccccgcctggtgaagctgtttgacttccctgggcgtggggcttcccagatctatgctggttacacctgctcctttgctgtcagtgaagtgggtggtctgtttttctggggggccaccaacacctcccgtgaatctaccatgtacccaaaagcagtgcaggacctctgcggctggagaatccggagcctggcttgtgggaagagcagcatcattgtggccgccgatgagagcaccatcagctggggtccgtcaccgacctttggggaactgggctacggggaccacaagcccaagtcttccactgcagcccaggaggtaaagactctggatggcattttctcagagcaggtcgccatgggctactcacactccttggtgatagcaagagatgaaagtgagactgagaaagagaagatcaagaaactgccagaatacaacccccgaaccctctgatgctcccggagactcctccgactccacacctctcgcggcagctgtcatttccatgtgcactgggacgggaagtcaaacgaggaatttaaaaaagcaaaagttgaccgaaggtgcatttttgtttagactccctgaggttccgttttacacatgatccaacgttaactacctttttttctgtatgctttccaaagtccttttttttcccttaatgttgaattaaaatacttgctcatagttgatttaccattcctacaaaagaggcagaaactttgagcaatctaggttttttttttttttaagttttttctttcttcctctcctgaatacactccccaaaacacccctttccagttacaattagcatcgtgatccaagcagatgccacatggaagaggaatcgccatttactcagaaaaaatgtcccttacaggaaccggcagcagctaggcagtcaccggcccgcctccatccaaaatcacgctcgcgtgcttcggaagcatccgggtcactccttctccgctttttcttgcagatgggcctaggccggtgtcggttctgtttctccccttggctgcctgtacgcccacagccttctggctgcgacattatagaatcggccgtgtcccccctggtgggggattggggatctgtgtttagccatttatatctactttagctgttaaagaggtccaaatgaaaatcaggtgattgtggaaccatggggacttgggggtggggcagaggtgggaacatttgtatcagttgagtcagcttggtggctccctgtggagccagggctgagccttgtcacgcgcactcgccaattaagagatggaccagccagcagtcaagtgcattctccagtccttgcaagaaggatcagccctttctgtgccagcctcgatcgccttgtgctttggtctctttttctcccccccgcctggatcctgcctcgcgcgggccgtcctgttgctgagactcggggtaccgttctgctgacccagctccctttagtcacgtttgcttggctctggtaccaaatagttgggattaccgaagagtccccttccttgcgtgtcagcacggatgctgtgactgccacctgcgtcctcgtcaagtgcccgagctcgccgccgtgtgtgctgcatctctctaagacttagtctgacgccacgcgcatctcttgttctgtgttcaatcagtagtccaggggagaagcttctgctacttcagagctttgctaaactaacctaatttgtccaaatcaccccaaaaccaccatctctgacgtaagcttccatgcgacagcctgatccgtttccctggacaggtctctttcctggaatgcagcccaggcacctgtgctcctggcacccttgaggtctctcctttgagccgtggtcaccgagagggttgaggacgcagcacccgaggtcccagcctttgcaggagcctccctgggcttagctggacttagatcttcggtggcctcatgtaaacgtggcagccagcctcttctagaacccttgcaagaaggatcagccctttctgtgccagcctcgatcgccttgtgctttggtctctttttctcccccccgcctggatcctgcctcgcgcgggccgtcctgttgc

SEQ ID NO: 452718 - DNA, 580 bp, Homo sapiens
ccaagacaactgcaatgccactcatcatgtcagccaccagcgccaacttccagctctggggaggaaagatctcccactggcaaaggtgctctcatgtaaacgtggcagccagcctcttctagaaccctagcccagggactggagcaggaaagggaccttcaaagtgaagactgccttgtcccgcagctccttctggcttagattgaaacatgggcttcctaatgggttaaatcctttaaaacaaggagttgtgggggaagggtgtcgtgcactcctagagaaaggtacacagttgcccggttgggaatgtgcttggcgctgaccctgcgggcatctgactggtcttccagctcaggaaaaagaatttgaaagaggcttagcgtgaaggggaatcaaagaggaggttgtgatttggtcgaaggtgcctggtttagtgctgtaattgtcttattattttttttatatatatatttcttggagtaaacattttaaataaacaacaacattgtctactgtcaaaaaaaaaacacaaaaagacaagaaaagaagttcagggggatttgtagattgttgggttgag

SEQ ID NO: 452719 - DNA, 1782 bp, Homo sapiens
ggaagctcgtatttacattttaagtgtatctggtgagtgggctggagccctcgtctgggccggaaaaaaaaaagccctccgatccgtcttttagttgcttctcttccttttttctctccggtttctcatcactccaaccagccgcgaccatgcccaggaagaaggcggcggcggcggcctgggaggagccgagctcgggcaacggcactgcccgcgccgggcccaggaaacgcggcggcccggcgggcaggaagcgcgagcggcccgagcgctgcagtagcagcagcggcggcggcagcagcggcgacgaggacggcctggagctcgacggggcccccggcgggggcaagcgctgcggcgcggccggcgacagcaggcaaggcgggcggcgcggccgtggtcatcaccgaacccgagcacaccaaggagcgcgtcaaacttgaagggtcaaagtgcaaagggcagcttttgatttttggggcaaccaactgggacttgattggtcgaaaagaagtgcctaaacagcaagctgcttaccgcaatctcggtcagaatttgtgggggccccacagatatgggtgcctggcgggggtccgggtgcggacagtggtctcgggctcgtgtgctgcacacagcctcctcatcaccacggaagggaagctgtggagctggggtcgaaatgagaaggggcagctgggacatggtgacaccaagagagtagaagcccctagactcatcgagggtcttagccacgaagtgattgtgtctgcagcatgtgggcggaaccacaccttggccttgacggaaacgggctccgtgtttgcgtttggggaaaacaagatggggcagctgggccttggcaaccagacagacgctgttcccagccccgcgcagataatgtacaacggccagccaattaccaaaatggcctgtggggctgaattcagtatgataatggactgcaaaggaaacctctattcctttgggtgccctgaatatggtcagctgggacacaactcagatgggaagttcatcgcccgggcacagcggatagagtacgactgtgaactagttccccggcgagtggccatcttcattgagaagacgaaagatggacagattctgcctgtaccaaacgtggttgtacgagacgtggcctgtggcgctaaccacacgctggtcctggactcccagaagcgagtcttctcctggggctttggtggctatggccggctgggccacgcagagcagaaggatgagatggtcccccgcctggtgaagctgtttgacttccctgggcgtggggcttcccagatctatgctggttacacctgctcctttgctgtcagtgaagtgggtggtctgtttttctggggggccaccaacacctcccgtgaatctaccatgtacccaaaagcagtgcaggacctctgcggctggagaatccggagcctggcttgtgggaagagcagcatcattgtggccgccgatgagagcaccatcagctggggtccgtcaccgacctttggggaactgggctacggggaccacaagcccaagtcttccactgcagcccaggaggtaaagactctggatggcattttctcagagcaggtgagtgggggcagctgtgccagctcggggacgtgtccgtacccagtggtatgtcactcctcatgattttgatcatcgcagtctgtttgggttgtcttgtttaccatctcagctggctttcctggtgtctcacgctaagatttgtttgagaggtaacaatcattctgc

SEQ ID NO: 452720 - DNA, 413 bp, Homo sapiens
tatgaactctaactttggtgctgaatatggtagctgacacaactcagatgggaagttcatcgcccgggcacagcggatagagtacgactgtgaactagttccccggcgagtggccatcttcattgagaagacgaaagatggacagattctgcctgtaccaaacgtggttgtacgagacgtggcctgtggcgctaaccacacgctggtcctggactcccagaagcgagtcttctcctggggctttggtggctatggccggctgggccacgcagagcagaaggatgagatggtcccccgcctggtgaagctgtttgacttccctgggcgtggggcttcccagatctatgctggttacacctgctcctttgctgtcagtgaagtgggttagtgatttctgccccctggcttatcag

SEQ ID NO: 452721 - DNA, 4162 bp, Homo sapiens
ggaagctcgtatttacattttaagtgtatctggtgagtgggctggagccctcgtctgggccggaaaaaaaaaagccctccgatccgtcttttagttgcttctcttccttttttctctccggtttctcatcactccaaccagccgcgaccatgcccaggaagaaggcggcggcggcggcctgggaggagccgagctcgggcaacggcactgcccgcgccgggcccaggaaacgcggcggcccggcgggcaggaagcgcgagcggcccgagcgctgcagtagcagcagcggcggcggcagcagcggcgacgaggacggcctggagctcgacggggcccccggcgggggcaagcgctgcggcgcggccggcgacagcaggcaaggcgggcggcgcggccgtggtcatcaccgaacccgagcacaccaaggagcgcgtcaaacttgaagggtcaaagtgcaaagggcagcttttgatttttggggcaaccaactgggacttgattggtcgaaaagaagtgcctaaacagcaagctgcttaccgcaatctcggtcagaatttgtgggggccccacagatatgggtgcctggcgggggtccgggtgcggacagtggtctcgggctcgtgtgctgcacacagcctcctcatcaccacggaagggaagctgtggagctggggtcgaaatgagaaggggcagctgggacatggtgacaccaagagagtagaagcccctagactcatcgagggtcttagccacgaagtgattgtgtctgcagcatgtgggcggaaccacaccttggccttgacggaaacgggctccgtgtttgcgtttggggaaaacaagatggggcagctgggccttggcaaccagacagacgctgttcccagccccgcgcagataatgtacaacggccagccaattaccaaaatggcctgtggggctgaattcagtatgataatggactgcaaaggaaacctctattcctttgggtgccctgaatatggtcagctgggacacaactcagatgggaagttcatcgcccgggcacagcggatagagtacgactgtgaactagttccccggcgagtggccatcttcattgagaagacgaaagatggacagattctgcctgtaccaaacgtggttgtacgagacgtggcctgtggcgctaaccacacgctggtcctggactcccagaagcgagtcttctcctggggctttggtggctatggccggctgggccacgcagagcagaaggatgagatggtcccccgcctggtgaagctgtttgacttccctgggcgtggggcttcccagatctatgctggttacacctgctcctttgctgtcagtgaagtgggtggtctgtttttctggggggccaccaacacctcccgtgaatctaccatgtacccaaaagcagtgcaggacctctgcggctggagaatccggagcctggcttgtgggaagagcagcatcattgtggccgccgatgagagcaccatcagctggggtccgtcaccgacctttggggaactgggctacggggaccacaagcccaagtcttccactgcagcccaggaggtaaagactctggatggcattttctcagagcaggtcgccatgggctactcacactccttggtgatagcaagagatgaaagtgagactgagaaagagaagatcaagaaactgccagaatacaacccccgaaccctctgatgctcccggagactcctccgactccacacctctcgcggcagctgtcatttccatgtgcactgggacgggaagtcaaacgaggaatttaaaaaagcaaaagttgaccgaaggtgcatttttgtttagactccctgaggttccgttttacacatgatccaacgttaactacctttttttctgtatgctttccaaagtccttttttttcccttaatgttgaattaaaatacttgctcatagttgatttaccattcctacaaaagaggcagaaactttgagcaatctaggttttttttttttttaagttttttctttcttcctctcctgaatacactccccaaaacacccctttccagttacaattagcatcgtgatccaagcagatgccacatggaagaggaatcgccatttactcagaaaaaatgtcccttacaggaaccggcagcagctaggcagtcaccggcccgcctccatccaaaatcacgctcgcgtgcttcggaagcatccgggtcactccttctccgctttttcttgcagatgggcctaggccggtgtcggttctgtttctccccttggctgcctgtacgcccacagccttctggctgcgacattatagaatcggccgtgtcccccctggtgggggattggggatctgtgtttagccatttatatctactttagctgttaaagaggtccaaatgaaaatcaggtgattgtggaaccatggggacttgggggtggggcagaggtgggaacatttgtatcagttgagtcagcttggtggctccctgtggagccagggctgagccttgtcacgcgcactcgccaattaagagatggaccagccagcagtcaagtgcattctccagtccttgcaagaaggatcagccctttctgtgccagcctcgatcgccttgtgctttggtctctttttctcccccccgcctggatcctgcctcgcgcgggccgtcctgttgctgagactcggggtaccgttctgctgacccagctccctttagtcacgtttgcttggctctggtaccaaatagttgggattaccgaagagtccccttccttgcgtgtcagcacggatgctgtgactgccacctgcgtcctcgtcaagtgcccgagctcgccgccgtgtgtgctgcgctgagtgagttatgaggtgcctttcccggaaccctcctctcgcctggacccaagagaggcgacagctgtggctggggctcttggtttccagagggtctggactggtttgggtgctttaaaatagatatttagttcagtggtgcttatgggggagatgggactagaacttaagtgtgagacttgggtggatgggaaagttaaatattggtctcttcaagtttttttttcttttgctttgttaccacttgtcactgtctccatgttaaaatgccaaaaatgatgtagttgttgttgcttttttccctattttccaccccagtcgctccttaccgtgactcctgcccttggagggcatgtagcagtgtctgtcctgccagtcccaaggccctgtgggaggagactggcctgcatctctctaagacttagtctgacgccacgcgcatctcttgttctgtgttcaatcagtagtccaggggagaagcttctgctacttcagagctttgctaaactaacctaatttgtccaaatcaccccaaaaccaccatctctgacgtaagcttccatgcgacagcctgatccgtttccctggacaggtctctttcctggaatgcagcccaggcacctgtgctcctggcacccttgaggtctctcctttgagccgtggtcaccgagagggttgaggacgcagcacccgaggtcccagcctttgcaggagcctccctgggcttagctggacttagatcttcggtggcctcatgtaaacgtggcagccagcctcttctagaaccctagcccagggactggagcaggaaagggaccttcaaagtgaagactgccttgtcccgcagctccttctggcttagattgaaacatgggcttcctaatgggttaaatcctttaaaacaaggagttgtgggggaagggtgtcgtgcactcctagagaaaggtacacagttgcccggttgggaatgtgcttggcgctgaccctgcgggcatctgactggtcttccagctcaggaaaaagaatttgaaagaggcttagcgtgaaggggaatcaaagaggaggttgtgatttggtcgaaggtgcctggtttagtgctgtaattgtcttattattttttttatatatatatttcttggagtaaacattttaaataaacaacaacattgtctactgtcaaaactcgtcgggggttccgttacccaattccccctataggggggcgcattacacttccttgggcgtcgttttcactctcttgactgggaaacctctggcttacccaccttacg

SEQ ID NO: 452722 - DNA, 3079 bp, Homo sapiens
tctggtgcggaaccgtgtagccattgtcctgtccctagaccacgaaccccaattctctttacctcccagtgttctttatttttttgagacaggaactcgttgtgttgtccaggccggtgtcgaactcctgggctcaagcagtcctaccaccacagcgtcctgagtagctaggactgcacgggcacgccaccacgcctggctccagttatcttttagacagaacacttgtttgccatcccgtcctcttttcaccctgataatactgaagatgagactcagctctcgatgtctggtcacgctgggaacatgttttgtcttcccttaggtggtctgtttttctggggggccaccaacacctcccgtgaatctaccatgtacccaaaagcagtgcaggacctctgcggctggagaatccggagcctggcttgtgggaagagcagcatcattgtggccgccgatgagagcaccatcagctggggtccgtcaccgacctttggggaactgggctacggggaccacaagcccaagtcttccactgcagcccaggaggtaaagactctggatggcattttctcagagcaggtcgccatgggctactcacactccttggtgatagcaagagatgaaagtgagactgagaaagagaagatcaagaaactgccagaatacaacccccgaaccctctgatgctcccggagactcctccgactccacacctctcgcggcagctgtcatttccatgtgcactgggacgggaagtcaaacgaggaatttaaaaaagcaaaagttgaccgaaggtgcatttttgtttagactccctgaggttccgttttacacatgatccaacgttaactacctttttttctgtatgctttccaaagtccttttttttcccttaatgttgaattaaaatacttgctcatagttgatttaccattcctacaaaagaggcagaaactttgagcaatctaggttttttttttttttaagttttttctttcttcctctcctgaatacactccccaaaacacccctttccagttacaattagcatcgtgatccaagcagatgccacatggaagaggaatcgccatttactcagaaaaaatgtcccttacaggaaccggcagcagctaggcagtcaccggcccgcctccatccaaaatcacgctcgcgtgcttcggaagcatccgggtcactccttctccgctttttcttgcagatgggcctaggccggtgtcggttctgtttctccccttggctgcctgtacgcccacagccttctggctgcgacattatagaatcggccgtgtcccccctggtgggggattggggatctgtgtttagccatttatatctactttagctgttaaagaggtccaaatgaaaatcaggtgattgtggaaccatggggacttgggggtggggcagaggtgggaacatttgtatcagttgagtcagcttggtggctccctgtggagccagggctgagccttgtcacgcgcactcgccaattaagagatggaccagccagcagtcaagtgcattctccagtccttgcaagaaggatcagccctttctgtgccagcctcgatcgccttgtgctttggtctctttttctcccccccgcctggatcctgcctcgcgcgggccgtcctgttgctgagactcggggtaccgttctgctgacccagctccctttagtcacgtttgcttggctctggtaccaaatagttgggattaccgaagagtccccttccttgcgtgtcagcacggatgctgtgactgccacctgcgtcctcgtcaagtgcccgagctcgccgccgtgtgtgctgcgctgagtgagttatgaggtgcctttcccggaaccctcctctcgcctggacccaagagaggcgacagctgtggctggggctcttggtttccagagggtctggactggtttgggtgctttaaaatagatatttagttcagtggtgcttatgggggagatgggactagaacttaagtgtgagacttgggtggatgggaaagttaaatattggtctcttcaagtttttttttcttttgctttgttaccacttgtcactgtctccatgttaaaatgccaaaaatgatgtagttgttgttgcttttttccctattttccaccccagtcgctccttaccgtgactcctgcccttggagggcatgtagcagtgtctgtcctgccagtcccaaggccctgtgggaggagactggcctgcatctctctaagacttagtctgacgccacgcgcatctcttgttctgtgttcaatcagtagtccaggggagaagcttctgctacttcagagctttgctaaactaacctaatttgtccaaatcaccccaaaaccaccatctctgacgtaagcttccatgcgacagcctgatccgtttccctggacaggtctctttcctggaatgcagcccaggcacctgtgctcctggcacccttgaggtctctcctttgagccgtggtcaccgagagggttgaggacgcagcacccgaggtcccagcctttgcaggagcctccctgggcttagctggacttagatcttcggtggcctcatgtaaacgtggcagccagcctcttctagaaccctagcccagggactggagcaggaaagggaccttcaaagtgaagactgccttgtcccgcagctccttctggcttagattgaaacatgggcttcctaatgggttaaatcctttaaaacaaggagttgtgggggaagggtgtcgtgcactcctagagaaaggtacacagttgcccggttgggaatgtgcttggcgctgaccctgcgggcatctgactggtcttccagctcaggaaaaagaatttgaaagaggcttagcgtgaaggggaatcaaagaggaggttgtgatttggtcgaaggtgcctggtttagtgctgtaattgtcttattattttttttatatatatatttcttggagtaaacattttaaataaacaacaacattgtctactgtcaaaaaaaaaacacaaaaagacaagaaaagaagttcagggggatttgtagattgttgggttgag

SEQ ID NO: 452723 - DNA, 3686 bp, Homo sapiens
ggaagctcgtatttacattttaagtgtatctggtgagtgggctggagccctcgtctgggccggaaaaaaaaaagccctccgatccgtcttttagttgcttctcttccttttttctctccggtttctcatcactccaaccagccgcgaccatgcccaggaagaaggcggcggcggcggcctgggaggagccgagctcgggcaacggcactgcccgcgccgggcccaggaaacgcggcggcccggcgggcaggaagcgcgagcggcccgagcgctgcagtagcagcagcggcggcggcagcagcggcgacgaggacggcctggagctcgacggggcccccggcgggggcaagcgctgcggcgcggccggcgacagcaggcaaggcgggcggcgcggccgtggtcatcaccgaacccgagcacaccaaggagcgcgtcaaacttgaagggtcaaagtgcaaagggcagcttttgatttttggggcaaccaactgggacttgattggtcgaaaagaagtgcctaaacagcaagctgcttaccgcaatctcggtcagaatttgtgggggccccacagatatgggtgcctggcgggggtccgggtgcggacagtggtctcgggctcgtgtgctgcacacagcctcctcatcaccacggaagggaagctgtggagctggggtcgaaatgagaaggggcagctgggacatggtgacaccaagagagtagaagcccctagactcatcgagggtcttagccacgaagtgattgtgtctgcagcatgtgggcggaaccacaccttggccttgacggaaacgggctccgtgtttgcgtttggggaaaacaagatggggcagctgggccttggcaaccagacagacgctgttcccagccccgcgcagataatgtacaacggccagccaattaccaaaatggcctgtggggctgaattcagtatgataatggactgcaaaggaaacctctattcctttgggtgccctgaatatggtcagctgggacacaactcagatgggaagttcatcgcccgggcacagcggatagagtacgactgtgaactagttccccggcgagtggccatcttcattgagaagacgaaagatggacagattctgcctgtaccaaacgtggttgtacgagacgtggcctgtggcgctaaccacacgctggtcctggactcccagaagcgagtcttctcctggggctttggtggctatggccggctgggccacgcagagcagaaggatgagatggtcccccgcctggtgaagctgtttgacttccctgggcgtggggcttcccagatctatgctggttacacctgctcctttgctgtcagtgaagtgggtggtctgtttttctggggggccaccaacacctcccgtgaatctaccatgtacccaaaagcagtgcaggacctctgcggctggagaatccggagcctggcttgtgggaagagcagcatcattgtggccgccgatgagagcaccatcagctggggtccgtcaccgacctttggggaactgggctacggggaccacaagcccaagtcttccactgcagcccaggaggtaaagactctggatggcattttctcagagcaggtcgccatgggctactcacactccttggtgatagcaagagatgaaagtgagactgagaaagagaagatcaagaaactgccagaatacaacccccgaaccctctgatgctcccggagactcctccgactccacacctctcgcggcagctgtcatttccatgtgcactgggacgggaagtcaaacgaggaatttaaaaaagcaaaagttgaccgaagatgggcctaggccggtgtcggttctgtttctccccttggctgcctgtacgcccacagccttctggctgcgacattatagaatcggccgtgtcccccctggtgggggattggggatctgtgtttagccatttatatctactttagctgttaaagaggtccaaatgaaaatcaggtgattgtggaaccatggggacttgggggtggggcagaggtgggaacatttgtatcagttgagtcagcttggtggctccctgtggagccagggctgagccttgtcacgcgcactcgccaattaagagatggaccagccagcagtcaagtgcattctccagtccttgcaagaaggatcagccctttctgtgccagcctcgatcgccttgtgctttggtctctttttctcccccccgcctggatcctgcctcgcgcgggccgtcctgttgctgagactcggggtaccgttctgctgacccagctccctttagtcacgtttgcttggctctggtaccaaatagttgggattaccgaagagtccccttccttgcgtgtcagcacggatgctgtgactgccacctgcgtcctcgtcaagtgcccgagctcgccgccgtgtgtgctgcgctgagtgagttatgaggtgcctttcccggaaccctcctctcgcctggacccaagagaggcgacagctgtggctggggctcttggtttccagagggtctggactggtttgggtgctttaaaatagatatttagttcagtggtgcttatgggggagatgggactagaacttaagtgtgagacttgggtggatgggaaagttaaatattggtctcttcaagtttttttttcttttgctttgttaccacttgtcactgtctccatgttaaaatgccaaaaatgatgtagttgttgttgcttttttccctattttccaccccagtcgctccttaccgtgactcctgcccttggagggcatgtagcagtgtctgtcctgccagtcccaaggccctgtgggaggagactggcctgcatctctctaagacttagtctgacgccacgcgcatctcttgttctgtgttcaatcagtagtccaggggagaagcttctgctacttcagagctttgctaaactaacctaatttgtccaaatcaccccaaaaccaccatctctgacgtaagcttccatgcgacagcctgatccgtttccctggacaggtctctttcctggaatgcagcccaggcacctgtgctcctggcacccttgaggtctctcctttgagccgtggtcaccgagagggttgaggacgcagcacccgaggtcccagcctttgcaggagcctccctgggcttagctggacttagatcttcggtggcctcatgtaaacgtggcagccagcctcttctagaaccctagcccagggactggagcaggaaagggaccttcaaagtgaagactgccttgtcccgcagctccttctggcttagattgaaacatgggcttcctaatgggttaaatcctttaaaacaaggagttgtgggggaagggtgtcgtgcactcctagagaaaggtacacagttgcccggttgggaatgtgcttggcgctgaccctgcgggcatctgactggtcttccagctcaggaaaaagaatttgaaagaggcttagcgtgaaggggaatcaaagaggaggttgtgatttggtcgaaggtgcctggtttagtgctgtaattgtcttattattttttttatatatatatttcttggagtaaacattttaaataaacaacaacattgtctactgtcaaaaaaaaaacacaaaaagacaagaaaagaagttcagggggatttgtagattgttgggttgag

SEQ ID NO: 452724 - DNA, 4444 bp, Homo sapiens
ggaagctcgtatttacattttaagtgtatctggtgagtgggctggagccctcgtctgggccggaaaaaaaaaagccctccgatccgtcttttagttgcttctcttccttttttctctccggtttctcatcactccaaccagccgcgaccatgcccaggaagaaggcggcggcggcggcctgggaggagccgagctcgggcaacggcactgcccgcgccgggcccaggaaacgcggcggcccggcgggcaggaagcgcgagcggcccgagcgctgcagtagcagcagcggcggcggcagcagcggcgacgaggacggcctggagctcgacggggcccccggcgggggcaagcgctgcggcgcggccggcgacagcaggcaaggcgggcggcgcggccgtggtcatcaccgaacccgagcacaccaaggagcgcgtcaaacttgaagggtcaaagtgcaaagggcagcttttgatttttggggcaaccaactgggacttgattggtcgaaaagaagtgcctaaacagcaagctgcttaccgcaatctcggtcagaatttgtgggggccccacagatatgggtgcctggcgggggtccgggtgcggacagtggtctcgggctcgtgtgctgcacacagcctcctcatcaccacggaagggaagctgtggagctggggtcgaaatgagaaggggcagctgggacatggtgacaccaagagagtagaagcccctagactcatcgagggtcttagccacgaagtgattgtgtctgcagcatgtgggcggaaccacaccttggccttgacggaaacgggctccgtgtttgcgtttggggaaaacaagatggggcagctgggccttggcaaccagacagacgctgttcccagccccgcgcagataatgtacaacggccagccaattaccaaaatggcctgtggggctgaattcagtatgataatggactgcaaaggaaacctctattcctttgggtgccctgaatatggtcagctgggacacaactcagatgggaagttcatcgcccgggcacagcggatagagtacgactgtgaactagttccccggcgagtggccatcttcattgagaagacgaaagatggacagattctgcctgtaccaaacgtggttgtacgagacgtggcctgtggcgctaaccacacgctggtcctggactcccagaagcgagtcttctcctggggctttggtggctatggccggctgggccacgcagagcagaaggatgagatggtcccccgcctggtgaagctgtttgacttccctgggcgtggggcttcccagatctatgctggttacacctgctcctttgctgtcagtgaagtgggtggtctgtttttctggggggccaccaacacctcccgtgaatctaccatgtacccaaaagcagtgcaggacctctgcggctggagaatccggagcctggcttgtgggaagagcagcatcattgtggccgccgatgagagcaccatcagctggggtccgtcaccgacctttggggaactgggctacggggaccacaagcccaagtcttccactgcagcccaggaggtaaagactctggatggcattttctcagagcaggtcgccatgggctactcacactccttggtgatagcaagagatgaaagtgagactgagaaagagaagatcaagaaactgccagaatacaacccccgaaccctctgatgctcccggagactcctccgactccacacctctcgcggcagctgtcatttccatgtgcactgggacgggaagtcaaacgaggaatttaaaaaagcaaaagttgaccgaaggtgcatttttgtttagactccctgaggttccgttttacacatgatccaacgttaactacctttttttctgtatgctttccaaagtccttttttttcccttaatgttgaattaaaatacttgctcatagttgatttaccattcctacaaaagaggcagaaactttgagcaatctaggttttttttttttttaagttttttctttcttcctctcctgaatacactccccaaaacacccctttccagttacaattagcatcgtgatccaagcagatgccacatggaagaggaatcgccatttactcagaaaaaatgtcccttacaggaaccggcagcagctaggcagtcaccggcccgcctccatccaaaatcacgctcgcgtgcttcggaagcatccgggtcactccttctccgctttttcttgcagatgggcctaggccggtgtcggttctgtttctccccttggctgcctgtacgcccacagccttctggctgcgacattatagaatcggccgtgtcccccctggtgggggattggggatctgtgtttagccatttatatctactttagctgttaaagaggtccaaatgaaaatcaggtgattgtggaaccatggggacttgggggtggggcagaggtgggaacatttgtatcagttgagtcagcttggtggctccctgtggagccagggctgagccttgtcacgcgcactcgccaattaagagatggaccagccagcagtcaagtgcattctccagtccttgcaagaaggatcagccctttctgtgccagcctcgatcgccttgtgctttggtctctttttctcccccccgcctggatcctgcctcgcgcgggccgtcctgttgctgagactcggggtaccgttctgctgacccagctccctttagtcacgtttgcttggctctggtaccaaatagttgggattaccgaagagtccccttccttgcgtgtcagcacggatgctgtgactgccacctgcgtcctcgtcaagtgcccgagctcgccgccgtgtgtgctgcgctgagtgagttatgaggtgcctttcccggaaccctcctctcgcctggacccaagagaggcgacagctgtggctggggctcttggtttccagagggtctggactggtttgggtgctttaaaatagatatttagttcagtggtgcttatgggggagatgggactagaacttaagtgtgagacttgggtggatgggaaagttaaatattggtctcttcaagtttttttttcttttgctttgttaccacttgtcactgtctccatgttaaaatgccaaaaatgatgtagttgttgttgcttttttccctattttccaccccagtcgctccttaccgtgactcctgcccttggagggcatgtagcagtgtctgtcctgccagtcccaaggccctgtgggaggagactggcctgcatctctctaagacttagtctgacgccacgcgcatctcttgttctgtgttcaatcagtagtccaggggagaagcttctgctacttcagagctttgctaaactaacctaatttgtccaaatcaccccaaaaccaccatctctgacgtaagcttccatgcgacagcctgatccgtttccctggacaggtctctttcctggaatgcagcccaggcacctgtgctcctggcacccttgaggtctctcctttgagccgtggtcaccgagagggttgaggacgcagcacccgaggtcccagcctttgcaggagcctccctgggcttagctggacttagatcttcggtggcctcatgtaaacgtggcagccagcctcttctagaaccctagcccagggactggagcaggaaagggaccttcaaagtgaagactgccttgtcccgcagctccttctggcttagattgaaacatgggcttcctaatgggttaaatcctttaaaacaaggagttgtgggggaagggtgtcgtgcactcctagagaaaggtacacagttgcccggttgggaatgtgcttggcgctgaccctgcgggcatctgactggtcttccagctcaggaaaaagaatttgaaagaggcttagcgtgaaggggaatcaaagaggaggttgtgatttggtcgaaggtgcctggtttagtgctgtaattgtcttattattttttttatatatatatttcttggagtaaacattttaaataaaaaaaaaaaaaaaaaaaaaaaaaaaaaaaaaaaaaaaaaaaaaaaaaaaaaaaaaaaaaaaaaaaaaaaaaaagagagagggagagagaagaaaaaaaaaaaaaaaaaaaaaaaaaagtgggtggggccgccgcagcgccggccccaaagaagaagcgtcactacaacaacatcgtgtggggggggggcggagcgcaacacgagaagtagagcaacacgggaaaagaggtgtctcgaaagagagcacagcgggggcaaaagaggggggggggtcactccacacaaaaaaaagcgcgcggggggaacaacagagagagttgtgaagaaaaactagcaggagagatggagggggaaatgcggagggttttcaagagagaggatccagagcagcgcaaaaaaaaaacccgcgggggggac

SEQ ID NO: 452725 - DNA, 3984 bp, Homo sapiens
ggaagctcgtatttacattttaagtgtatctggtgagtgggctggagccctcgtctgggccggaaaaaaaaaagccctccgatccgtcttttagttgcttctcttccttttttctctccggtttctcatcactccaaccagccgcgaccatgcccaggaagaaggcggcggcggcggcctgggaggagccgagctcgggcaacggcactgcccgcgccgggcccaggaaacgcggcggcccggcgggcaggaagcgcgagcggcccgagcgctgcagtagcagcagcggcggcggcagcagcggcgacgaggacggcctggagctcgacggggcccccggcgggggcaagcgctgcggcgcggccggcgacagcaggcaaggcgggcggcgcggccgtggtcatcaccgaacccgagcacaccaaggagcgcgtcaaacttgaagggtcaaagtgcaaagggcagcttttgatttttggggcaaccaactgggacttgattggtcgaaaagaagtgcctaaacagcaagctgcttaccgcaatctcggtcagaatttgtgggggccccacagatatgggtgcctggcgggggtccgggtgcggacagtggtctcgggctcgtgtgctgcacacagcctcctcatcaccacggaagggaagctgtggagctggggtcgaaatgagaaggggcagctgggacatggtgacaccaagagagtagaagcccctagactcatcgagggtcttagccacgaagtgattgtgtctgcagcatgtgggcggaaccacaccttggccttgacggaaacgggctccgtgtttgcgtttggggaaaacaagatggggcagctgggccttggcaaccagacagacgctgttcccagccccgcgcagataatgtacaacggccagccaattaccaaaatggcctgtggggctgaattcagtatgataatggactgcaaaggaaacctctattcctttgggtgccctgaatatggtcagctgggacacaactcagatgggaagttcatcgcccgggcacagcggatagagtacgactgtgaactagttccccggcgagtggccatcttcattgagaagacgaaagatggacagattctgcctgtaccaaacgtggttgtacgagacgtggcctgtggcgctaaccacacgctggtcctggactcccagaagcgagtcttctcctggggctttggtggctatggccggctgggccacgcagagcagaaggatgagatggtcccccgcctggtgaagctgtttgacttccctgggcgtggggcttcccagatctatgctggttacacctgctcctttgctgtcagtgaagtgggtggtctgtttttctggggggccaccaacacctcccgtgaatctaccatgtacccaaaagcagtgcaggacctctgcggctggagaatccggagcctggcttgtgggaagagcagcatcattgtggccgccgatgagagcaccatcagctggggtccgtcaccgacctttggggaactgggctacggggaccacaagcccaagtcttccactgcagcccaggaggtaaagactctggatggcattttctcagagcaggtcgccatgggctactcacactccttggtgatagcaagagatgaaagtgagactgagaaagagaagatcaagaaactgccagaatacaacccccgaaccctctgatgctcccggagactcctccgactccacacctctcgcggcagctgtcatttccatgtgcactgggacgggaagtcaaacgaggaatttaaaaaagcaaaagttgaccgaaggtgcatttttgtttagactccctgaggttccgttttacacatgatccaacgttaactacctttttttctgtatgctttccaaagtccttttttttcccttaatgttgaattaaaatacttgctcatagttgatttaccattcctacaaaagaggcagaaactttgagcaatctaggttttttttttttttaagttttttctttcttcctctcctgaatacactccccaaaacacccctttccagttacaattagcatcgtgatccaagcagatgccacatggaagaggaatcgccatttactcagaaaaaatgtcccttacaggaaccggcagcagctaggcagtcaccggcccgcctccatccaaaatcacgctcgcgtgcttcggaagcatccgggtcactccttctccgctttttcttgcagatgggcctaggccggtgtcggttctgtttctccccttggctgcctgtacgcccacagccttctggctgcgacattatagaatcggccgtgtcccccctggtgggggattggggatctgtgtttagccatttatatctactttagctgttaaagaggtccaaatgaaaatcaggtgattgtggaaccatggggacttgggggtggggcagaggtgggaacatttgtatcagttgagtcagcttggtggctccctgtggagccagggctgagccttgtcacgcgcactcgccaattaagagatggaccagccagcagtcaagtgcattctccagtccttgcaagaaggatcagccctttctgtgccagcctcgatcgccttgtgctttggtctctttttctcccccccgcctggatcctgcctcgcgcgggccgtcctgttgctgagactcggggtaccgttctgctgacccagctccctttagtcacgtttgcttggctctggtaccaaatagttgggattaccgaagagtccccttccttgcgtgtcagcacggatgctgtgactgccacctgcgtcctcgtcaagtgcccgagctcgccgccgtgtgtgctgcgctgagtgagttatgaggtgcctttcccggaaccctcctctcgcctggacccaagagaggcgacagctgtggctggggctcttggtttccagagggtctggactggtttgggtgctttaaaatagatatttagttcagtggtgcttatgggggagatgggactagaacttaagtgtgagacttgggtggatgggaaagttaaatattggtctcttcaagtttttttttcttttgctttgttaccacttgtcactgtctccatgttaaaatgccaaaaatgatgtagttgttgttgcttttttccctattttccaccccagtcgctccttaccgtgactcctgcccttggagggcatgtagcagtgtctgtcctgccagtcccaaggccctgtgggaggagactggcctgcatctctctaagacttagtctgacgccacgcgcatctcttgttctgtgttcaatcagtagtccaggggagaagcttctgctacttcagagctttgctaaactaacctaatttgtccaaatcaccccaaaaccaccatctctgacgtaagcttccatgcgacagcctgatccgtttccctggacaggtctctttcctggaatgcagcccaggcacctgtgctcctggcacccttgaggtctctcctcatgtaaacgtggcagccagcctcttctagaaccctagcccagggactggagcaggaaagggaccttcaaagtgaagactgccttgtcccgcagctccttctggcttagattgaaacatgggcttcctaatgggttaaatcctttaaaacaaggagttgtgggggaagggtgtcgtgcactcctagagaaaggtacacagttgcccggttgggaatgtgcttggcgctgaccctgcgggcatctgactggtcttccagctcaggaaaaagaatttgaaagaggcttagcgtgaaggggaatcaaagaggaggttgtgatttggtcgaaggtgcctggtttagtgctgtaattgtcttattattttttttatatatatatttcttggagtaaacattttaaataaacaacaacattgtctactgtcataaaaacaacatcaaaaacaaacaaacaaaaaaaaa

SEQ ID NO: 452726 - DNA, 1599 bp, Homo sapiens
  misc_feature (2)..(2): n is a, c, g, or t
tnaggctaggtacgaggctgggtgttgaatcggccgaggagatggaccagccagcagtcaagtgcattctccagtccttgcaagaaggatcagccctttctgtgccagcctcgatcgccttgtgctttggtctctttttctcccccccgcctggatcctgcctcgcgcgggccgtcctgttgctgagactcggggtaccgttctgctgacccagctccctttagtcacgtttgcttggctctggtaccaaatagttgggattaccgaagagtccccttccttgcgtgtcagcacggatgctgtgactgccacctgcgtcctcgtcaagtgcccgagctcgccgccgtgtgtgctgcgctgagtgagttatgaggtgcctttcccggaaccctcctctcgcctggacccaagagaggcgacagctgtggctggggctcttggtttccagagggtctggactggtttgggtgctttaaaatagatatttagttcagtggtgcttatgggggagatgggactagaacttaagtgtgagacttgggtggatgggaaagttaaatattggtctcttcaagtttttttttcttttgctttgttaccacttgtcactgtctccatgttaaaatgccaaaaatgatgtagttgttgttgcttttttccctattttccaccccagtcgctccttaccgtgactcctgcccttggagggcatgtagcagtgtctgtcctgccagtcccaaggccctgtgggaggagactggcctgcatctctctaagacttagtctgacgccacgcgcatctcttgttctgtgttcaatcagtagtccaggggagaagcttctgctacttcagagctttgctaaactaacctaatttgtccaaatcaccccaaaaccaccatctctgacgtaagcttccatgcgacagcctgatccgtttccctggacaggtctctttcctggaatgcagcccaggcacctgtgctcctggcacccttgaggtctctcctttgagccgtggtcaccgagagggttgaggacgcagcacccgaggtcccagcctttgcaggagcctccctgggcttagctggacttagatcttcggtggcctcatgtaaacgtggcagccagcctcttctagaaccctagcccagggactggagcaggaaagggaccttcaaagtgaagactgccttgtcccgcagctccttctggcttagattgaaacatgggcttcctaatgggttaaatcctttaaaacaaggagttgtgggggaagggtgtcgtgcactcctagagaaaggtacacagttgcccggttgggaatgtgcttggcgctgaccctgcgggcatctgactggtcttccagctcaggaaaaagaatttgaaagaggcttagcgtgaaggggaatcaaagaggaggttgtgatttggtcgaaggtgcctggtttagtgctgtaattgtcttattattttttttatatatatatttcttggagtaaacattttaaataaacaacaacattgtctactgtcaaaaaaaaaacacaaaaagacaagaaaagaagttcagggggatttgtagattgttgggttgag

SEQ ID NO: 452727 - DNA, 1517 bp, Homo sapiens
ccgaaaaaactaggctaggtgggccggtggtaatggccgaggctttggtctctttttctcccccccgcctggatcctgcctcgcgcgggccgtcctgttgctgagactcggggtaccgttctgctgacccagctccctttagtcacgtttgcttggctctggtaccaaatagttgggattaccgaagagtccccttccttgcgtgtcagcacggatgctgtgactgccacctgcgtcctcgtcaagtgcccgagctcgccgccgtgtgtgctgcgctgagtgagttatgaggtgcctttcccggaaccctcctctcgcctggacccaagagaggcgacagctgtggctggggctcttggtttccagagggtctggactggtttgggtgctttaaaatagatatttagttcagtggtgcttatgggggagatgggactagaacttaagtgtgagacttgggtggatgggaaagttaaatattggtctcttcaagtttttttttcttttgctttgttaccacttgtcactgtctccatgttaaaatgccaaaaatgatgtagttgttgttgcttttttccctattttccaccccagtcgctccttaccgtgactcctgcccttggagggcatgtagcagtgtctgtcctgccagtcccaaggccctgtgggaggagactggcctgcatctctctaagacttagtctgacgccacgcgcatctcttgttctgtgttcaatcagtagtccaggggagaagcttctgctacttcagagctttgctaaactaacctaatttgtccaaatcaccccaaaaccaccatctctgacgtaagcttccatgcgacagcctgatccgtttccctggacaggtctctttcctggaatgcagcccaggcacctgtgctcctggcacccttgaggtctctcctttgagccgtggtcaccgagagggttgaggacgcagcacccgaggtcccagcctttgcaggagcctccctgggcttagctggacttagatcttcggtggcctcatgtaaacgtggcagccagcctcttctagaaccctagcccagggactggagcaggaaagggaccttcaaagtgaagactgccttgtcccgcagctccttctggcttagattgaaacatgggcttcctaatgggttaaatcctttaaaacaaggagttgtgggggaagggtgtcgtgcactcctagagaaaggtacacagttgcccggttgggaatgtgcttggcgctgaccctgcgggcatctgactggtcttccagctcaggaaaaagaatttgaaagaggcttagcgtgaaggggaatcaaagaggaggttgtgatttggtcgaaggtgcctggtttagtgctgtaattgtcttattattttttttatatatatatttcttggagtaaacattttaaataaacaacaacattgtctactgtcaaaaaaaaaacacaaaaagacaagaaaagaagttcagggggatttgtagattgttgggttgag

SEQ ID NO: 452728 - DNA, 3580 bp, Homo sapiens
ggaagctcgtatttacattttaagtgtatctggtgagtgggctggagccctcgtctgggccggaaaaaaaaaagccctccgatccgtcttttagttgcttctcttccttttttctctccggtttctcatcactccaaccagccgcgaccatgcccaggaagaaggcggcggcggcggcctgggaggagccgagctcgggcaacggcactgcccgcgccgggcccaggaaacgcggcggcccggcgggcaggaagcgcgagcggcccgagcgctgcagtagcagcagcggcggcggcagcagcggcgacgaggacggcctggagctcgacggggcccccggcgggggcaagcgctgcggcgcggccggcgacagcaggcaaggcgggcggcgcggccgtggtcatcaccgaacccgagcacaccaaggagcgcgtcaaacttgaagggtcaaagtgcaaagggcagcttttgatttttggggcaaccaactgggacttgattggtcgaaaagaagtgcctaaacagcaagctgcttaccgcaatctcggtcagaatttgtgggggccccacagatatgggtgcctggcgggggtccgggtgcggacagtggtctcgggctcgtgtgctgcacacagcctcctcatcaccacggaagggaagctgtggagctggggtcgaaatgagaaggggcagctgggacatggtgacaccaagagagtagaagcccctagactcatcgagggtcttagccacgaagtgattgtgtctgcagcatgtgggcggaaccacaccttggccttgacggaaacgggctccgtgtttgcgtttggggaaaacaagatggggcagctgggccttggcaaccagacagacgctgttcccagccccgcgcagataatgtacaacggccagccaattaccaaaatggcctgtggggctgaattcagtatgataatggactgcaaaggaaacctctattcctttgggtgccctgaatatggtcagctgggacacaactcagatgggaagttcatcgcccgggcacagcggatagagtacgactgtgaactagttccccggcgagtggccatcttcattgagaagacgaaagatggacagattctgcctgtaccaaacgtggttgtacgagacgtggcctgtggcgctaaccacacgctggtcctggactcccagaagcgagtcttctcctggggctttggtggctatggccggctgggccacgcagagcagaaggatgagatggtcccccgcctggtgaagctgtttgacttccctgggcgtggggcttcccagatctatgctggttacacctgctcctttgctgtcagtgaagtgggtggtctgtttttctggggggccaccaacacctcccgtgaatctaccatgtacccaaaagcagtgcaggacctctgcggctggagaatccggagcctggcttgtgggaagagcagcatcattgtggccgccgatgagagcaccatcagctggggtccgtcaccgacctttggggaactgggctacggggaccacaagcccaagtcttccactgcagcccaggaggtaaagactctggatggcattttctcagagcaggtcgccatgggctactcacactccttggtgatagcaagagatgaaagtgagactgagaaagagaagatcaagaaactgccagaatacaacccccgaaccctctgatgctcccggagactcctccgactccacacctctcgcggcagctgtcatttccatgtgcactgggacgggaagtcaaacgaggaatttaaaaaagcaaaagttgaccgaaggtgcatttttgtttagactccctgaggttccgttttacacatgatccaacgttaactacctttttttctgtatgctttccaaagtccttttttttcccttaatgttgaattaaaatacttgctcatagttgatttaccattcctacaaaagaggcagaaactttgagcaatctaggttttttttttttttaagttttttctttcttcctctcctgaatacactccccaaaacacccctttccagttacaattagcatcgtgatccaagcagatgccacatggaagaggaatcgccatttactcagaaaaaatgtcccttacaggaaccggcagcagctaggcagtcaccggcccgcctccatccaaaatcacgctcgcgtgcttcggaagcatccgggtcactccttctccgctttttcttgcagatgggcctaggccggtgtcggttctgtttctccccttggctgcctgtacgcccacagccttctggctgcgacattatagaatcggccgtgtcccccctggtgggggattggggatctgtgtttagccatttatatctactttagctgttaaagaggtccaaatgaaaatcaggtgattgtggaaccatggggacttgggggtggggcagaggtgggaacatttgtatcagttgagtcagcttggtggctccctgtggagccagggctgagccttgtcacgcgcactcgccaattaagagatggaccagccagcagtcaagtgcattctccagtccttgcaagaaggatcagccctttctgtgccagcctcgatcgccttgtgctttggtctctttttctcccccccgcctggatcctgcctcgcgcgggccgtcctgttgctgagactcggggtaccgttctgctgacccagctccctttagtcacgtttgcttggctctggtaccaaatagttgggattaccgaagagtccccttccttgcgtgtcagcacggatgctgtgactgccacctgcgtcctcgtcaagtgcccgagctcgccgccgtgtgtgctgcgctgagtgagttatgaggtgcctttcccggaaccctcctctcgcctggacccaagagaggcgacagctgtggctggggctcttggtttccagagggtctggactggtttgggtgctttaaaatagatatttagttcagtggtgcttatgggggagatgggactagaacttaagtgtgagacttgggtggatgggaaagttaaatattggtctcttcaagtttttttttcttttgctttgttaccacttgtcactgtctccatgttaaaatgccaaaaatgatgtagttgttgttgcttttttccctattttccaccccagtcgctccttaccgtgactcctgcccttggagggcatgtagcagtgtctgtcctgccagtcccaaggccctgtgggaggagactggcctgcatctctctaagacttagtctgacgccacgcgcatctcttgttctgtgttcaatcagtagtccaggggagaagcttctgctacttcagagctttgctaaactaacctaatttgtccaaatcaccccaaaaccaccatctctgacgtgcctggtttagtgctgtaattgtcttattattttttttatatatatatttcttggagtaaacattttaaataaacaacaacattgtctactgtcaaaaaaaaaacacaaaaagacaagaaaagaagttcagggggatttgtagattgttgggttgag

SEQ ID NO: 452729 - DNA, 1469 bp, Homo sapiens
ggaagctcgtatttacattttaagtgtatctggtgagtgggctggagccctcgtctgggccggaaaaaaaaaagccctccgatccgtcttttagttgcttctcttccttttttctctccggtttctcatcactccaaccagccgcgaccatgcccaggaagaaggcggcggcggcggcctgggaggagccgagctcgggcaacggcactgcccgcgccgggcccaggaaacgcggcggcccggcgggcaggaagcgcgagcggcccgagcgctgcagtagcagcagcggcggcggcagcagcggcgacgaggacggcctggagctcgacggggcccccggcgggggcaagcgctgcggcgcggccggcgacagcaggcaaggcgggcggcgcggccgtggtcatcaccgaacccgagcacaccaaggagcgcgtcaaacttgaagggtcaaagtgcaaagggcagcttttgatttttggggcaaccaactgggacttgattggtcgaaaagaagtgcctaaacagcaagctgcttaccgcaatctcggtcagaatttgtgggggccccacagatatgggtgcctggcgggggtccgggtgcggacagtggtctcgggctcgtgtgctgcacacagcctcctcatcaccacggaagggaagctgtggagctggggtcgaaatgagaaggggcagctgggacatggtgacaccaagagagtagaagcccctagactcatcgagggtcttagccacgaagtgattgtgtctgcagcatgtgggcggaaccacaccttggccttgacggaaacgggctccgtgtttgcgtttggggaaaacaagatggggcagctgggccttggcaaccagacagacgctgttcccagccccgcgcagataatgtacaacggccagccaattaccaaaatggcctgtggggctgaattcagtatgataatggactgcaaaggaaacctctattcctttgggtgccctgaatatggtcagctgggacacaactcagatgggaagttcatcgcccgggcacagcggatagagtacgactgtgaactagttccccggcgagtggccatcttcattgagaagacgaaagatggacagattctgcctgtaccaaacgtggttgtacgagacgtggcctgtggcgctaaccacacggtgaggctcggcttttctcacttcctgagagtcgcaccaggatggaaggggtgtttatgctcaagtttcctgacgcttggctttggctaggaactgatcccaggtagacatctgcttgcttcttcaagagggctttgcaccttggccaaagggtccttggtcccagggcagggttccctgtcactgcctcctatgttaacttctcccgtgatttaaatagacacatcttaaacacgtagatgttttgccgccctcacctgggcgacagaacgagaccccatctcaaaaaaaaa

SEQ ID NO: 452730 - DNA, 306 bp, Homo sapiens
gtgatctgcccgcctcggcctcccaaagtgctgggattacaggcatgagccaccgtacccggccaatctgtgttcttaaaatgcttcttctattaccctgaaaacacacagagactcactcacccacacctcgtattaagaccacttataaaagcaacttttttccctagtcttatttagccttgagaatacaagcaatttttaatctcagtttcactcacctaccgcatccgttgcatgacccttgggaaggaactaaaatacattcactccagggcccaaagcatccaagttgtcttttttttt

SEQ ID NO: 452731 - DNA, 2501 bp, Homo sapiens
cctctttctttcgcgctctagccacccgggaaggcctgcccagcgtagctgggctctgattggctgctttgaaagtctacgggctacccgattggtgaatccggggccctttagcgcggtgagtttgaaactgctcgcacttggcttcaaagctggctcttggaaattgagcggagagcgacgcggttgttgtagctgccgctgcggccgccgcggaataataagccgggatctaccatacccattgactaactatggaagattataccaaaatagagaaaattggagaaggtacctatggagttgtgtataagggtagacacaaaactacaggtcaagtggtagccatgaaaaaaatcagactagaaagtgaagaggaaggggttcctagtactgcaattcgggaaatttctctattaaaggaacttcgtcatccaaatatagtcagtcttcaggatgtgcttatgcaggattccaggttatatctcatctttgagtttctttccatggatctgaagaaatacttggattctatccctcctggtcagtacatggattcttcacttgttaagagttatttataccaaatcctacaggggattgtgttttgtcactctagaagagttcttcacagagacttaaaacctcaaaatctcttgattgatgacaaaggaacaattaaactggctgattttggccttgccagagcttttggaatacctatcagagtatatacacatgaggtagtaacactctggtacagatctccagaagtattgctggggtcagctcgttactcaactccagttgacatttggagtataggcaccatatttgctgaactagcaactaagaaaccacttttccatggggattcagaaattgatcaactcttcaggattttcagagctttgggcactcccaataatgaagtgtggccagaagtggaatctttacaggactataagaatacatttcccaaatggaaaccaggaagcctagcatcccatgtcaaaaacttggatgaaaatggcttggatttgctctcgaaaatgttaatctatgatccagccaaacgaatttctggcaaaatggcactgaatcatccatattttaatgatttggacaatcagattaagaagatgtagctttctgacaaaaagtttccatatgttatatcaacagatagttgtgtttttattgttaactcttgtctatttttgtcttatatatatttctttgttatcaaacttcagctgtacttcgtcttctaatttcaaaaatataacttaaaaatgtaaatattctatatgaatttaaatataattctgtaaatgtgtgtaggtctcactgtaacaactatttgttactataataaaactataatattgatgtcaggaatcaggaaaaaatttgagttggcttaaatcatctcagtccttatggcagttttattttcctgtagttggaactactaaaatttaggaaaatgctaagttcaagtttcgtaatgctttgaagtatttttatgctctgaatgtttaaatgttctcatcagtttcttgccatgttgttaactatacaacctggctaaagatgaatatttttctactggtattttaatttttgacctaaatgtttaagcattcggaatgagaaaactatacagatttgagaaatgatgctaaatttataggagttttcagtaacttaaaaagctaacatgagagcatgccaaaatttgctaagtcttacaaagatcaagggctgtccgcaacagggaagaacagttttgaaaatttatgaactatcttatttttaggtaggttttgaaagctttttgtctaagtgaattcttatgccttggtcagagtaataactgaaggagttgcttatcttggctttcgagtctgagtttaaaactacacattttgacatagtgtttattagcagccatctaaaaaggctctaatgtatatttaactaaaattactagctttgggaattaaactgtttaacaataaaaaaaaaaaaaaaaaaaaaaaaaaaaaaaaaaaaaaaaaaaaacaatacaaaagagaaaaaaaaaataaaagcagacaacgcaggaaatcactagatctacacaacgggctggggaagctaaatagtagagtcgcgatctacaacggactctgttgtatgcgcacgcaacgcttctaacaatggcagtgacttgatcaataagcggcaagccttgaaacaacccgttcgagcacagggaaccccttgactatcagaacggggtgaacgatacagtgcgcgcaccaaagcgcacgtcacgcgcgaattataaaaggcccaataggataaaatttgttgaaggtgtcaccatggaataagcctgtgacccaccacagtcatattccgacggacagaaatattgcggatgccgaatattgtatatagacaatctatacagtgtagaaaatatcgcaacgacatcctagcaaccaacgaga

SEQ ID NO: 452732 - DNA, 2447 bp, Homo sapiens
cctctttctttcgcgctctagccacccgggaaggcctgcccagcgtagctgggctctgattggctgctttgaaagtctacgggctacccgattggtgaatccggggccctttagcgcggtgagtttgaaactgctcgcacttggcttcaaagctggctcttggaaattgagcggagagcgacgcggttgttgtagctgccgctgcggccgccgcggaataataagccgggatctaccatacccattgactaactatggaagattataccaaaatagagaaaattggagaaggtacctatggagttgtgtataagggtagacacaaaactacaggtcaagtggtagccatgaaaaaaatcagactagaaagtgaagaggaaggggttcctagtactgcaattcgggaaatttctctattaaaggaacttcgtcatccaaatatagtcagtcttcaggatgtgcttatgcaggattccaggttatatctcatctttgagtttctttccatggatctgaagaaatacttggattctatccctcctggtcagtacatggattcttcacttgttaagagttatttataccaaatcctacaggggattgtgttttgtcactctagaagagttcttcacagagacttaaaacctcaaaatctcttgattgatgacaaaggaacaattaaactggctgattttggccttgccagagcttttggaatacctatcagagtatatacacatgaggtagtaacactctggtacagatctccagaagtattgctggggtcagctcgttactcaactccagttgacatttggagtataggcaccatatttgctgaactagcaactaagaaaccacttttccatggggattcagaaattgatcaactcttcaggattttcagagctttgggcactcccaataatgaagtgtggccagaagtggaatctttacaggactataagaatacatttcccaaatggaaaccaggaagcctagcatcccatgtcaaaaacttggatgaaaatggcttggatttgctctcgaaaatgttaatctatgatccagccaaacgaatttctggcaaaatggcactgaatcatccatattttaatgatttggacaatcagattaagaagatgtagctttctgacaaaaagtttccatatgttatatcaacagatagttgtgtttttattgttaactcttgtctatttttgtcttatatatatttctttgttatcaaacttcagctgtacttcgtcttctaatttcaaaaatataacttaaaaatgtaaatattctatatgaatttaaatataattctgtaaatgtgtgtaggtctcactgtaacaactatttgttactataataaaactataatattgatgtcaggaatcaggaaaaaatttgagttggcttaaatcatctcagtccttatggcagttttattttcctgtagttggaactactaaaatttaggtttaaatgttctcatcagtttcttgccatgttgttaactatacaacctggctaaagatgaatatttttctactggtattttaatttttgacctaaatgtttaagcattcggaatgagaaaactatacagatttgagaaatgatgctaaatttataggagttttcagtaacttaaaaagctaacatgagagcatgccaaaatttgctaagtcttacaaagatcaagggctgtccgcaacagggaagaacagttttgaaaatttatgaactatcttatttttaggtaggttttgaaagctttttgtctaagtgaattcttatgccttggtcagagtaataactgaaggagttgcttatcttggctttcgagtctgagtttaaaactacacattttgacatagtgtttattagcagccatctaaaaaggctctaatgtatatttaactaaaattactagctttgggaattaaactgtttaacaataaaaaaaaaaaaaaaaaaaaaaaaaaaaaaaaaaaaaaaaaaaaacaatacaaaagagaaaaaaaaaataaaagcagacaacgcaggaaatcactagatctacacaacgggctggggaagctaaatagtagagtcgcgatctacaacggactctgttgtatgcgcacgcaacgcttctaacaatggcagtgacttgatcaataagcggcaagccttgaaacaacccgttcgagcacagggaaccccttgactatcagaacggggtgaacgatacagtgcgcgcaccaaagcgcacgtcacgcgcgaattataaaaggcccaataggataaaatttgttgaaggtgtcaccatggaataagcctgtgacccaccacagtcatattccgacggacagaaatattgcggatgccgaatattgtatatagacaatctatacagtgtagaaaatatcgcaacgacatcctagcaaccaacgaga

SEQ ID NO: 452733 - DNA, 2599 bp, Homo sapiens
cctctttctttcgcgctctagccacccgggaaggcctgcccagcgtagctgggctctgattggctgctttgaaagtctacgggctacccgattggtgaatccggggccctttagcgcggtgagtttgaaactgctcgcacttggcttcaaagctggctcttggaaattgagcggagagcgacgcggttgttgtagctgccgctgcggccgccgcggaataataagccgggtacagtggctggggtcagggtcgtgtctaggggacggccgagggcctcggagggcgagtattgaggaacggggtcctctaagaaggccggactggaggatctaccatacccattgactaactatggaagattataccaaaatagagaaaattggagaaggtacctatggagttgtgtataagggtagacacaaaactacaggtcaagtggtagccatgaaaaaaatcagactagaaagtgaagaggaaggggttcctagtactgcaattcgggaaatttctctattaaaggaacttcgtcatccaaatatagtcagtcttcaggatgtgcttatgcaggattccaggttatatctcatctttgagtttctttccatggatctgaagaaatacttggattctatccctcctggtcagtacatggattcttcacttgttaagagttatttataccaaatcctacaggggattgtgttttgtcactctagaagagttcttcacagagacttaaaacctcaaaatctcttgattgatgacaaaggaacaattaaactggctgattttggccttgccagagcttttggaatacctatcagagtatatacacatgaggtagtaacactctggtacagatctccagaagtattgctggggtcagctcgttactcaactccagttgacatttggagtataggcaccatatttgctgaactagcaactaagaaaccacttttccatggggattcagaaattgatcaactcttcaggattttcagagctttgggcactcccaataatgaagtgtggccagaagtggaatctttacaggactataagaatacatttcccaaatggaaaccaggaagcctagcatcccatgtcaaaaacttggatgaaaatggcttggatttgctctcgaaaatgttaatctatgatccagccaaacgaatttctggcaaaatggcactgaatcatccatattttaatgatttggacaatcagattaagaagatgtagctttctgacaaaaagtttccatatgttatatcaacagatagttgtgtttttattgttaactcttgtctatttttgtcttatatatatttctttgttatcaaacttcagctgtacttcgtcttctaatttcaaaaatataacttaaaaatgtaaatattctatatgaatttaaatataattctgtaaatgtgtgtaggtctcactgtaacaactatttgttactataataaaactataatattgatgtcaggaatcaggaaaaaatttgagttggcttaaatcatctcagtccttatggcagttttattttcctgtagttggaactactaaaatttaggaaaatgctaagttcaagtttcgtaatgctttgaagtatttttatgctctgaatgtttaaatgttctcatcagtttcttgccatgttgttaactatacaacctggctaaagatgaatatttttctactggtattttaatttttgacctaaatgtttaagcattcggaatgagaaaactatacagatttgagaaatgatgctaaatttataggagttttcagtaacttaaaaagctaacatgagagcatgccaaaatttgctaagtcttacaaagatcaagggctgtccgcaacagggaagaacagttttgaaaatttatgaactatcttatttttaggtaggttttgaaagctttttgtctaagtgaattcttatgccttggtcagagtaataactgaaggagttgcttatcttggctttcgagtctgagtttaaaactacacattttgacatagtgtttattagcagccatctaaaaaggctctaatgtatatttaactaaaattactagctttgggaattaaactgtttaacaataaaaaaaaaaaaaaaaaaaaaaaaaaaaaaaaaaaaaaaaaaaaacaatacaaaagagaaaaaaaaaataaaagcagacaacgcaggaaatcactagatctacacaacgggctggggaagctaaatagtagagtcgcgatctacaacggactctgttgtatgcgcacgcaacgcttctaacaatggcagtgacttgatcaataagcggcaagccttgaaacaacccgttcgagcacagggaaccccttgactatcagaacggggtgaacgatacagtgcgcgcaccaaagcgcacgtcacgcgcgaattataaaaggcccaataggataaaatttgttgaaggtgtcaccatggaataagcctgtgacccaccacagtcatattccgacggacagaaatattgcggatgccgaatattgtatatagacaatctatacagtgtagaaaatatcgcaacgacatcctagcaaccaacgaga

SEQ ID NO: 452734 - DNA, 2330 bp, Homo sapiens
cctctttctttcgcgctctagccacccgggaaggcctgcccagcgtagctgggctctgattggctgctttgaaagtctacgggctacccgattggtgaatccggggccctttagcgcggtgagtttgaaactgctcgcacttggcttcaaagctggctcttggaaattgagcggagagcgacgcggttgttgtagctgccgctgcggccgccgcggaataataagccgggatctaccatacccattgactaactatggaagattataccaaaatagagaaaattggagaaggtacctatggagttgtgtataagggtagacacaaaactacaggtcaagtggtagccatgaaaaaaatcagactagaaagtgaagaggaaggggttcctagtactgcaattcgggaaatttctctattaaaggaacttcgtcatccaaatatagtcagtcttcaggatgtgcttatgcaggattccaggttatatctcatctttgagtttctttccatggatctgaagaaatacttggattctatccctcctggtcagtacatggattcttcacttgttaaggtagtaacactctggtacagatctccagaagtattgctggggtcagctcgttactcaactccagttgacatttggagtataggcaccatatttgctgaactagcaactaagaaaccacttttccatggggattcagaaattgatcaactcttcaggattttcagagctttgggcactcccaataatgaagtgtggccagaagtggaatctttacaggactataagaatacatttcccaaatggaaaccaggaagcctagcatcccatgtcaaaaacttggatgaaaatggcttggatttgctctcgaaaatgttaatctatgatccagccaaacgaatttctggcaaaatggcactgaatcatccatattttaatgatttggacaatcagattaagaagatgtagctttctgacaaaaagtttccatatgttatatcaacagatagttgtgtttttattgttaactcttgtctatttttgtcttatatatatttctttgttatcaaacttcagctgtacttcgtcttctaatttcaaaaatataacttaaaaatgtaaatattctatatgaatttaaatataattctgtaaatgtgtgtaggtctcactgtaacaactatttgttactataataaaactataatattgatgtcaggaatcaggaaaaaatttgagttggcttaaatcatctcagtccttatggcagttttattttcctgtagttggaactactaaaatttaggaaaatgctaagttcaagtttcgtaatgctttgaagtatttttatgctctgaatgtttaaatgttctcatcagtttcttgccatgttgttaactatacaacctggctaaagatgaatatttttctactggtattttaatttttgacctaaatgtttaagcattcggaatgagaaaactatacagatttgagaaatgatgctaaatttataggagttttcagtaacttaaaaagctaacatgagagcatgccaaaatttgctaagtcttacaaagatcaagggctgtccgcaacagggaagaacagttttgaaaatttatgaactatcttatttttaggtaggttttgaaagctttttgtctaagtgaattcttatgccttggtcagagtaataactgaaggagttgcttatcttggctttcgagtctgagtttaaaactacacattttgacatagtgtttattagcagccatctaaaaaggctctaatgtatatttaactaaaattactagctttgggaattaaactgtttaacaataaaaaaaaaaaaaaaaaaaaaaaaaaaaaaaaaaaaaaaaaaaaacaatacaaaagagaaaaaaaaaataaaagcagacaacgcaggaaatcactagatctacacaacgggctggggaagctaaatagtagagtcgcgatctacaacggactctgttgtatgcgcacgcaacgcttctaacaatggcagtgacttgatcaataagcggcaagccttgaaacaacccgttcgagcacagggaaccccttgactatcagaacggggtgaacgatacagtgcgcgcaccaaagcgcacgtcacgcgcgaattataaaaggcccaataggataaaatttgttgaaggtgtcaccatggaataagcctgtgacccaccacagtcatattccgacggacagaaatattgcggatgccgaatattgtatatagacaatctatacagtgtagaaaatatcgcaacgacatcctagcaaccaacgaga

SEQ ID NO: 452735 - DNA, 2448 bp, Homo sapiens
cctctttctttcgcgctctagccacccgggaaggcctgcccagcgtagctgggctctgattggctgctttgaaagtctacgggctacccgattggtgaatccggggccctttagcgcggtgagtttgaaactgctcgcacttggcttcaaagctggctcttggaaattgagcggagagcgacgcggttgttgtagctgccgctgcggccgccgcggaataataagccgggatctaccatacccattgactaactatggaagattataccaaaatagagaaaattggagaaggtacctatggagttgtgtataagggtagacacaaaactacaggtcaagtggtagccatgaaaaaaatcagactagaaagtgaagaggaaggggttcctagtactgcaattcgggaaatttctctattaaaggaacttcgtcatccaaatatagtcagtcttcaggatgtgcttatgcaggattccaggttatatctcatctttgagtttctttccatggatctgaagaaatacttggattctatccctcctggtcagtacatggattcttcacttgttaagagttatttataccaaatcctacaggggattgtgttttgtcactctagaagagttcttcacagagacttaaaaccttgccagagcttttggaatacctatcagagtatatacacatgaggtagtaacactctggtacagatctccagaagtattgctggggtcagctcgttactcaactccagttgacatttggagtataggcaccatatttgctgaactagcaactaagaaaccacttttccatggggattcagaaattgatcaactcttcaggattttcagagctttgggcactcccaataatgaagtgtggccagaagtggaatctttacaggactataagaatacatttcccaaatggaaaccaggaagcctagcatcccatgtcaaaaacttggatgaaaatggcttggatttgctctcgaaaatgttaatctatgatccagccaaacgaatttctggcaaaatggcactgaatcatccatattttaatgatttggacaatcagattaagaagatgtagctttctgacaaaaagtttccatatgttatatcaacagatagttgtgtttttattgttaactcttgtctatttttgtcttatatatatttctttgttatcaaacttcagctgtacttcgtcttctaatttcaaaaatataacttaaaaatgtaaatattctatatgaatttaaatataattctgtaaatgtgtgtaggtctcactgtaacaactatttgttactataataaaactataatattgatgtcaggaatcaggaaaaaatttgagttggcttaaatcatctcagtccttatggcagttttattttcctgtagttggaactactaaaatttaggaaaatgctaagttcaagtttcgtaatgctttgaagtatttttatgctctgaatgtttaaatgttctcatcagtttcttgccatgttgttaactatacaacctggctaaagatgaatatttttctactggtattttaatttttgacctaaatgtttaagcattcggaatgagaaaactatacagatttgagaaatgatgctaaatttataggagttttcagtaacttaaaaagctaacatgagagcatgccaaaatttgctaagtcttacaaagatcaagggctgtccgcaacagggaagaacagttttgaaaatttatgaactatcttatttttaggtaggttttgaaagctttttgtctaagtgaattcttatgccttggtcagagtaataactgaaggagttgcttatcttggctttcgagtctgagtttaaaactacacattttgacatagtgtttattagcagccatctaaaaaggctctaatgtatatttaactaaaattactagctttgggaattaaactgtttaacaataaaaaaaaaaaaaaaaaaaaaaaaaaaaaaaaaaaaaaaaaaaaacaatacaaaagagaaaaaaaaaataaaagcagacaacgcaggaaatcactagatctacacaacgggctggggaagctaaatagtagagtcgcgatctacaacggactctgttgtatgcgcacgcaacgcttctaacaatggcagtgacttgatcaataagcggcaagccttgaaacaacccgttcgagcacagggaaccccttgactatcagaacggggtgaacgatacagtgcgcgcaccaaagcgcacgtcacgcgcgaattataaaaggcccaataggataaaatttgttgaaggtgtcaccatggaataagcctgtgacccaccacagtcatattccgacggacagaaatattgcggatgccgaatattgtatatagacaatctatacagtgtagaaaatatcgcaacgacatcctagcaaccaacgaga

SEQ ID NO: 452736 - DNA, 1618 bp, Homo sapiens
agaatatctatgatttacagagtaagttattctagacctcaagagtgaaatgtaggggaggagacatttgtgtgttaaactaatggaaatgctcatttaatagatattcactgaaagtattagttttggtttattgctagaaaagttgaggttttatggagatttttgtaaaaaatggtttatttcctaaataaatatctctttttcttttttctcccagaaaatgttaatctatgatccagccaaacgaatttctggcaaaatggcactgaatcatccatattttaatgatttggacaatcagattaagaagatgtagctttctgacagtctatttttgtcttatatatatttctttgttatcaaacttcagctgtacttcgtcttctaatttcaaaaatataacttaaaaatgtaaatattctatatgaatttaaatataattctgtaaatgtgtgtaggtctcactgtaacaactatttgttactataataaaactataatattgatgtcaggaatcaggaaaaaatttgagttggcttaaatcatctcagtccttatggcagttttattttcctgtagttggaactactaaaatttaggaaaatgctaagttcaagtttcgtaatgctttgaagtatttttatgctctgaatgtttaaatgttctcatcagtttcttgccatgttgttaactatacaacctggctaaagatgaatatttttctactggtattttaatttttgacctaaatgtttaagcattcggaatgagaaaactatacagatttgagaaatgatgctaaatttataggagttttcagtaacttaaaaagctaacatgagagcatgccaaaatttgctaagtcttacaaagatcaagggctgtccgcaacagggaagaacagttttgaaaatttatgaactatcttatttttaggtaggttttgaaagctttttgtctaagtgaattcttatgccttggtcagagtaataactgaaggagttgcttatcttggctttcgagtctgagtttaaaactacacattttgacatagtgtttattagcagccatctaaaaaggctctaatgtatatttaactaaaattactagctttgggaattaaactgtttaacaataaaaaaaaaaaaaaaaaaaaaaaaaaaaaaaaaaaaaaaaaaaaacaatacaaaagagaaaaaaaaaataaaagcagacaacgcaggaaatcactagatctacacaacgggctggggaagctaaatagtagagtcgcgatctacaacggactctgttgtatgcgcacgcaacgcttctaacaatggcagtgacttgatcaataagcggcaagccttgaaacaacccgttcgagcacagggaaccccttgactatcagaacggggtgaacgatacagtgcgcgcaccaaagcgcacgtcacgcgcgaattataaaaggcccaataggataaaatttgttgaaggtgtcaccatggaataagcctgtgacccaccacagtcatattccgacggacagaaatattgcggatgccgaatattgtatatagacaatctatacagtgtagaaaatatcgcaacgacatcctagcaaccaacgaga

SEQ ID NO: 452737 - DNA, 1255 bp, Homo sapiens
cctctttctttcgcgctctagccacccgggaaggcctgcccagcgtagctgggctctgattggctgctttgaaagtctacgggctacccgattggtgaatccggggccctttagcgcggtgagtttgaaactgctcgcacttggcttcaaagctggctcttggaaattgagcggagagcgacgcggttgttgtagctgccgctgcggccgccgcggaataataagccgggatctaccatacccattgactaactatggaagattataccaaaatagagaaaattggagaaggtacctatggagttgtgtataagggtagacacaaaactacaggtcaagtggtagccatgaaaaaaatcagactagaaagtgaagaggaaggggttcctagtactgcaattcgggaaatttctctattaaaggaacttcgtcatccaaatatagtcagtcttcaggatgtgcttatgcaggattccaggttatatctcatctttgagtttctttccatggatctgaagaaatacttggattctatccctcctggtcagtacatggattcttcacttgttaaggtaaaagcttaactaattttattaatatttatgcactgtggatataaagggactatatatagaagtccctgcattttgtgggaatatgcttggaaaaagtgttagaataagaaaaagtatttcatttttctccctcatggttagtttatacaggttagagatacccatgttattaccagatagtgtttctagtaagtaaaaattagtgcctgagataacatagaactggtaggtattgttggaagctagggtagtctggtctttctttggctgtcagatacatgtaaaacaaagtaatgaaagcctagggcagagtggtggttgtaggtgttttattccagttttgaacatgttttggtcaatttattgtagacatttattatatttcaggtaaattataaaattgtatagttttaagtactgaagtatataaaagtgtcttattcttgcaccagttctaccaaaccactctgcagaggtagcgctgttagttttatttgtaatcttacacttgtatgtatgttcactttgtatgtatataaagatttttttttttacacaaggtggacttatttgcatatgtatatatacatattttcccttttttgtgtaaaacattatcaagacgtagatctacctatgtctatttacatttttgatataattaaaccacttccatattg

SEQ ID NO: 452738 - DNA, 307 bp, Homo sapiens
gaaaaaaatcagactagaaagtgaagaggaaggggttcctagtactgcaattcgggaaatttctctattaaaggaacttcgtcatccaaatatagtcaggtatgttgtaatatctgaatgtaagccattttctgcatgctatttcaaatataaatttcaacttggaaatctttacatttgctcaatttcttggtctagccttactgagtggactagaaccctatttttggtagttgagaatgccgcacatatgtaaaagagaacaggctgttaaagcaggaacagagttggaggagctgggtgatgt

SEQ ID NO: 452739 - DNA, 542 bp, Homo sapiens
ctcatcagtttcttgccatgttgttaactatacaacctggctaaagatgaatatttttctactggtattttaatttttgacctaaatgtttaagcattcggaatgagaaaactatacagatttgagaaatgatgctaaatttataggagttttcagtaacttaaaaagctaacatgagagcatgccaaaatttgctaagtcttacaaagatcaagggctgtccgcaacagggaagaacagttttgaaaatttatgaactatcttatttttaggtaggttttgaaagctttttgtctaagtgaattcttatgccttggtcagagtaataactgaaggagttgcttatcttggctttcgagtctgagtttaaaactacacattttgacatagtgtttattagcagccatctaaaaaggctctaatgtatatttaactaaaattactagctttgggaattaaactgtttaacaataatgctgctcattgtgattcttacctataagcagcctaatttgaattatttgctgcaatcaagagaagtg

SEQ ID NO: 452740 - DNA, 2447 bp, Homo sapiens
cctctttctttcgcgctctagccacccgggaaggcctgcccagcgtagctgggctctgattggctgctttgaaagtctacgggctacccgattggtgaatccggggccctttagcgcggtgagtttgaaactgctcgcacttggcttcaaagctggctcttggaaattgagcggagagcgacgcggttgttgtagctgccgctgcggccgccgcggaataataagccgggatctaccatacccattgactaactatggaagattataccaaaatagagaaaattggagaaggtacctatggagttgtgtataagggtagacacaaaactacaggtcaagtggtagccatgaaaaaaatcagactagaaagtgaagaggaaggggttcctagtactgcaattcgggaaatttctctattaaaggaacttcgtcatccaaatatagtcagtcttcaggatgtgcttatgcaggattccaggttatatctcatctttgagtttctttccatggatctgaagaaatacttggattctatccctcctggtcagtacatggattcttcacttgttaagagttatttataccaaatcctacaggggattgtgttttgtcactctagaagagttcttcacagagacttaaaacctcaaaatctcttgattgatgacaaaggaacaattaaactggctgattttggccttgccagagcttttggaatacctatcagagtatatacacatgaggtagtaacactctggtacagatctccagaagtattgctggggtcagctcgttactcaactccagttgacatttggagtataggcaccatatttgctgaactagcaactaagaaaccacttttccatggggattcagaaattgatcaactcttcaggattttcagagctttgggcactcccaataatgaagtgtggccagaagtggaatctttacaggactataagaatacatttcccaaatggaaaccaggaagcctagcatcccatgtcaaaaacttggatgaaaatggcttggatttgctctcgaaaatgttaatctatgatccagccaaacgaatttctggcaaaatggcactgaatcatccatattttaatgatttggacaatcagattaagaagatgtagctttctgacaaaaagtttccatatgttatatcaacagatagttgtgtttttattgttaactcttgtctatttttgtcttatatatatttctttgttatcaaacttcagctgtacttcgtcttctaatttcaaaaatataacttaaaaatgtaaatattctatatgaatttaaatataattctgtaaatgtgtgtaggtctcactgtaacaactatttgttactataataaaactataatattgatgtcaggaatcaggaaaaaatttgagttggcttaaatcatctcagtccttatggcagttttattttcctgtagttggaactactaaaatttaggaaaatgctaagttcaagtttcgtaatgctttgaagtatttttatgctctgaatgtttaaatgttctcatcagtttcttgccatgttgttaactatacaacctggctaaagatgaatatttttctactggtattttaatttttgacctaaatgtttaagcattcggaatgagaaaactatacagatttgagaaatgatgctaaatttataggagttttcagtaacttaaaaagctaacatgagagcatgccttttgaaaatttatgaactatcttatttttaggtaggttttgaaagctttttgtctaagtgaattcttatgccttggtcagagtaataactgaaggagttgcttatcttggctttcgagtctgagtttaaaactacacattttgacatagtgtttattagcagccatctaaaaaggctctaatgtatatttaactaaaattactagctttgggaattaaactgtttaacaataaaaaaaaaaaaaaaaaaaaaaaaaaaaaaaaaaaaaaaaaaaaacaatacaaaagagaaaaaaaaaataaaagcagacaacgcaggaaatcactagatctacacaacgggctggggaagctaaatagtagagtcgcgatctacaacggactctgttgtatgcgcacgcaacgcttctaacaatggcagtgacttgatcaataagcggcaagccttgaaacaacccgttcgagcacagggaaccccttgactatcagaacggggtgaacgatacagtgcgcgcaccaaagcgcacgtcacgcgcgaattataaaaggcccaataggataaaatttgttgaaggtgtcaccatggaataagcctgtgacccaccacagtcatattccgacggacagaaatattgcggatgccgaatattgtatatagacaatctatacagtgtagaaaatatcgcaacgacatcctagcaaccaacgaga

SEQ ID NO: 452741 - DNA, 2390 bp, Homo sapiens
cctctttctttcgcgctctagccacccgggaaggcctgcccagcgtagctgggctctgattggctgctttgaaagtctacgggctacccgattggtgaatccggggccctttagcgcggatctaccatacccattgactaactatggaagattataccaaaatagagaaaattggagaaggtacctatggagttgtgtataagggtagacacaaaactacaggtcaagtggtagccatgaaaaaaatcagactagaaagtgaagaggaaggggttcctagtactgcaattcgggaaatttctctattaaaggaacttcgtcatccaaatatagtcagtcttcaggatgtgcttatgcaggattccaggttatatctcatctttgagtttctttccatggatctgaagaaatacttggattctatccctcctggtcagtacatggattcttcacttgttaagagttatttataccaaatcctacaggggattgtgttttgtcactctagaagagttcttcacagagacttaaaacctcaaaatctcttgattgatgacaaaggaacaattaaactggctgattttggccttgccagagcttttggaatacctatcagagtatatacacatgaggtagtaacactctggtacagatctccagaagtattgctggggtcagctcgttactcaactccagttgacatttggagtataggcaccatatttgctgaactagcaactaagaaaccacttttccatggggattcagaaattgatcaactcttcaggattttcagagctttgggcactcccaataatgaagtgtggccagaagtggaatctttacaggactataagaatacatttcccaaatggaaaccaggaagcctagcatcccatgtcaaaaacttggatgaaaatggcttggatttgctctcgaaaatgttaatctatgatccagccaaacgaatttctggcaaaatggcactgaatcatccatattttaatgatttggacaatcagattaagaagatgtagctttctgacaaaaagtttccatatgttatatcaacagatagttgtgtttttattgttaactcttgtctatttttgtcttatatatatttctttgttatcaaacttcagctgtacttcgtcttctaatttcaaaaatataacttaaaaatgtaaatattctatatgaatttaaatataattctgtaaatgtgtgtaggtctcactgtaacaactatttgttactataataaaactataatattgatgtcaggaatcaggaaaaaatttgagttggcttaaatcatctcagtccttatggcagttttattttcctgtagttggaactactaaaatttaggaaaatgctaagttcaagtttcgtaatgctttgaagtatttttatgctctgaatgtttaaatgttctcatcagtttcttgccatgttgttaactatacaacctggctaaagatgaatatttttctactggtattttaatttttgacctaaatgtttaagcattcggaatgagaaaactatacagatttgagaaatgatgctaaatttataggagttttcagtaacttaaaaagctaacatgagagcatgccaaaatttgctaagtcttacaaagatcaagggctgtccgcaacagggaagaacagttttgaaaatttatgaactatcttatttttaggtaggttttgaaagctttttgtctaagtgaattcttatgccttggtcagagtaataactgaaggagttgcttatcttggctttcgagtctgagtttaaaactacacattttgacatagtgtttattagcagccatctaaaaaggctctaatgtatatttaactaaaattactagctttgggaattaaactgtttaacaataaaaaaaaaaaaaaaaaaaaaaaaaaaaaaaaaaaaaaaaaaaaacaatacaaaagagaaaaaaaaaataaaagcagacaacgcaggaaatcactagatctacacaacgggctggggaagctaaatagtagagtcgcgatctacaacggactctgttgtatgcgcacgcaacgcttctaacaatggcagtgacttgatcaataagcggcaagccttgaaacaacccgttcgagcacagggaaccccttgactatcagaacggggtgaacgatacagtgcgcgcaccaaagcgcacgtcacgcgcgaattataaaaggcccaataggataaaatttgttgaaggtgtcaccatggaataagcctgtgacccaccacagtcatattccgacggacagaaatattgcggatgccgaatattgtatatagacaatctatacagtgtagaaaatatcgcaacgacatcctagcaaccaacgaga

SEQ ID NO: 452742 - DNA, 2097 bp, Homo sapiens
atggatctgaagaaatacttggaaagaaactcaaagatgagatataacctggaatcctgcataagcacatcctgaagactgactatatttgagtttctttccatggatctgaagaaatacttggattctatccctcctggtcagtacatggattcttcacttgttaagagttatttataccaaatcctacaggggattgtgttttgtcactctagaagagttcttcacagagacttaaaacctcaaaatctcttgattgatgacaaaggaacaattaaactggctgattttggccttgccagagcttttggaatacctatcagagtatatacacatgaggtagtaacactctggtacagatctccagaagtattgctggggtcagctcgttactcaactccagttgacatttggagtataggcaccatatttgctgaactagcaactaagaaaccacttttccatggggattcagaaattgatcaactcttcaggattttcagagctttgggcactcccaataatgaagtgtggccagaagtggaatctttacaggactataagaatacatttcccaaatggaaaccaggaagcctagcatcccatgtcaaaaacttggatgaaaatggcttggatttgctctcgaaaatgttaatctatgatccagccaaacgaatttctggcaaaatggcactgaatcatccatattttaatgatttggacaatcagattaagaagatgtagctttctgacaaaaagtttccatatgttatatcaacagatagttgtgtttttattgttaactcttgtctatttttgtcttatatatatttctttgttatcaaacttcagctgtacttcgtcttctaatttcaaaaatataacttaaaaatgtaaatattctatatgaatttaaatataattctgtaaatgtgtgtaggtctcactgtaacaactatttgttactataataaaactataatattgatgtcaggaatcaggaaaaaatttgagttggcttaaatcatctcagtccttatggcagttttattttcctgtagttggaactactaaaatttaggaaaatgctaagttcaagtttcgtaatgctttgaagtatttttatgctctgaatgtttaaatgttctcatcagtttcttgccatgttgttaactatacaacctggctaaagatgaatatttttctactggtattttaatttttgacctaaatgtttaagcattcggaatgagaaaactatacagatttgagaaatgatgctaaatttataggagttttcagtaacttaaaaagctaacatgagagcatgccaaaatttgctaagtcttacaaagatcaagggctgtccgcaacagggaagaacagttttgaaaatttatgaactatcttatttttaggtaggttttgaaagctttttgtctaagtgaattcttatgccttggtcagagtaataactgaaggagttgcttatcttggctttcgagtctgagtttaaaactacacattttgacatagtgtttattagcagccatctaaaaaggctctaatgtatatttaactaaaattactagctttgggaattaaactgtttaacaataaaaaaaaaaaaaaaaaaaaaaaaaaaaaaaaaaaaaaaaaaaaacaatacaaaagagaaaaaaaaaataaaagcagacaacgcaggaaatcactagatctacacaacgggctggggaagctaaatagtagagtcgcgatctacaacggactctgttgtatgcgcacgcaacgcttctaacaatggcagtgacttgatcaataagcggcaagccttgaaacaacccgttcgagcacagggaaccccttgactatcagaacggggtgaacgatacagtgcgcgcaccaaagcgcacgtcacgcgcgaattataaaaggcccaataggataaaatttgttgaaggtgtcaccatggaataagcctgtgacccaccacagtcatattccgacggacagaaatattgcggatgccgaatattgtatatagacaatctatacagtgtagaaaatatcgcaacgacatcctagcaaccaacgaga

SEQ ID NO: 452743 - DNA, 892 bp, Homo sapiens
cctctttctttcgcgctctagccacccgggaaggcctgcccagcgtagctgggctctgattggctgctttgaaagtctacgggctacccgattggtgaatccggggccctttagcgcggtgagtttgaaactgctcgcacttggcttcaaagctggctcttggaaattgagcggagagcgacgcggttgttgtagctgccgctgcggccgccgcggaataataagccgggatctaccatacccattgactaactatggaagattataccaaaatagagaaaattggagaaggtacctatggagttgtgtataagggtagacacaaaactacaggtcaagtggtagccatgaaaaaaatcagactagaaagtgaagaggaaggggttcctagtactgcaattcgggaaatttctctattaaaggaacttcgtcatccaaatatagtcagtcttcaggatgtgcttatgcaggattccaggttatatctcatctttgagtttctttccatggatctgaagaaatacttggattctatccctcctggtcagtacatggattcttcacttgttaagagttatttataccaaatcctacaggggattgtgttttgtcactctagaagagttcttcacagagacttaaaaccttgccagagcttttggaatacctatcagagtatatacacatgaggtagtaacactctggtacagatctccagaagtattgctggggtcagctcgttactcaactccagttgacatttggagtataggcaccatatttgctgaactagcaactaagaaaccacttttccatggggattcagaaattgatcaactcttcaggattttcaggtagctattaaaaactgagataataaaggtaacatata

SEQ ID NO: 452744 - DNA, 2050 bp, Homo sapiens
cagatggtgtctaatgaaagcaatgagtctatgaaaattttacctagaatatcatcataaattaaattagcaagtgcgctggatcttggcagcgctgctgaaatgacaacagtaaaataatacctggttctccatctgaatacatcaatgcaggttctcctcgtgacagacttgcatatgtttgttagtttctgcctgtattgtcactgcgcaacggatggcattcattacaagaagagcccatcatcgttgtgtttgcatggtttttttccttgtgtgtagcccatgttgggaacacgatacaggttctcctcttatttcctatgacacgatttcccttgtggaaatttaagactttaagaactagagtatttttatggtgtctgcacctgcagttctgtgtttaaaatgtcataatgtggatcctggagtcaggctactagtcagtgcccctagccagaggctggttcatgagttcatcaactgaggcctctgtggcttcaataaagtctacattttgctcacagatcacaacattcactgtggaaatatgatttcatttctttaggctacaaacctgtatttctttactgaatgctaaggccatgtttatattgggtagaaagatattgagatcccaattttgtacaagattgtgatttcattatctaaaccttaaacttaatcctttaaattttgtagcttttggctgcatctgccccaagtactattccaggcaaattaaagttggaatacctttaataatataaaaataatgatagtaaatcttatacttctgttggcccttagcttgaaaatagcagttaaaaaaatttaaatgttgccttgattatcagtacttaattatgttgtgcactaaaaccttaaatatttattactgtgaataaaaacaaattatctttactgtatagctggtttctttaaatgttgatagaattgtggcattacatctaaatttgtaagtcttttcatatcaaacaagcaaggctttttatgctgctaagtctgtgggtgcagaaagaaacaccccttggaagggcaaagagaagccggctggttgcatcaccccgtgcagtttctcacacacatctctttttctgattctgtgttcagaagaggctgccggcataaaacctaaatgcaaggttgacggagaacagcttgtctggcacaacaatggtgcaggcccacgagccagcatcacagcttggccatgggacgttgagtatgcacaaactagaactcttcccttcccaccttaggaatagaaaatcctcttcctttctaatctgaaaaacgaaaactgaacaaacacaaaaccaaccccttggcagttcccacctcctattgacatatggaatattgtgccttattgtaaaccagtttgaaaaatgttctgtaactaaagtgggttttcggctattatgtatacagcttggtatattactacgaaagataaccaccttgtgttgcaccttaaaaatatcaagaccatgtaatttccataacaaaataggtggcctggctatggtattatagcatacaattaggacactatgcccctgcaaaattttgtaaatcaaattcagaggcaaaaacatattttagaatcatacagtttgcacacgacaagtaggtaataactgtctctaaaaatgttttctccttagtccgcaatgagctaagattcagaatagtgtcaacagcatgctcctatatgaagttgttttttttaaagcacatttgtttatgacaagcctacattctcagtgaatatggcatttagtatttcttttgaaaacaaacttaagcatcatgagccaaagttgcactttgactcccaactacggtagcattatggacatctcacaatgtcaagggtttctgttatgtattagtaaagtatagattattggggcctacataatttaaaagaaatgtaaattaatattaaaagcttgtaaaaatatgtatatctttactatttctcaataaatacctttgcaattgttttcatttccttcaccct

SEQ ID NO: 452745 - DNA, 211 bp, Homo sapiens
tcagtttacctagtgccaaaaagggcttttgctgtttttgcattattaaatgtaatatagtggacataaccattaaacatttgaattagttacatggtggtagcaagaaatggagaactcatgttactaaaaatttttaagaaaaaatgtgtaatctgtataatgattcgaagagtacctgttgaatgtccatttttgataattgtgtgca

SEQ ID NO: 452746 - DNA, 2713 bp, Homo sapiens
tccatcccaccctccgggagaggcagccggcgatccgctctctgcgccctgggaaaaagccccagccatgagcaatcagtaccaggaggagggctgctccgagaggcccgagtgcaaaagtaaatctccaactttgctctcctcctactgcatcgacagcatcctgggccggaggagcccgtgcaaaatgcggttgctgggagccgcgcagagcttgcctgctccgctgaccagccgcgccgacccggaaaaggccgtgcaaggctcccctaagagcagcagcgccccgttcgaggccgagctgcacctgccgcccaagctgcggcgcctgtacggcccgggcgggggccgcctccttcagggtgcggcagcggcggcggcggcggcggcggcggcggcggcagcggccgccacggccacggcgggtccacgcggggaggcccctccgccgccaccgccaaccgcgcggcccggggaacggccggacggcgcaggggccgccgcggcagccgcggccgcggccgccgcggcctgggacacgctcaagatcagccaggcgccgcaggtgagcatcagccgcagcaagtcgtaccgcgagaacggggcgcccttcgtgccgccgccgcccgcgctggacgagctgggcggcccggggggcgtcacgcacccggaggagcgcctcggcgtggccggcggcccgggcagcgccccggctgcgggtggtggcaccggcaccgaggacgacgaggaggagctgctggaggacgaagaagatgaggacgaggaagaggaactgctggaggacgacgaggaggagctgctggaggacgacgcccgcgcgctgctcaaggagccccggcgctgtcctgtggccgccactggcgccgtggccgcagcagctgccgctgcagtggccacagagggcggggagctgtcacccaaggaggagctgctgctgcacccggaagacgctgagggcaaggacggcgaggacagcgtgtgcctctctgcgggcagcgactcggaggaggggctgctgaaacgcaaacagaggcgctaccgcaccacgttcaccagctaccagctggaggaactggagcgggccttccagaagacgcactacccggacgtcttcaccagggaggaactggccatgaggctggacttgaccgaggcccgagtccaggtctggttccagaaccgtcgggccaagtggcgcaagcgggagaaggcaggcgcgcagacccacccccctgggctgcccttcccggggccgctctccgccacccacccgctcagcccctacctggacgccagccccttccctccgcaccacccggcgctcgactccgcttggactgccgctgccgccgccgccgccgccgccttcccgagcctacctccgcctccgggctcggccagcctgccgcccagcggggcgccgctgggcctgagcactttcctcggagcggcagtgttccgacacccagctttcatcagcccggcattcggcaggctcttttccacaatggcccccctgaccagcgcgtcgaccgcggccgcgctcctgagacagcccacacccgccgtggagggcgcagtggcatcgggcgccctggccgacccggccacggcggccgcagacagacgcgcctctagcatagccgcgctgaggctcaaggccaaggagcacgcggcgcagctcacgcagctcaacatcctgccgggcaccagcacgggcaaggaggtgtgctaaaggctgccctccacacccgcgccccgcgcgcgccccgaaaggtcacctcactcagcaccactcaagaccaaatggaaacagaggaccagcacactcccgagacggcactgagagagcgcagccgccttcacagcagtctggatgcgggcatggcagccctcggcgctccgggacgtggcacctcctcggctggctgtccacccgcccctgcccctgcccctgctactgccaacctcgctccaactccaacatccactctctcttgttcttactttcctgaaaatatcggggaggttttctcccccagacgcctgatattgaagtaaaaaatttaaaaagcccaacctcttcctcctgacaccccacttagcctttcttttctttctttctttctttcttttttttttttaaatagcattttggcgctcgaagttgatctccccagcgagggccccagcgtgaagccagggcccgggaagcaaatgcgagcctgtaagatagctaacagtgcacttaaaggaaaggggcgtcttgttcttgttctcttctttatcatacaccaaccaaggtttttatatcaaaccaaagggaaataatactctgctagaatatggactgttgaagtcaccaaactgtgattattgattctgtacataccattgttattaaaaaaaaaaaaaaaagaacagagctttgtatatttgaaatgttataacgcaattgcactcagcgtggtatggtaaaagtttgtcctcccgtagattcttactgtgttgtagatacggtagggttcctagacaaatatttatgtactcaagccctttatttaacttattaactgtagaggcttccgaaaccttcaagataaaggcaatggtacagtacttttgtgtaatgtgtaattgttaccacttttccttgctatctagtggagaagtgtcacgctcaaaataaaaa

SEQ ID NO: 452747 - DNA, 1621 bp, Homo sapiens
ccaccttcccttcttttgctctcctctccttttctccttccgcattctctcctgggagatagtgtcattgcagcccctggccttggaataaaccgtccgtttaagcgaaaccaccgaatccacgccactgggccgtggggcttgaggtctccacgccggcctgtggaccccggcccggcccggcccctcggggaatatctggactcggtcttttccccccagtcggttccctgccccaggaaagccctctctgcggggtccagcttccgcccgcgccctctgcccacttccccgccgcggcccatccgggtcccgtgggtaccgcgcccctcagctgccccggcgacaagcggcgggagacgctgcccgaggcgccgcgcacagctcccgaggccatgaccgcgctgtttgctctccctgcaggctcttttccacaatggcccccctgaccagcgcgtcgaccgcggccgcgctcctgagacagcccacacccgccgtggagggcgcagtggcatcgggcgccctggccgacccggccacggcggccgcagacagacgcgcctctagcatagccgcgctgaggctcaaggccaaggagcacgcggcgcagctcacgcagctcaacatcctgccgggcaccagcacgggcaaggaggtgtgctaaaggctgccctccacacccgcgccccgcgcgcgccccgaaaggtcacctcactcagcaccactcaagaccaaatggaaacagaggaccagcacactcccgagacggcactgagagagcgcagccgccttcacagcagtctggatgcgggcatggcagccctcggcgctccgggacgtggcacctcctcggctggctgtccacccgcccctgcccctgcccctgctactgccaacctcgctccaactccaacatccactctctcttgttcttactttcctgaaaatatcggggaggttttctcccccagacgcctgatattgaagtaaaaaatttaaaaagcccaacctcttcctcctgacaccccacttagcctttcttttctttctttctttctttcttttttttttttaaatagcattttggcgctcgaagttgatctccccagcgagggccccagcgtgaagccagggcccgggaagcaaatgcgagcctgtaagatagctaacagtgcacttaaaggaaaggggcgtcttgttcttgttctcttctttatcatacaccaaccaaggtttttatatcaaaccaaagggaaataatactctgctagaatatggactgttgaagtcaccaaactgtgattattgattctgtacataccattgttattaaaaaaaaaaaaaaaagaacagagctttgtatatttgaaatgttataacgcaattgcactcagcgtggtatggtaaaagtttgtcctcccgtagattcttactgtgttgtagatacggtagggttcctagacaaatatttatgtactcaagccctttatttaacttattaactgtagaggcttccgaaaccttcaagataaaggcaatggtacagtacttttgtgtaatgtgtaattgttaccacttttccttgctatctagtggagaagtgtcacgctcaaaataaaaa

SEQ ID NO: 452748 - DNA, 1649 bp, Homo sapiens
tccatcccaccctccgggagaggcagccggcgatccgctctctgcgccctgggaaaaagccccagccatgagcaatcagtaccaggaggagggctgctccgagaggcccgagtgcaaaagtaaatctccaactttgctctcctcctactgcatcgacagcatcctgggccggaggagcccgtgcaaaatgcggttgctgggagccgcgcagagcttgcctgctccgctgaccagccgcgccgacccggaaaaggccgtgcaaggctcccctaagagcagcagcgccccgttcgaggccgagctgcaccgccgccgccgccgccttcccgagcctacctccgcctccgggctcggccagcctgccgcccagcggggcgccgctgggcctgagcactttcctcggagcggcagtgttccgacacccagctttcatcagcccggcattcggcaggctcttttccacaatggcccccctgaccagcgcgtcgaccgcggccgcgctcctgagacagcccacacccgccgtggagggcgcagtggcatcgggcgccctggccgacccggccacggcggccgcagacagacgcgcctctagcatagccgcgctgaggctcaaggccaaggagcacgcggcgcagctcacgcagctcaacatcctgccgggcaccagcacgggcaaggaggtgtgctaaaggctgccctccacacccgcgccccgcgcgcgccccgaaaggtcacctcactcagcaccactcaagaccaaatggaaacagaggaccagcacactcccgagacggcactgagagagcgcagccgccttcacagcagtctggatgcgggcatggcagccctcggcgctccgggacgtggcacctcctcggctggctgtccacccgcccctgcccctgcccctgctactgccaacctcgctccaactccaacatccactctctcttgttcttactttcctgaaaatatcggggaggttttctcccccagacgcctgatattgaagtaaaaaatttaaaaagcccaacctcttcctcctgacaccccacttagcctttcttttctttctttctttctttcttttttttttttaaatagcattttggcgctcgaagttgatctccccagcgagggccccagcgtgaagccagggcccgggaagcaaatgcgagcctgtaagatagctaacagtgcacttaaaggaaaggggcgtcttgttcttgttctcttctttatcatacaccaaccaaggtttttatatcaaaccaaagggaaataatactctgctagaatatggactgttgaagtcaccaaactgtgattattgattctgtacataccattgttattaaaaaaaaaaaaaaaagaacagagctttgtatatttgaaatgttataacgcaattgcactcagcgtggtatggtaaaagtttgtcctcccgtagattcttactgtgttgtagatacggtagggttcctagacaaatatttatgtactcaagccctttatttaacttattaactgtagaggcttccgaaaccttcaagataaaggcaatggtacagtacttttgtgtaatgtgtaattgttaccacttttccttgctatctagtggagaagtgtcacgctcaaaataaaaa

SEQ ID NO: 452749 - DNA, 848 bp, Homo sapiens
gcttacacaagaagggaggagagaaaagccatggccggtgagtcttttactgtcccaaaaacaggcccctgggaggaaaaagttgtggaaggcgcttgctcttctggaagctatcatcatcggaaaggggctccagcatgccaaatttgcatcacatacatttgtgaagaagacagtcacctggcagggacgctgggactctcagcaggtccaacacatctggaaatcaccttactacacaagattctcaaatagtacttccttcctaggtaatgctgtttttaaagaaagagcattctttgaaccgtggcttcccgtgacattaatgttgtaggatgaaccacagttaaaggggctatgaagaattcccatagagtgatcatacaattttctttttgtaatctattctgcttttgtagcaactgtcaaaacagcttcactatctatgtttacattaaaatttggaatcagtatctcaaatcctgattacccaaataagtaccaaacttcatcatttaagcctactgaaatattccctcacgtctcctagagacacctttatctaaacaatatcagagctgaacatgccattcttccccaccctgcttctcttccagttttgtgtaactcggttattgatgtcaccatcaccagttgttcaaaccaggaacttgaaacacatcttggcccctttcctctcacgcatctccaatattcaagccaccgccaagttttatgcattcttctctcaaatttggaactgtctcgctatttcttcttctatttcattaaaaacccctattcatcaagggccctcttaaaataaaagaaacttatatttaaaagca

SEQ ID NO: 452750 - DNA, 202 bp, Homo sapiens
  misc_feature (49)..(49): n is a, c, g, or t
atccatctcaatctcacatccaccccaaatcgcgtcacccacccgcccnctcgagaagaaactaagttccagtacttggatgtcaacttgctgacgacaaggcacttccttacaatgagcctggaattctaagcagcagtttcacaatctgtaattgcacgtttctgccctttacaataaagaaatacacagtttcctttca

SEQ ID NO: 452751 - DNA, 1132 bp, Homo sapiens
gcttacacaagaagggaggagagaaaagccatggccggtgagtcttttactgtcccaaaaacaggcccctgggaggaaaaagttgtggaaggcgcttgctcttctggaagctatcatcatcggaaaggggctccagcatgccaaatttgcatcacatacatttgtgaagaagacagtcacctggcagggacgctgggactctcagcaggtccaacacatctggaaatcaccttactacacaagattctcaaatagtacttccttcctaggttcaactttcatttgagcagccagatgataaagcacagatgcccagcactgaaagagttacttcgacaagacgtttctatctcttcccagtacattaaaataaggaagctgtatgaatgtctgagggccggtatgtgtgtgtggtcaggagtgtgggaaggttgagtaaagtgtactgaaagtccattttagtcaaggactcgaagtctaccgattgagaatttttaatccaaaaatttaaattttgaaatgctctaaaatccaaaactgtgtgagcgcccacatgatattcaaaggaaatgcttattgaagcatttcaaattttaggtttttggaataaggatgctaaaccagtaagtataatgtagatattccaatatacaaaaatatctgaatttcaaaatacttcaggtagcatgaattttggataagggataatcaagccgtggcataatatacagaaaatactgaagtaatgcctttcttctggtctctgcagagcatgctgctcttcttccaaagtttttctttttttcttttagaccctttctgagggtcagctgatattgacctagaagtggccataagtctatgaaggctgactcttagatgtttctccccttcacctcagcagggtaacattttaaaatagcatgtggcctttccttttaaggttgcatatgttcccattggtggtataactttataacttacatttcttttagcaaaattctcttttatgcttgttttttttccccataggaaacctagagtttcttcattctgtaatggtttttggaattatatctgtttaataatagacttctgaacattttaataaatctgatataaaagtaaaaac

SEQ ID NO: 452752 - DNA, 1959 bp, Homo sapiens
gcttacacaagaagggaggagagaaaagccatggccggtgagtcttttactgtcccaaaaacaggcccctgggaggaaaaagttgtggaaggcgcttgctcttctggaagctatcatcatcggaaaggggctccagcatgccaaatttgcatcacatacatttgtgaagaagacagtcacctggcagggacgctgggactctcagcaggtccaacacatctggaaatcaccttactacacaagattctcaaatagtacttccttcctaggaaatgactacagagttggaggtattttctctgcaccaagagcacaaggcctctggtctcatggtattcgggaaggcatttgtgggaagaaatactctgagcaagtcccagatgtattacaactcaatgaaatctttaaaacgttgaatagcaagaactgcccaagtttgaaggacaaacccaaggtgataatcatccaggcctgccatgttggtgaggctaatgtctttgagaacaccagacattcaaatactgtcctcatctgtattcatcatgaattttcagtttatgtctgttttttagtgtcaaagaacatacactgtcagcactcaagatgtggcttctgtgaattgtatgactggttggtagatatttgttttatattcaagtctgagactttgatgtttggtggtttttaaaattagtttgagagttagaagaaataagaattgttgaaagaatgttacttgaatgtatgtgtgtatgtgcatgtgaattaatgatagagcaaatatattgataaatatgattgaacagacgctaagaggagaacgttgtcctctcagccattggtagtagtaacaaaccaaattttgtctttccagagaaccatggtgtggtgttggtaaaagattcagtaccggcctctgaaaatatatctttaccaactccgggagattttgaggatgatgctattaatcaagtacacatagagaaggattttattgctttctgctcttccacattaggttcaactttcatttgagcagccagatgataaagcacagatgcccagcactgaaagagttacttcgacaagacgtttctatctcttcccagtacattaaaataaggaagctgtatgaatgtctgagggccgcagtcagtcccctcttctgcaggtctgctgcaattcgctgggggtccactacagatactgttcacctgggtatcatcgatggaggctgcagaacagcaaagattgctgcctgctcctttctatggaagcttcgtcccagagaggcacttacctgatgcctgttggaactctcctgcataaggaagaaactaagttccagtacttggatgtcaacttgctgacgacaaggcacttccttacaatgagcctggaattctaagcagcagtttcacaatctgtaattgcacgtttctgccctttacaataaagaaatacacagtttcctttcaaaaaaaaaaaataaaaatataacaaaaattaaatataaaaaaaaaattatcaaacaagtaagttctgtatctaattcaatgccacccccccgagaaccaaatatggggccctttcggccctaacggggggggcttttgggcgcatttctttttaggggggggaaattatgggaccctggatcatggaaccctcggcgcaggagtgaacggtgcggggagggggtctttcccctactcaaggggggggtttgcgggaaaccacaaaattgagggagacccccgggaaaaaaatttgggccaaagggcccaacaggcgtccgaacctcgaaaacgggcccgtgtgggggcgtgttttaaaagcgtctccccccctaaagaacatacaaaaattcccccccaatatacaggggtgggcacaccccaccggctataataaaaccaaagcgtttccacctgaaaactccctacaggcccccttcgt

SEQ ID NO: 452753 - DNA, 548 bp, Homo sapiens
gcttacacaagaagggaggagagaaaagccatggccggtgagtcttttactgtcccaaaaacaggcccctgggaggaaaaagttgtggaaggcgcttgctcttctggaagctatcatcatcggaaaggggctccagcatgccaaatttgcatcacatacatttgtgaagaagacagtcacctggcagggacgctgggactctcagcaggtccaacacatctggaaatcaccttactacacaagattctcaaatagtacttccttcctaggttcaactttcatttgagcagccagatgataaagcacagatgcccagcactgaaagagttacttcgacaagacgtttctatctcttcccagtacattaaaataaggaagctgtatgaatgtctgagggccggaagaaactaagttccagtacttggatgtcaacttgctgacgacaaggcacttccttacaatgagcctggaattctaagcagcagtttcacaatctgtaattgcacgtttctgccctttacaataaagaaatacacagtttcctttca

SEQ ID NO: 452754 - DNA, 598 bp, Homo sapiens
gcttacacaagaagggaggagagaaaagccatggccggtgagtcttttactgtcccaaaaacaggcccctgggaggaaaaagttgtggaaggcgcttgctcttctggaagctatcatcatcggaaaggggctccagcatgccaaatttgcatcacatacatttgtgaagaagacagtcacctggcagggacgctgggactctcagcaggtccaacacatctggaaatcaccttactacacaagattctcaaatagtacttccttcctagcagtcagtcccctcttctgcaggtctgctgcaattcgctgggggtccactacagatactgttcacctgggtatcatcgatggaggctgcagaacagcaaagattgctgcctgctcctttctatggaagcttcgtcccagagaggcacttacctgatgcctgttggaactctcctgcataaggaagaaactaagttccagtacttggatgtcaacttgctgacgacaaggcacttccttacaatgagcctggaattctaagcagcagtttcacaatctgtaattgcacgtttctgccctttacaataaagaaatacacagtttcctttca

SEQ ID NO: 452755 - DNA, 1297 bp, Homo sapiens
gcttacacaagaagggaggagagaaaagccatggccggtgagtcttttactgtcccaaaaacaggcccctgggaggaaaaagttgtggaaggcgcttgctcttctggaagctatcatcatcggaaaggggctccagcatgccaaatttgcatcacatacatttgtgaagaagacagtcacctggcagggacgctgggactctcagcaggtccaacacatctggaaatcaccttactacacaagattctcaaatagtacttccttcctaggaaatgactacagagttggaggtattttctctgcaccaagagcacaaggcctctggtctcatggtattcgggaaggcatttgtgggaagaaatactctgagcaagtcccagatgtattacaactcaatgaaatctttaaaacgttgaatagcaagaactgcccaagtttgaaggacaaacccaaggtgataatcatccaggcctgccatgttggtgaggctaatgtctttgagaacaccagacattcaaatactgtcctcatctgtattcatcatgaattttcagtttatgtctgttttttagtgtcaaagaacatacactgtcagcactcaagatgtggcttctgtgaattgtatgactggttggtagatatttgttttatattcaagtctgagactttgatgtttggtggtttttaaaattagtttgagagttagaagaaataagaattgttgaaagaatgttacttgaatgtatgtgtgtatgtgcatgtgaattaatgatagagcaaatatattgataaatatgattgaacagacgctaagaggagaacgttgtcctctcagccattggtagtagtaacaaaccaaattttgtctttccagagaaccatggtgtggtgttggtaaaagattcagtaccggcctctgaaaatatatctttaccaactccgggagattttgaggatgatgctattaatcaagtacacatagagaaggattttattgctttctgctcttccacattaggttcaactttcatttgagcagccagatgataaagcacagatgcccagcactgaaagagttacttcgacaagacgtttctatctcttcccagtacattaaaataaggaagctgtatgaatgtctgagggccggaagaaactaagttccagtacttggatgtcaacttgctgacgacaaggcacttccttacaatgagcctggaattctaagcagcagtttcacaatctgtaattgcacgtttctgccctttacaataaagaaatacacagtttcctttca

SEQ ID NO: 452756 - DNA, 873 bp, Homo sapiens
gcttacacaagaagggaggagagaaaagccatggccggtgagtcttttactgtcccaaaaacaggcccctgggaggaaaaagttgtggaaggcgcttgctcttctggaagctatcatcatcggaaaggggctccagcatgccaaatttgcatcacatacatttgtgaagaagacagtcacctggcagggacgctgggactctcagcaggtccaacacatctggaaatcaccttactacacaagattctcaaatagtacttccttcctagagaaccatggtgtggtgttggtaaaagattcagtaccggcctctgaaaatatatctttaccaactccgggagattttgaggatgatgctattaatcaagtacacatagagaaggattttattgctttctgctcttccacattaggttcaactttcatttgagcagccagatgataaagcacagatgcccagcactgaaagagttacttcgacaagacgtttctatctcttcccagtacattaaaataaggaagctgtatgaatgtctgagggccgcagtcagtcccctcttctgcaggtctgctgcaattcgctgggggtccactacagatactgttcacctgggtatcatcgatggaggctgcagaacagcaaagattgctgcctgctcctttctatggaagcttcgtcccagagaggcacttacctgatgcctgttggaactctcctgcataaggaagaaactaagttccagtacttggatgtcaacttgctgacgacaaggcacttccttacaatgagcctggaattctaagcagcagtttcacaatctgtaattgcacgtttctgccctttacaataaagaaatacacagtttcctttca

SEQ ID NO: 452757 - DNA, 556 bp, Homo sapiens
ttcttactaaaatataagaaaatggaaagataatttgacctctgacttccaggagaatgttcaggccacatctaaaatttaccaaagaatggggaaaaaacttttttcaagttggaaggtaccagagtgattagctggtctaacctactcattttacagattagaaaactgagatatggcctgggcgacagagtgagactccatcccaaaaaaaaagatttatgcaaattatatctgctctgtagaaataactgtttaacaccatgcaagaaggcggttcaacggtgaaaatttggaccttatatcactgcagaggttagaaatacataattttggaaatataagtgcatatttttgtagtatttttttaaacccaatcctttcataaacttgagaactgaaattacttcagactgcacgtgtattatattaagaacatttttccagatatagagaaacataatatatagaactagtcactaaaaggagacagacactgaaatctagttttcattggtttgacagccttttttttttaaatgtagcttaaatttca

SEQ ID NO: 452758 - DNA, 1738 bp, Homo sapiens
tgcaacactcgggtagttactggggaaccgagcagacgctcagacacttccgagccttgagaaatccgttctcccgccaggcttcggtgtgagttaaagtcgggcagccggaaagcgacaggctcagacccgcagccggtggcctcgtagcccgcgcccggccatatctcagttttctaatctgtaaaatgagtaggttagaccagctaatcactctggtaccttccaacttgaaaaaagttttttccccattctttggtaaattttagatgtggcctgaacattctcctggaagtcagaggtcaaattatctttccattttcttttattttagtaagaatttcgcaaatgacaagtgataacaaaggcagcaggatttttcatttctctgtaaataatgtataaaatatgtgaacagaactatatctttcatctaaggccagttcaatttattaaaaataaaactaatgccttttaaaattgatcagacctttgatacttgaactaaattttgcattagagactttttaaaaattgttcgcttttgctgaataaattgcaaatagagaagcttcattgacagtcagtccctctctgcttaatgcagttatgggtcctttcgtttatggcaaatgacttacctgacaagagttaattttgcctccattgtatcaagtttgaatattttccaagaaatctgatttatttggcagactctgagagagagaacagattaagtgccgttttaaaactctgtattttcatttataataataaaatatttgccaaaatacagctgttttgtaaaattatctgcaccctcatccaagctttatatttaatagccttaatcacattttatgaagaatgttaaagaaaattttttttttactacatcgaaatgagataattaatttcttttttttttttgggaaatggagtctccctctgtcacccaggctggagtgcagtagcaagatcttggctcactacaacctctgcctcctggttcaagcaattttcctgcctcagcctcccaagtagacgggattacaggtgcgtgccaccacacctggctaatttttgtatttttagtagagacggggtttcaccttgttggtcaggctggtcttgagctcctgacctcatgatctgcccgcctcagactccccaagtgctgggattgcaggcatgagccaccgcgcctggcaaaataagataatttctcaaaataatttggtttcatataactggagtagtaattaatattttaacttcatcaactagatgtatctcctcagtagcatagtaactggtacatccagaaatctgaaatccgagttacttgatacaaattctactttatctaaccattagttattaaggaggtaaaatcttgttctaatttgctattaaaatcttattggttaaatagaaataagaaaaagtataattaagtttcttcatcctcaatgtcaactttatattgtaattaaatgtgtagcaaccaagctgacaatagtgattaagaaattaaagtacagaaatattttatttggggactcaaaatgaacaaaagatagataagattaaaatttcacttaaaaagctgccatctcttcctctcttgccctcccaccaccaataactttaaggggaagagaagctggttttttccctaaacatgtctttaaaataatgatacactgtatttattaattcttgatgcaaaaaaaaa

SEQ ID NO: 452759 - DNA, 1663 bp, Homo sapiens
taagaaattatgtattaatacatatggctcatcgttgaatacagcattcctaacattatcccacattcccccactcccgcgcccggccatatctcagttttctaatctgtaaaatgagtaggttagaccagctaatcactctggtaccttccaacttgaaaaaagttttttccccattctttggtaaattttagatgtggcctgaacattctcctggaagtcagaggtcaaattatctttccattttcttttattttagtaagaatttcgcaaatgacaagtgataacaaaggcagcaggatttttcatttctctgtaaataatgtataaaatatgtgaacagaactatatctttcatctaaggccagttcaatttattaaaaataaaactaatgccttttaaaattgatcagacctttgatacttgaactaaattttgcattagagactttttaaaaattgttcgcttttgctgaataaattgcaaatagagaagcttcattgacagtcagtccctctctgcttaatgcagttatgggtcctttcgtttatggcaaatgacttacctgacaagagttaattttgcctccattgtatcaagtttgaatattttccaagaaatctgatttatttggcagactctgagagagagaacagattaagtgccgttttaaaactctgtattttcatttataataataaaatatttgccaaaatacagctgttttgtaaaattatctgcaccctcatccaagctttatatttaatagccttaatcacattttatgaagaatgttaaagaaaattttttttttactacatcgaaatgagataattaatttcttttttttttttgggaaatggagtctccctctgtcacccaggctggagtgcagtagcaagatcttggctcactacaacctctgcctcctggttcaagcaattttcctgcctcagcctcccaagtagacgggattacaggtgcgtgccaccacacctggctaatttttgtatttttagtagagacggggtttcaccttgttggtcaggctggtcttgagctcctgacctcatgatctgcccgcctcagactccccaagtgctgggattgcaggcatgagccaccgcgcctggcaaaataagataatttctcaaaataatttggtttcatataactggagtagtaattaatattttaacttcatcaactagatgtatctcctcagtagcatagtaactggtacatccagaaatctgaaatccgagttacttgatacaaattctactttatctaaccattagttattaaggaggtaaaatcttgttctaatttgctattaaaatcttattggttaaatagaaataagaaaaagtataattaagtttcttcatcctcaatgtcaactttatattgtaattaaatgtgtagcaaccaagctgacaatagtgattaagaaattaaagtacagaaatattttatttggggactcaaaatgaacaaaagatagataagattaaaatttcacttaaaaagctgccatctcttcctctcttgccctcccaccaccaataactttaaggggaagagaagctggttttttccctaaacatgtctttaaaataatgatacactgtatttattaattcttgatgcaaaaaaaaa

SEQ ID NO: 452760 - DNA, 1641 bp, Homo sapiens
cggacgcgtgggtcgacccacgcgtccgccacgcgtccgactagttccttagatccgcgcccggccatatctcagttttctaatctgtaaaatgagtaggttagaccagctaatcactctggtaccttccaacttgaaaaaagttttttccccattctttggtaaattttagatgtggcctgaacattctcctggaagtcagaggtcaaattatctttccattttcttttattttagtaagaatttcgcaaatgacaagtgataacaaaggcagcaggatttttcatttctctgtaaataatgtataaaatatgtgaacagaactatatctttcatctaaggccagttcaatttattaaaaataaaactaatgccttttaaaattgatcagacctttgatacttgaactaaattttgcattagagactttttaaaaattgttcgcttttgctgaataaattgcaaatagagaagcttcattgacagtcagtccctctctgcttaatgcagttatgggtcctttcgtttatggcaaatgacttacctgacaagagttaattttgcctccattgtatcaagtttgaatattttccaagaaatctgatttatttggcagactctgagagagagaacagattaagtgccgttttaaaactctgtattttcatttataataataaaatatttgccaaaatacagctgttttgtaaaattatctgcaccctcatccaagctttatatttaatagccttaatcacattttatgaagaatgttaaagaaaattttttttttactacatcgaaatgagataattaatttcttttttttttttgggaaatggagtctccctctgtcacccaggctggagtgcagtagcaagatcttggctcactacaacctctgcctcctggttcaagcaattttcctgcctcagcctcccaagtagacgggattacaggtgcgtgccaccacacctggctaatttttgtatttttagtagagacggggtttcaccttgttggtcaggctggtcttgagctcctgacctcatgatctgcccgcctcagactccccaagtgctgggattgcaggcatgagccaccgcgcctggcaaaataagataatttctcaaaataatttggtttcatataactggagtagtaattaatattttaacttcatcaactagatgtatctcctcagtagcatagtaactggtacatccagaaatctgaaatccgagttacttgatacaaattctactttatctaaccattagttattaaggaggtaaaatcttgttctaatttgctattaaaatcttattggttaaatagaaataagaaaaagtataattaagtttcttcatcctcaatgtcaactttatattgtaattaaatgtgtagcaaccaagctgacaatagtgattaagaaattaaagtacagaaatattttatttggggactcaaaatgaacaaaagatagataagattaaaatttcacttaaaaagctgccatctcttcctctcttgccctcccaccaccaataactttaaggggaagagaagctggttttttccctaaacatgtctttaaaataatgatacactgtatttattaattcttgatgcaaaaaaaaa

SEQ ID NO: 452761 - DNA, 1588 bp, Homo sapiens
tgcaacactcgggtagttactggggaaccgagcagacgctcagacacttccgagccttgagaaatccgttctcccgccaggcttcggtgtgagttaaagtcgggcagccggaaagcgacaggctcagacccgcagccggtggcctcgtagcccgcgcccggccatatctcagttttctaatctgtaaaatgagtaggttagaccagctaatcactctggtaccttccaacttgaaaaaagttttttccccattctttggtaaattttagatgtggcctgaacattctcctggaagtcagaggtcaaattatctttccattttcttttattttagtaagaatttcgcaaatgacaagtgataacaaaggcagcaggatttttcatttctctgtaaataatgtataaaatatgtgaacagaactatatctttcatctaaggccagttcaatttattaaaaataaaactaatgccttttaaaattgatcagacctttgatacttgaactaaattttgcattagagactttttaaaaattgttcgcttttgctgaataaattgcaaatagagaagcttcattgacagtcagtccctctctgcttaatgcagttatgggtcctttcgtttatggcaaatgacttacctgacaagagttaattttgcctccattgtatcaagtttgaatattttccaagaaatctgatttatttggcagactctgagagagagaacagattaagtgccgttttaaaactctgtattttcatttataataataaaatatttgccaaaatacagctgttttgtaaaattatctgcaccctcatccaagctttatatttaatagccttaatcacattttatgaagaatgttaaagaaaattttttttttactacatcgaaatgagataattaatttcttttttttttttgggaaatggagtctccctctgtcacccaggctggagtgcagtagcaagatcttgggctcctgacctcatgatctgcccgcctcagactccccaagtgctgggattgcaggcatgagccaccgcgcctggcaaaataagataatttctcaaaataatttggtttcatataactggagtagtaattaatattttaacttcatcaactagatgtatctcctcagtagcatagtaactggtacatccagaaatctgaaatccgagttacttgatacaaattctactttatctaaccattagttattaaggaggtaaaatcttgttctaatttgctattaaaatcttattggttaaatagaaataagaaaaagtataattaagtttcttcatcctcaatgtcaactttatattgtaattaaatgtgtagcaaccaagctgacaatagtgattaagaaattaaagtacagaaatattttatttggggactcaaaatgaacaaaagatagataagattaaaatttcacttaaaaagctgccatctcttcctctcttgccctcccaccaccaataactttaaggggaagagaagctggttttttccctaaacatgtctttaaaataatgatacactgtatttattaattcttgatgcaaaaaaaaa

SEQ ID NO: 452762 - DNA, 1610 bp, Homo sapiens
taagaaattatgtattaatacatatggctcatcgttgaatacagcattcctaacattatcccacattcccccactcccgcgcccggccatatctcagttttctaatctgtaaaatgagtaggttagaccagctaatcactctggtaccttccaacttgaaaaaagttttttccccattctttggtaaattttagatgtggcctgaacattctcctggaagtcagaggtcaaattatctttccattttcttttattttagtaagaatttcgcaaatgacaagtgataacaaaggcagcaggatttttcatttctctgtaaataatgtataaaatatgtgaacagaactatatctttcatctaaggccagttcaatttattaaaaataaaactaatgccttttaaaattgatcagacctttgatacttgaactaaattttgcattagagactttttatcagtccctctctgcttaatgcagttatgggtcctttcgtttatggcaaatgacttacctgacaagagttaattttgcctccattgtatcaagtttgaatattttccaagaaatctgatttatttggcagactctgagagagagaacagattaagtgccgttttaaaactctgtattttcatttataataataaaatatttgccaaaatacagctgttttgtaaaattatctgcaccctcatccaagctttatatttaatagccttaatcacattttatgaagaatgttaaagaaaattttttttttactacatcgaaatgagataattaatttcttttttttttttgggaaatggagtctccctctgtcacccaggctggagtgcagtagcaagatcttggctcactacaacctctgcctcctggttcaagcaattttcctgcctcagcctcccaagtagacgggattacaggtgcgtgccaccacacctggctaatttttgtatttttagtagagacggggtttcaccttgttggtcaggctggtcttgagctcctgacctcatgatctgcccgcctcagactccccaagtgctgggattgcaggcatgagccaccgcgcctggcaaaataagataatttctcaaaataatttggtttcatataactggagtagtaattaatattttaacttcatcaactagatgtatctcctcagtagcatagtaactggtacatccagaaatctgaaatccgagttacttgatacaaattctactttatctaaccattagttattaaggaggtaaaatcttgttctaatttgctattaaaatcttattggttaaatagaaataagaaaaagtataattaagtttcttcatcctcaatgtcaactttatattgtaattaaatgtgtagcaaccaagctgacaatagtgattaagaaattaaagtacagaaatattttatttggggactcaaaatgaacaaaagatagataagattaaaatttcacttaaaaagctgccatctcttcctctcttgccctcccaccaccaataactttaaggggaagagaagctggttttttccctaaacatgtctttaaaataatgatacactgtatttattaattcttgatgcaaaaaaaaa

SEQ ID NO: 452763 - DNA, 788 bp, Homo sapiens
tgcaacactcgggtagttactggggaaccgagcagacgctcagacacttccgagccttgagaaatccgttctcccgccaggcttcggtgtgagttaaagtcgggcagccggaaagcgacaggctcagacccgcagccggtggcctcgtagcccgcgcccggccatatctcagttttctaatctgtaaaatgagtaggttagaccagctaatcactctggtaccttccaacttgaaaaaagttttttccccattctttggtaaattttagatgtggcctgaacattctcctggaagtcagaggtcaaattatctttccattttcttttattttagtaagaatttcgcaaatgacaagtgataacaaaggcagcaggatttttcatttctctgtaaataatgtataaaatatgtgaacagaactatatctttcatctaaggccagttcaatttattaaaaataaaactaatgccttttaaaattgatcagacctttgatacttgaactaaattttgcattagagactttttaaaaattgttcgcttttgctgaataaattgcaaatagagaagcttcattgacagtcagtccctctctgcttaatgcagttatgggtcctttcgtttatggcaaatgacttacctgacaagagttaattttgcctccattgtatcaagtttgaatattttccaagaaatctgatttatttggcagactctgagagagagaacagattaagtgccgttttaaaactctgtattttcatttataataataaaatatttgcca

SEQ ID NO: 452764 - DNA, 388 bp, Homo sapiens
aaatgtagcttaaatttcagtactaacattcagtttcactttggtatttctgatctttgcaatttggttctgttaatgttaaggtttgattttttaaaaaaattatttttcttaagaaattatgtattaatacatatggctcatcgttgaatacagcattcctaacattatcccacattcccccactcccacccgttatctttttttcttcctgatgcccaccccttttcccataggtaatgattcttaatcttggtggaggatgtacaaagtgcggttcagagaaaagaattggcaacaacagcaagagacttggtgttagtctcagtttaattacaatacaaggaagagttgagtaatttgccgcatctcaagaccttgtatctca

SEQ ID NO: 452765 - DNA, 829 bp, Homo sapiens
catatacacctaaaaaaaaagttgagaaaaatcacgtaattgacttcataaagcttgtgttagcacttgaagctctgtgcgccttacccgctccggctcccccgtcatggccttgctggtaagggtggcctgtccctctgctctatgtggtttaggactcagcgaatgctctctacaccaaatgcctccagcagcttctgagggactctcacctgaaaatgctcgccaagcaggaggcccagatgaacctgatgaagcaggcagtggagatatacgtccatcatgaaatttacaacctgatctttaaatacgtggggaccatggaggcaagtgaggtaggttctcagttattatcacccaagatggaagccttcttctgtgctttttgagaaatttgaaggttcgttaaaatctgttgttaggatgcggcctttaacaaaatcacaagaagccttcaagatcttcagcagaaagatattggtgtgaaaccggagttcaggtaagggtttgcgccacagcggcttggtgtcctcagaggcaggggtgctgtcttctcccggaagcaggccctctcggtggcagaggtgacacgctggtttgatgtggttagttctgaggagcagcgcagttacttgcaaccaaagataaagggctgccctttataggtgactgtgtgtggccgtccccctcccacactgcaccagcacgccagctggatgggagccgctgggcacggggttttgtgcagctggtccccaagtgggcatgtaatttgcccatgtgggttctgcgtgcaggggacatcccacctgcccacccaagggaacct

SEQ ID NO: 452766 - DNA, 4303 bp, Homo sapiens
acggcggagtaaggggtgggctatagggccagatcgccgcgcgagggtggtgggcatcgaggtcccagcagcggacgagggaggtgccgccgtcgcccaggatgggctgggaatgaagcgatgtagccttttaagagatttgctctgacccatctgaagtccatatggctctgtatgatgaagacctcctgaaaaatcctttctatctggctctgcaaaagtgccgccctgacttgtgcagcaaagtggcccaaatccatggcattgtcttagtaccctgcaaaggaagcctgtcgagcagcatccagtctacttgtcagtttgagtcctacattttgatacctgtggaagagcattttcagaccttaaatggaaagaagagcctttggcaccctcagatcccttttccctgaaaaccattgaagatgtgagagagttcttgggaagacactccgagcgatttgacaggaacatcgcctctttccatcgaacattccgagaatgcgagagaaagagcctccgtcaccacatagactcagcgaatgctctctacaccaaatgcctccagcagcttctgagggactctcacctgaaaatgctcgccaagcaggaggcccagatgaacctgatgaagcaggcagtggagatatacgtccatcatgaaatttacaacctgatctttaaatacgtggggaccatggaggcaagtgaggatgcggcctttaacaaaatcacaagaagccttcaagatcttcagcagaaagatattggtgtgaaaccggagttcagctttaacatacctcgtgccaaaagagagctggctcagctgaacaaatgcacctccccacagcagaagcttgtctgcttgcgaaaagtggtgcagctcattacacagtctccaagccagagagtgaacctggagaccatgtgtgctgatgatctgctatcagtcctgttatacttgcttgtgaaaacggagatccctaattggatggcaaatttgagttacatcaaaaacttcaggtttagcagcttggcaaaggatgaactgggatactgcctgacctcattcgaagctgccattgaatatattcggcaaggaagcctctctgctaaaccccctgagtctgagggatttggagacaggctgttccttaagcagagaatgagcttactctctcagatgacttcgtctcccaccgactgcctgtttaagcacattgcatcaggtaaccagaaagaagtggagagacttctgagccaagaggaccatgataaagataccgtccaaaagatgtgtcaccctctctgcttctgcgatgactgtgagaaactcgtctctgggaggttgaatgatccctcagttgtcactccattctccagagacgacagggggcacacccctctccatgtggctgctgtctgtgggcaggcatccctcatcgacctcctggtttccaagggcgccatggtaaatgccacagactaccatggggccactccgctccacctggcctgtcagaagggctaccagagcgtgacgctgctgctgctgcactacaaggccagcgcggaagtgcaggacaacaatgggaatacgccactccacctggcctgcacctacggccacgaggactgtgtgaaggctctggtttactacgacgtggagtcgtgcagacttgacattggcaatgagaaaggagacacccctctacacattgctgcccgctggggctaccaaggcgtcatagagacattgctgcagaacggagcgtccaccgagatccagaacagactgaaggagacgcccctcaagtgtgcattaaactcaaagattctgtctgtaatggaagcctatcacctgtccttcgagaggaggcagaagtcgtccgaggcccctgtgcagtccccgcagcgctccgtggactccatcagccaagagtcctccacttccagcttctcctccatgtcagccggctcaaggcaggaggagaccaagaaggactacagagaggtagaaaaacttttgagagcagttgctgatggagatctagaaatggtgcgttacctgttggaatggacagaggaggacctggaggatgcggaggacactgtcagtgcagcagaccccgaattctgtcacccgttgtgccagtgccccaagtgtgccccagctcagaagaggctggcgaaggttcctgccagtgggcttggtgtgaacgtgaccagccaggacggctcctccccgctgcatgtcgccgccctgcacggccgggcggacctcatccgcctcctgctgaagcacggggccaacgcaggtgccaggaacgcagaccaagccgtcccgctccacctggcctgccagcagggccactttcaggtggtgaagtgtctgttagattcgaatgcaaaacccaataagaaggacctcagtggaaacacgcccctcatttacgcctgctccggtggccatcacgagcttgtggcactgctgctacagcacggggcctccattaacgcttctaacaataagggcaacacagcgctgcacgaggctgtgattgaaaagcacgtcttcgtggtagagctgcttctgctccacggagcgtcagttcaggtgctgaacaagcggcagcgcacggctgtagactgtgctgaacagaattcaaaaataatggaattgcttcaggtggtaccaagctgtgttgcttcattagatgatgtggctgaaactgaccgcaaggagtatgtcactgttaagatcaggaaaaaatggaactcaaaactgtatgatctaccagatgagccttttacaagacagttttactttgtccactcagctggtcagtttaagggaaagacttcaagggagattatggcaagagatagaagtgtccctaatttaaccgaaggttctttgcatgagccagggaggcaaagtgtcacactgagacagaataacctgccagctcagagtggatctcatgctgctgagaaaggcaacagcgactggccagagaggcctggactgacacagactggccctggacacagacggatgctgcggagacacacggtagaggatgcggtcgtgtcccagggcccggaggctgctggccccctctccactccccaagaggttagtgcttcccggtcctaacaggaatgaggagttgttgaacccactgctaggaagcaaggatgcaacaagatgatgctgagcgtgaacacatctgagaactaaatgtgcttccatgagactggcttgagaagtcttcagcaccaagttcctgaaagcttttctgtggcaggaaagaatgcaacaaaaaagttaaccaccaccatctctctcctcttcaaagctaatgaatacaattgaaacagacaaaaattccagtagcatccagatccttaagccagaggtgcatgcttctttttaagtatgagggtttgttggtcacagtgggagaggtttcaccaccgcattctgacctcctcctcccaaaaggtgctaaacctctctgacctgtgtacattcacaaaccacagctagaattcctccacctaggattaagctggagagaagtaagtaatttaggtttcatggtactgtagaggccaggctgaaatgtcatatctgaaggaagaaagcagcagctggacaatgtttctttgcaaagcaacactcgaaccaaaagatgcctcaatcccattttgatattcattttagtgaaaggatgcatcagacctgttccacatcatgcacatgggaaagggtggttatcattttccttctaacaagtaggtacagatattcggttactacacgtgcacctgtagcagtatttctagaaacatccctttttgttgagaacctcccttgaatgtctgtcacactcacacctgacgggatggttactggattagagagtagatttggcacatcttttcttagtcttttgattcaaattcaaaacttaacagcacaaaccaggtcagagttactttcggttagaatttattgccatttattcctttttataaatttctatagattatactgttatttttatgttattggcctagagctacacgtatatgggtttgtcctgagtccgttttcaaatgaccttgtgattgatagggaaatggttttgtccatgttcttggaaatacttgtgtatgtacagaaggaagggagggattatttttctacaaagtaatttatgatttctaattttctaatgtgccttggatatgtgccaaatgatggaaaagaaacagtaaactttatgattcttga

SEQ ID NO: 452767 - DNA, 4666 bp, Homo sapiens
accgccaacgtccacggagcccgcccgggaccctcgacgtgcgcctctgcggacggggcgcgcagagggagccccgttagcggtcccccgctccctcgtccatcctccccaggcgcactccgagtcacacgtcgtgtctctgcaccgccctggcctccacggtggctccctgcgaagctgagggtgcggtccccatcctccgtgggtgccaactccggggcaagcaggctgcagagccgcgcgctccgccttaggcgctgccaagggcggccgggtagggtttcctaggacccgcccaccccgctcgtcccggccggagctgccaccccctggatcagtggagatttgctctgacccatctgaagtccatatggctctgtatgatgaagacctcctgaaaaatcctttctatctggctctgcaaaagtgccgccctgacttgtgcagcaaagtggcccaaatccatggcattgtcttagtaccctgcaaaggaagcctgtcgagcagcatccagtctacttgtcagtttgagtcctacattttgatacctgtggaagagcattttcagaccttaaatggaaaggatgtctttattcaagggaacaggattaaattaggagctggttttgcctgtcttctctcagtgcccattctctttgaagaaactttctacaatgaaaaagaagagagtttcagcatcctgtgtatagcccatcctttggaaaagagagagagttcagaagagcctttggcaccctcagatcccttttccctgaaaaccattgaagatgtgagagagttcttgggaagacactccgagcgatttgacaggaacatcgcctctttccatcgaacattccgagaatgcgagagaaagagcctccgtcaccacatagactcagcgaatgctctctacaccaaatgcctccagcagcttctgagggactctcacctgaaaatgctcgccaagcaggaggcccagatgaacctgatgaagcaggcagtggagatatacgtccatcatgaaatttacaacctgatctttaaatacgtggggaccatggaggcaagtgaggatgcggcctttaacaaaatcacaagaagccttcaagatcttcagcagaaagatattggtgtgaaaccggagttcagctttaacatacctcgtgccaaaagagagctggctcagctgaacaaatgcacctccccacagcagaagcttgtctgcttgcgaaaagtggtgcagctcattacacagtctccaagccagagagtgaacctggagaccatgtgtgctgatgatctgctatcagtcctgttatacttgcttgtgaaaacggagatccctaattggatggcaaatttgagttacatcaaaaacttcaggtttagcagcttggcaaaggatgaactgggatactgcctgacctcattcgaagctgccattgaatatattcggcaaggaagcctctctgctaaaccccctgagtctgagggatttggagacaggctgttccttaagcagagaatgagcttactctctcagatgacttcgtctcccaccgactgcctgtttaagcacattgcatcaggtaaccagaaagaagtggagagacttctgagccaagaggaccatgataaagataccgtccaaaagatgtgtcaccctctctgcttctgcgatgactgtgagaaactcgtctctgggaggttgaatgatccctcagttgtcactccattctccagagacgacagggggcacacccctctccatgtggctgctgtctgtgggcaggcatccctcatcgacctcctggtttccaagggcgccatggtaaatgccacagactaccatggggccactccgctccacctggcctgtcagaagggctaccagagcgtgacgctgctgctgctgcactacaaggccagcgcggaagtgcaggacaacaatgggaatacgccactccacctggcctgcacctacggccacgaggactgtgtgaaggctctggtttactacgacgtggagtcgtgcagacttgacattggcaatgagaaaggagacacccctctacacattgctgcccgctggggctaccaaggcgtcatagagacattgctgcagaacggagcgtccaccgagatccagaacagactgaaggagacgcccctcaagtgtgcattaaactcaaagattctgtctgtaatggaagcctatcacctgtccttcgagaggaggcagaagtcgtccgaggcccctgtgcagtccccgcagcgctccgtggactccatcagccaagagtcctccacttccagcttctcctccatgtcagccggctcaaggcaggaggagaccaagaaggactacagagaggtagaaaaacttttgagagcagttgctgatggagatctagaaatggtgcgttacctgttggaatggacagaggaggacctggaggatgcggaggacactgtcagtgcagcagaccccgaattctgtcacccgttgtgccagtgccccaagtgtgccccagctcagaagaggctggcgaaggttcctgccagtgggcttggtgtgaacgtgaccagccaggacggctcctccccgctgcatgtcgccgccctgcacggccgggcggacctcatccgcctcctgctgaagcacggggccaacgcaggtgccaggaacgcagaccaagccgtcccgctccacctggcctgccagcagggccactttcaggtggtgaagtgtctgttagattcgaatgcaaaacccaataagaaggacctcagtggaaacacgcccctcatttacgcctgctccggtggccatcacgagcttgtggcactgctgctacagcacggggcctccattaacgcttctaacaataagggcaacacagcgctgcacgaggctgtgattgaaaagcacgtcttcgtggtagagctgcttctgctccacggagcgtcagttcaggtgctgaacaagcggcagcgcacggctgtagactgtgctgaacagaattcaaaaataatggaattgcttcaggtggtaccaagctgtgttgcttcattagatgatgtggctgaaactgaccgcaaggagtatgtcactgttaagatcaggaaaaaatggaactcaaaactgtatgatctaccagatgagccttttacaagacagttttactttgtccactcagctggtcagtttaagggaaagacttcaagggagattatggcaagagatagaagtgtccctaatttaaccgaaggttctttgcatgagccagggaggcaaagtgtcacactgagacagaataacctgccagctcagagtggatctcatgctgctgagaaaggcaacagcgactggccagagaggcctggactgacacagactggccctggacacagacggatgctgcggagacacacggtagaggatgcggtcgtgtcccagggcccggaggctgctggccccctctccactccccaagaggttagtgcttcccggtcctaacaggaatgaggagttgttgaacccactgctaggaagcaaggatgcaacaagatgatgctgagcgtgaacacatctgagaactaaatgtgcttccatgagactggcttgagaagtcttcagcaccaagttcctgaaagcttttctgtggcaggaaagaatgcaacaaaaaagttaaccaccaccatctctctcctcttcaaagctaatgaatacaattgaaacagacaaaaattccagtagcatccagatccttaagccagaggtgcatgcttctttttaagtatgagggtttgttggtcacagtgggagaggtttcaccaccgcattctgacctcctcctcccaaaaggtgctaaacctctctgacctgtgtacattcacaaaccacagctagaattcctccacctaggattaagctggagagaagtaagtaatttaggtttcatggtactgtagaggccaggctgaaatgtcatatctgaaggaagaaagcagcagctggacaatgtttctttgcaaagcaacactcgaaccaaaagatgcctcaatcccattttgatattcattttagtgaaaggatgcatcagacctgttccacatcatgcacatgggaaagggtggttatcattttccttctaacaagtaggtacagatattcggttactacacgtgcacctgtagcagtatttctagaaacatccctttttgttgagaacctcccttgaatgtctgtcacactcacacctgacgggatggttactggattagagagtagatttggcacatcttttcttagtcttttgattcaaattcaaaacttaacagcacaaaccaggtcagagttactttcggttagaatttattgccatttattcctttttataaatttctatagattatactgttatttttatgttattggcctagagctacacgtatatgggtttgtcctgagtccgttttcaaatgaccttgtgattgatagggaaatggttttgtccatgttcttggaaatacttgtgtatgtacagaaggaagggagggattatttttctacaaagtaatttatgatttctaattttctaatgtgccttggatatgtgccaaatgatggaaaagaaacagtaaactttatgattcttga

SEQ ID NO: 452768 - DNA, 4013 bp, Homo sapiens
catatacacctaaaaaaaaagttgagaaaaatcacgtaattgacttcataaagcttgtgttagcacttgaagctctgtgcgccttacccgctccggctcccccgtcatggccttgctggtaagggtggcctgtccctctgctctatgtggtttaggactcagcgaatgctctctacaccaaatgcctccagcagcttctgagggactctcacctgaaaatgctcgccaagcaggaggcccagatgaacctgatgaagcaggcagtggagatatacgtccatcatgaaatttacaacctgatctttaaatacgtggggaccatggaggcaagtgaggtaggttctcagttattatcacccaagatggaagccttcttctgtgctttttgagaaatttgaaggttcgttaaaatctgttgttaggatgcggcctttaacaaaatcacaagaagccttcaagatcttcagcagaaagatattggtgtgaaaccggagttcagctttaacatacctcgtgccaaaagagagctggctcagctgaacaaatgcacctccccacagcagaagcttgtctgcttgcgaaaagtggtgcagctcattacacagtctccaagccagagagtgaacctggagaccatgtgtgctgatgatctgctatcagtcctgttatacttgcttgtgaaaacggagatccctaattggatggcaaatttgagttacatcaaaaacttcaggtttagcagcttggcaaaggatgaactgggatactgcctgacctcattcgaagctgccattgaatatattcggcaaggaagcctctctgctaaaccccctgagtctgagggatttggagacaggctgttccttaagcagagaatgagcttactctctcagatgacttcgtctcccaccgactgcctgtttaagcacattgcatcaggtaaccagaaagaagtggagagacttctgagccaagaggaccatgataaagataccgtccaaaagatgtgtcaccctctctgcttctgcgatgactgtgagaaactcgtctctgggaggttgaatgatccctcagttgtcactccattctccagagacgacagggggcacacccctctccatgtggctgctgtctgtgggcaggcatccctcatcgacctcctggtttccaagggcgccatggtaaatgccacagactaccatggggccactccgctccacctggcctgtcagaagggctaccagagcgtgacgctgctgctgctgcactacaaggccagcgcggaagtgcaggacaacaatgggaatacgccactccacctggcctgcacctacggccacgaggactgtgtgaaggctctggtttactacgacgtggagtcgtgcagacttgacattggcaatgagaaaggagacacccctctacacattgctgcccgctggggctaccaaggcgtcatagagacattgctgcagaacggagcgtccaccgagatccagaacagactgaaggagacgcccctcaagtgtgcattaaactcaaagattctgtctgtaatggaagcctatcacctgtccttcgagaggaggcagaagtcgtccgaggcccctgtgcagtccccgcagcgctccgtggactccatcagccaagagtcctccacttccagcttctcctccatgtcagccggctcaaggcaggaggagaccaagaaggactacagagaggtagaaaaacttttgagagcagttgctgatggagatctagaaatggtgcgttacctgttggaatggacagaggaggacctggaggatgcggaggacactgtcagtgcagcagaccccgaattctgtcacccgttgtgccagtgccccaagtgtgccccagctcagaagaggctggcgaaggttcctgccagtgggcttggtgtgaacgtgaccagccaggacggctcctccccgctgcatgtcgccgccctgcacggccgggcggacctcatccgcctcctgctgaagcacggggccaacgcaggtgccaggaacgcagaccaagccgtcccgctccacctggcctgccagcagggccactttcaggtggtgaagtgtctgttagattcgaatgcaaaacccaataagaaggacctcagtggaaacacgcccctcatttacgcctgctccggtggccatcacgagcttgtggcactgctgctacagcacggggcctccattaacgcttctaacaataagggcaacacagcgctgcacgaggctgtgattgaaaagcacgtcttcgtggtagagctgcttctgctccacggagcgtcagttcaggtgctgaacaagcggcagcgcacggctgtagactgtgctgaacagaattcaaaaataatggaattgcttcaggtggtaccaagctgtgttgcttcattagatgatgtggctgaaactgaccgcaaggagtatgtcactgttaagatcaggaaaaaatggaactcaaaactgtatgatctaccagatgagccttttacaagacagttttactttgtccactcagctggtcagtttaagggaaagacttcaagggagattatggcaagagatagaagtgtccctaatttaaccgaaggttctttgcatgagccagggaggcaaagtgtcacactgagacagaataacctgccagctcagagtggatctcatgctgctgagaaaggcaacagcgactggccagagaggcctggactgacacagactggccctggacacagacggatgctgcggagacacacggtagaggatgcggtcgtgtcccagggcccggaggctgctggccccctctccactccccaagaggttagtgcttcccggtcctaacaggaatgaggagttgttgaacccactgctaggaagcaaggatgcaacaagatgatgctgagcgtgaacacatctgagaactaaatgtgcttccatgagactggcttgagaagtcttcagcaccaagttcctgaaagcttttctgtggcaggaaagaatgcaacaaaaaagttaaccaccaccatctctctcctcttcaaagctaatgaatacaattgaaacagacaaaaattccagtagcatccagatccttaagccagaggtgcatgcttctttttaagtatgagggtttgttggtcacagtgggagaggtttcaccaccgcattctgacctcctcctcccaaaaggtgctaaacctctctgacctgtgtacattcacaaaccacagctagaattcctccacctaggattaagctggagagaagtaagtaatttaggtttcatggtactgtagaggccaggctgaaatgtcatatctgaaggaagaaagcagcagctggacaatgtttctttgcaaagcaacactcgaaccaaaagatgcctcaatcccattttgatattcattttagtgaaaggatgcatcagacctgttccacatcatgcacatgggaaagggtggttatcattttccttctaacaagtaggtacagatattcggttactacacgtgcacctgtagcagtatttctagaaacatccctttttgttgagaacctcccttgaatgtctgtcacactcacacctgacgggatggttactggattagagagtagatttggcacatcttttcttagtcttttgattcaaattcaaaacttaacagcacaaaccaggtcagagttactttcggttagaatttattgccatttattcctttttataaatttctatagattatactgttatttttatgttattggcctagagctacacgtatatgggtttgtcctgagtccgttttcaaatgaccttgtgattgatagggaaatggttttgtccatgttcttggaaatacttgtgtatgtacagaaggaagggagggattatttttctacaaagtaatttatgatttctaattttctaatgtgccttggatatgtgccaaatgatggaaaagaaacagtaaactttatgattcttga

SEQ ID NO: 452769 - DNA, 1873 bp, Homo sapiens
cctgaagcaattccattatttttgaattctgttcagcacagtctacagccgtgcgctgccgcttgttcagcacggggcctccattaacgcttctaacaataagggcaacacagcgctgcacgaggctgtgattgaaaagcacgtcttcgtggtagagctgcttctgctccacggagcgtcagttcaggtgctgaacaagcggcagcgcacggctgtagactgtgctgaacagaattcaaaaataatggaattgcttcaggtggtaccaagctgtgttgcttcattagatgatgtggctgaaactgaccgcaaggagtatgtcactgttaagatcaggaaaaaatggaactcaaaactgtatgatctaccagatgagccttttacaagacagttttactttgtccactcagctggtcagtttaagggaaagacttcaagggagattatggcaagagatagaagtgtccctaatttaaccgaaggttctttgcatgagccagggaggcaaagtgtcacactgagacagaataacctgccagctcagagtggatctcatgctgctgagaaaggcaacagcgactggccagagaggcctggactgacacagactggccctggacacagacggatgctgcggagacacacggtagaggatgcggtcgtgtcccagggcccggaggctgctggccccctctccactccccaagaggttagtgcttcccggtcctaacaggaatgaggagttgttgaacccactgctaggaagcaaggatgcaacaagatgatgctgagcgtgaacacatctgagaactaaatgtgcttccatgagactggcttgagaagtcttcagcaccaagttcctgaaagcttttctgtggcaggaaagaatgcaacaaaaaagttaaccaccaccatctctctcctcttcaaagctaatgaatacaattgaaacagacaaaaattccagtagcatccagatccttaagccagaggtgcatgcttctttttaagtatgagggtttgttggtcacagtgggagaggtttcaccaccgcattctgacctcctcctcccaaaaggtgctaaacctctctgacctgtgtacattcacaaaccacagctagaattcctccacctaggattaagctggagagaagtaagtaatttaggtttcatggtactgtagaggccaggctgaaatgtcatatctgaaggaagaaagcagcagctggacaatgtttctttgcaaagcaacactcgaaccaaaagatgcctcaatcccattttgatattcattttagtgaaaggatgcatcagacctgttccacatcatgcacatgggaaagggtggttatcattttccttctaacaagtaggtacagatattcggttactacacgtgcacctgtagcagtatttctagaaacatccctttttgttgagaacctcccttgaatgtctgtcacactcacacctgacgggatggttactggattagagagtagatttggcacatcttttcttagtcttttgattcaaattcaaaacttaacagcacaaaccaggtcagagttactttcggttagaatttattgccatttattcctttttataaatttctatagattatactgttatttttatgttattggcctagagctacacgtatatgggtttgtcctgagtccgttttcaaatgaccttgtgattgatagggaaatggttttgtccatgttcttggaaatacttgtgtatgtacagaaggaagggagggattatttttctacaaagtaatttatgatttctaattttctaatgtgccttggatatgtgccaaatgatggaaaagaaacagtaaactttatgattcttga

SEQ ID NO: 452770 - DNA, 4782 bp, Homo sapiens
acggcggagtaaggggtgggctatagggccagatcgccgcgcgagggtggtgggcatcgaggtcccagcagcggacgagggaggtgccgccgtcgcccaggatgggctgggaatgaagcgatgtagccttttaagagatttgctctgacccatctgaagtccatatggctctgtatgatgaagacctcctgaaaaatcctttctatctggctctgcaaaagtgccgccctgacttgtgcagcaaagtggcccaaatccatggcattgtcttagtaccctgcaaaggaagcctgtcgagcagcatccagtctacttgtcagtttgagtcctacattttgatacctgtggaagagcattttcagaccttaaatggaaaggatgtctttattcaagggaacaggattaaattaggagctggttttgcctgtcttctctcagtgcccattctctttgaagaaactttctacaatgaaaaagaagagagtttcagcatcctgtgtatagcccatcctttggaaaagagagagagttcagaagagcctttggcaccctcagatcccttttccctgaaaaccattgaagatgtgagagagttcttgggaagacactccgagcgatttgacaggaacatcgcctctttccatcgaacattccgagaatgcgagagaaagagcctccgtcaccacatagactcagcgaatgctctctacaccaaatgcctccagcagcttctgagggactctcacctgaaaatgctcgccaagcaggaggcccagatgaacctgatgaagcaggcagtggagatatacgtccatcatgaaatttacaacctgatctttaaatacgtggggaccatggaggcaagtgaggatgcggcctttaacaaaatcacaagaagccttcaagatcttcagcagaaagatattggtgtgaaaccggagttcagctttaacatacctcgtgccaaaagagagctggctcagctgaacaaatgcacctccccacagcagaagcttgtctgcttgcgaaaagtggtgcagctcattacacagtctccaagccagagagtgaacctggagaccatgtgtgctgatgatctgctatcagtcctgttatacttgcttgtgaaaacggagatccctaattggatggcaaatttgagttacatcaaaaacttcaggtttagcagcttggcaaaggatgaactgggatactgcctgacctcattcgaagctgccattgaatatattcggcaaggaagcctctctgctaaaccccctgagtctgagggatttggagacaggctgttccttaagcagagaatgagcttactctctcagatgacttcgtctcccaccgactgcctgtttaagcacattgcatcaggtaaccagaaagaagtggagagacttctgagccaagaggaccatgataaagataccgtccaaaagatgtgtcaccctctctgcttctgcgatgactgtgagaaactcgtctctgggaggttgaatgatccctcagttgtcactccattctccagagacgacagggggcacacccctctccatgtggctgctgtctgtgggcaggcatccctcatcgacctcctggtttccaagggcgccatggtaaatgccacagactaccatggggccactccgctccacctggcctgtcagaagggctaccagagcgtgacgctgctgctgctgcactacaaggccagcgcggaagtgcaggacaacaatgggaatacgccactccacctggcctgcacctacggccacgaggactgtgtgaaggctctggtttactacgacgtggagtcgtgcagacttgacattggcaatgagaaaggagacacccctctacacattgctgcccgctggggctaccaaggcgtcatagagacattgctgcagaacggagcgtccaccgagatccagaacagactgaaggagacgcccctcaagtgtgcattaaactcaaagattctgtctgtaatggaagcctatcacctgtccttcgagaggaggcagaagtcgtccgaggcccctgtgcagtccccgcagcgctccgtggactccatcagccaagagtcctccacttccagcttctcctccatgtcagccggctcaaggcaggaggagaccaagaaggactacagagaggtagaaaaacttttgagagcagttgctgatggagatctagaaatggtgcgttacctgttggaatggacagaggaggacctggaggatgcggaggacactgtcagtgcagcagaccccgaattctgtcacccgttgtgccagtgccccaagtgtgccccagctcagaagaggctggcgaaggttcctgccagtgggcttggtgtgaacgtgaccagccaggacggctcctccccgctgcatgtcgccgccctgcacggccgggcggacctcatccgcctcctgctgaagcacggggccaacgcaggtgccaggaacgcagaccaagccgtcccgctccacctggcctgccagcagggccactttcaggtggtgaagtgtctgttagattcgaatgcaaaacccaataagaaggacctcagtggaaacacgcccctcatttacgcctgctccggtggccatcacgagcttgtggcactgctgctacagcacggggcctccattaacgcttctaacaataagggcaacacagcgctgcacgaggctgtgattgaaaagcacgtcttcgtggtagagctgcttctgctccacggagcgtcagttcaggtgctgaacaagcggcagcgcacggctgtagactgtgctgaacagaattcaaaaataatggaattgcttcaggtggtaccaagctgtgttgcttcattagatgatgtggctgaaactgaccgcaaggagtatgtcactgttaagatcaggaaaaaatggaactcaaaactgtatgatctaccagatgagccttttacaagacagttttactttgtccactcagctggtcagtttaagggaaagacttcaagggagattatggcaagagatagaagtgtccctaatttaaccgaaggttctttgcatgagccagggaggcaaagtgtcacactgagacagaataacctgccagctcagagtggatctcatgctgctgagaaaggcaacagcgactggccagagaggcctggactgacacagactggccctggacacagacggatgctgcggagacacacggtagaggatgcggtcgtgtcccagggcccggaggctgctggccccctctccactccccaagaggttagtgcttcccggtcctaacaggaatgaggagttgttgaacccactgctaggaagcaaggatgcaacaagatgatgctgagcgtgaacacatctgagaactaaatgtgcttccatgagactggcttgagaagtcttcagcaccaagttcctgaaagcttttctgtggcaggaaagaatgcaacaaaaaagttaaccaccaccatctctctcctcttcaaagctaatgaatacaattgaaacagacaaaaattccagtagcatccagatccttaagccagaggtgcatgcttctttttaagtatgagggtttgttggtcacagtgggagaggtttcaccaccgcattctgacctcctcctcccaaaaggtgctaaacctctctgacctgtgtacattcacaaaccacagctagaattcctccacctaggattaagctggagagaagtaagtaatttaggtttcatggtactgtagaggccaggctgaaatgtcatatctgaaggaagaaagcagcagctggacaatgtttctttgcaaagcaacactcgaaccaaaagatgcctcaatcccattttgatattcattttagtgaaaggatgcatcagacctgttccacatcatgcacatgggaaagggtggttatcattttccttctaacaagtaggtacagatattcggttactacacgtgcacctgtagcagtatttctagaaacatccctttttgttgagaacctcccttgaatgtctgtcacactcacacctgacgggatggttactggattagagagtagatttggcacatcttttcttagtcttttgattcaaattcaaaacttaacagcacaaaccaggtcagagttactttcggttagaatttattgccatttattcctttttataaatttctatagattatactgttatttttatgttattggcctagagctacacgtatatgggtttgtcctgagtccgttttcaaatgaccttgtgattgatagggaaatggttttgtccatgttcttggaaatacttgtgtatgtacagaaggaagggagggattatttttctacaaagtaatttatgatttctaattttctaatgtgccttggatatgtgccaaatgatggaaaagaaacagtaaactttatgattcttgaaaaaaaaaaaaaaaaacacgaaacatcagatcataatgaatgaaaagaggggggctccttccagaaaaatattccccgggagggggccccaccatctgcgatacaccagattgtctgtcaaaaaggggcgcccccattagtgatctcatcatatagcaccgcgcagcggcccctctaacaaccgcggctgctcgcaaaatgctcttgctactttcttggaacgaccccctgcttgttgtgcacactgcccactctcaaacttgacccccgggcataactcagtcttctgttaccggtctcgtcaaatgtctgatttaattga

SEQ ID NO: 452771 - DNA, 1765 bp, Homo sapiens
attacaggcatgagccactgcacccagcctgtggcattttaggctttagatttttggattggagatactcaacctgttataaataggtactagctgtgtttctttaagcaaattcagtgcttcagtttctaaattttgtaaatctgagaatagaaagattgtgtctgtgctgtaattttaaaataatctttacaactgtttttgaagtttttagatgtttatctttttatctacagggaactcaaaactgtatgatctaccagatgagccttttacaagacagttttactttgtccactcagctggtcagtttaagggaaagacttcaagggagattatggcaagagatagaagtgtccctaatttaaccgaaggttctttgcatgagccagggaggcaaagtgtcacactgagacagaataacctgccagctcagagtggatctcatgctgctgagaaaggcaacagcgactggccagagaggcctggactgacacagactggccctggacacagacggatgctgcggagacacacggtagaggatgcggtcgtgtcccagggcccggaggctgctggccccctctccactccccaagaggttagtgcttcccggtcctaacaggaatgaggagttgttgaacccactgctaggaagcaaggatgcaacaagatgatgctgagcgtgaacacatctgagaactaaatgtgcttccatgagactggcttgagaagtcttcagcaccaagttcctgaaagcttttctgtggcaggaaagaatgcaacaaaaaagttaaccaccaccatctctctcctcttcaaagctaatgaatacaattgaaacagacaaaaattccagtagcatccagatccttaagccagaggtgcatgcttctttttaagtatgagggtttgttggtcacagtgggagaggtttcaccaccgcattctgacctcctcctcccaaaaggtgctaaacctctctgacctgtgtacattcacaaaccacagctagaattcctccacctaggattaagctggagagaagtaagtaatttaggtttcatggtactgtagaggccaggctgaaatgtcatatctgaaggaagaaagcagcagctggacaatgtttctttgcaaagcaacactcgaaccaaaagatgcctcaatcccattttgatattcattttagtgaaaggatgcatcagacctgttccacatcatgcacatgggaaagggtggttatcattttccttctaacaagtaggtacagatattcggttactacacgtgcacctgtagcagtatttctagaaacatccctttttgttgagaacctcccttgaatgtctgtcacactcacacctgacgggatggttactggattagagagtagatttggcacatcttttcttagtcttttgattcaaattcaaaacttaacagcacaaaccaggtcagagttactttcggttagaatttattgccatttattcctttttataaatttctatagattatactgttatttttatgttattggcctagagctacacgtatatgggtttgtcctgagtccgttttcaaatgaccttgtgattgatagggaaatggttttgtccatgttcttggaaatacttgtgtatgtacagaaggaagggagggattatttttctacaaagtaatttatgatttctaattttctaatgtgccttggatatgtgccaaatgatggaaaagaaacagtaaactttatgattcttga

SEQ ID NO: 452772 - DNA, 872 bp, Homo sapiens
ccgggcccggggaattccccgggtggtcacagtgggagaggtttcaccaccgcattctgacctcctcctcccaaaaggtgctaaacctctctgacctgtgtacattcacaaaccacagctagaattcctccacctaggattaagctggagagaagtaagtaatttaggtttcatggtactgtagaggccaggctgaaatgtcatatctgaaggaagaaagcagcagctggacaatgtttctttgcaaagcaacactcgaaccaaaagatgcctcaatcccattttgatattcattttagtgaaaggatgcatcagacctgttccacatcatgcacatgggaaagggtggttatcattttccttctaacaagtaggtacagatattcggttactacacgtgcacctgtagcagtatttctagaaacatccctttttgttgagaacctcccttgaatgtctgtcacactcacacctgacgggatggttactggattagagagtagatttggcacatcttttcttagtcttttgattcaaattcaaaacttaacagcacaaaccaggtcagagttactttcggttagaatttattgccatttattcctttttataaatttctatagattatactgttatttttatgttattggcctagagctacacgtatatgggtttgtcctgagtccgttttcaaatgaccttgtgattgatagggaaatggttttgtccatgttcttggaaatacttgtgtatgtacagaaggaagggagggattatttttctacaaagtaatttatgatttctaattttctaatgtgccttggatatgtgccaaatgatggaaaagaaacagtaaactttatgattcttga

SEQ ID NO: 452773 - DNA, 1363 bp, Homo sapiens
acggcggagtaaggggtgggctatagggccagatcgccgcgcgagggtggtgggcatcgaggtcccagcagcggacgagggaggtgccgccgtcgcccaggatgggctgggaatgaagcgatgtagccttttaagagatttgctctgacccatctgaagtccatatggctctgtatgatgaagacctcctgaaaaatcctttctatctggctctgcaaaagtgccgccctgacttgtgcagcaaagtggcccaaatccatggcattgtcttagtaccctgcaaaggaagcctgtcgagcagcatccagtctacttgtcagtttgagtcctacattttgatacctgtggaagagcattttcagaccttaaatggaaaggatgtctttattcaagggaacaggattaaattaggagctggttttgcctgtcttctctcagtgcccattctctttgaagaaactttctacaatgaaaaagaagagagtttcagcatcctgtgtatagcccatcctttggaaaagagagagagttcagaagagcctttggcaccctcagatcccttttccctgaaaaccattgaagatgtgagagagttcttgggaagacactccgagcgatttgacaggaacatcgcctctttccatcgaacattccgagaatgcgagagaaagagcctccgtcaccacatagactcagcgaatgctctctacaccaaatgcctccagcagcttctgagggactctcacctgaaaatgctcgccaagcaggaggcccagatgaacctgatgaagcaggcagtggagatatacgtccatcatgaaatttacaacctgatctttaaatacgtggggaccatggaggcaagtgaggtaggttctcagttattatcacccaagatggaagccttcttctgtgctttttgagaaatttgaaggttcgttaaaatctgttgttaggatgcggcctttaacaaaatcacaagaagccttcaagatcttcagcagaaagatattggtgtgaaaccggagttcaggtaagggtttgcgccacagcggcttggtgtcctcagaggcaggggtgctgtcttctcccggaagcaggccctctcggtggcagaggtgacacgctggtttgatgtggttagttctgaggagcagcgcagttacttgcaaccaaagataaagggctgccctttataggtgactgtgtgtggccgtccccctcccacactgcaccagcacgccagctggatgggagccgctgggcacggggttttgtgcagctggtccccaagtgggcatgtaatttgcccatgtgggttctgcgtgcaggggacatcccacctgcccacccaagggaacct

SEQ ID NO: 452774 - DNA, 343 bp, Homo sapiens
aaagagagctggctcagctgaacaaatgcacctccccacagcagaagcttgtctgcttgcgaaaagtggtgcagctcattacacagtctccaagccagagaggtttgtgcttggaaaggggactggccaaggggtagatgctacatccagatgaaaaagcaaagagtgatgctgtcttaagggatttttatggggctgggtgcagtggctcacctctgtaaccccagtgctttgggaggccaaggtgggaggatcacttgaggccaggaattggaggttgcagtgagctatgatcacaccagtgcactacagcctgggtgatagagtgagaccccttctcaaa

SEQ ID NO: 452775 - DNA, 4460 bp, Homo sapiens
acggcggagtaaggggtgggctatagggccagatcgccgcgcgagggtggtgggcatcgaggtcccagcagcggacgagggaggtgccgccgtcgcccaggatgggctgggaatgaagcgatgtagccttttaagagatttgctctgacccatctgaagtccatatggctctgtatgatgaagacctcctgaaaaatcctttctatctggctctgcaaaagtgccgccctgacttgtgcagcaaagtggcccaaatccatggcattgtcttagtaccctgcaaaggaagcctgtcgagcagcatccagtctacttgtcagtttgagtcctacattttgatacctgtggaagagcattttcagaccttaaatggaaaggatgtctttattcaagggaacaggattaaattaggagctggttttgcctgtcttctctcagtgcccattctctttgaagaaactttctacaatgaaaaagaagagagtttcagcatcctgtgtatagcccatcctttggaaaagagagagagttcagaagagcctttggcaccctcagatcccttttccctgaaaaccattgaagatgtgagagagttcttgggaagacactccgagcgatttgacaggaacatcgcctctttccatcgaacattccgagaatgcgagagaaagagcctccgtcaccacatagactcagcgaatgctctctacaccaaatgcctccagcagcttctgagggactctcacctgaaaatgctcgccaagcaggaggcccagatgaacctgatgaagcaggcagtggagatatacgtccatcatgaaatttacaacctgatctttaaatacgtggggaccatggaggcaagtgaggatgcggcctttaacaaaatcacaagaagccttcaagatcttcagcagaaagatattggtgtgaaaccggagttcagctttaacatacctcgtgccaaaagagagctggctcagctgaacaaatgcacctccccacagcagaagcttgtctgcttgcgaaaagtggtgcagctcattacacagtctccaagccagagagtgaacctggagaccatgtgtgctgatgatctgctatcagtcctgttatacttgcttgtgaaaacggagatccctaattggatggcaaatttgagttacatcaaaaacttcaggtttagcagcttggcaaaggatgaactgggatactgcctgacctcattcgaagctgccattgaatatattcggcaaggaagcctctctgctaaaccccctgagtctgagggatttggagacaggctgttccttaagcagagaatgagcttactctctcagatgacttcgtctcccaccgactgcctgtttaagcacattgcatcaggtaaccagaaagaagtggagagacttctgagccaagaggaccatgataaagataccgtccaaaagatgtgtcaccctctctgcttctgcgatgactgtgagaaactcgtctctgggaggttgaatgatccctcagttgtcactccattctccagagacgacagggggcacacccctctccatgtggctgctgtctgtgggcaggcatccctcatcgacctcctggtttccaagggcgccatggtaaatgccacagactaccatggggccactccgctccacctggcctgtcagaagggctaccagagcgtgacgctgctgctgctgcactacaaggccagcgcggaagtgcaggacaacaatgggaatacgccactccacctggcctgcacctacggccacgaggactgtgtgaaggctctggtttactacgacgtggagtcgtgcagacttgacattggcaatgagaaaggagacacccctctacacattgctgcccgctggggctaccaaggcgtcatagagacattgctgcagaacggagcgtccaccgagatccagaacagactgaaggagacgcccctcaagtgtgcattaaactcaaagattctgtctgtaatggaagcctatcacctgtccttcgagaggaggcagaagtcgtccgaggcccctgtgcagtccccgcagcgctccgtggactccatcagccaagagtcctccacttccagcttctcctccatgtcagccggctcaaggcaggaggagaccaagaaggactacagagaggtagaaaaacttttgagagcagttgctgatggagatctagaaatggtgcgttacctgttggaatggacagaggaggacctggaggatgcggaggacactgtcagtgcagcagaccccgaattctgtcacccgttgtgccagtgccccaagtgtgccccagctcagaagaggctggcgaaggttcctgccagtgggcttggtgtgaacgtgaccagccaggacggctcctccccgctgcatgtcgccgccctgcacggccgggcggacctcatccgcctcctgctgaagcacggggccaacgcaggtgccaggaacgcagaccaagccgtcccgctccacctggcctgccagcagggccactttcaggtggtgaagtgtctgttagattcgaatgcaaaacccaataagaaggacctcagtggaaacacgcccctcatttacgcctgctccggtggccatcacgagcttgtggcactgctgctacagcacggggcctccattaacgcttctaacaataagggcaacacagcgctgcacgaggctgtgattgaaaagcacgtcttcgtggtagagctgcttctgctccacggagcgtcagttcaggtgctgaacaagcggcagcgcacggctgtagactgtgctgaacagaattcaaaaataatggaattgcttcaggtggtaccaagctgtgttgcttcattagatgatgtggctgaaactgaccgcaaggagtatgtcactgttaagatcaggaaaaaatggaactcaaaactgtatgatctaccagatgagccttttacaagacagttttactttgtccactcagctggtcagtttaagggaaagacttcaagggagattatggcaagagatagaagtgtccctaatttaaccgaaggttctttgcatgagccagggaggcaaagtgtcacactgagacagaataacctgccagctcagagtggatctcatgctgctgagaaaggcaacagcgactggccagagaggcctggactgacacagactggccctggacacagacggatgctgcggagacacacggtagaggatgcggtcgtgtcccagggcccggaggctgctggccccctctccactccccaagaggttagtgcttcccggtcctaacaggaatgaggagttgttgaacccactgctaggaagcaaggatgcaacaagatgatgctgagcgtgaacacatctgagaactaaatgtgcttccatgagactggcttgagaagtcttcagcaccaagttcctgaaagcttttctgtggcaggaaagaatgcaacaaaaaagttaaccaccaccatctctctcctcttcaaagctaatgaatacaattgaaacagacaaaaattccagtagcatccagatccttaagccagaggtgcatgcttctttttaagtatgagggtttgttggtcacagtgggagaggtttcaccaccgcattctgacctcctcctcccaaaaggtgctaaacctctctgacctgtgtacattcacaaaccacagctagaattcctccacctaggattaagctggagagaagtaagtaatttaggtttcatggtactgtagaggccaggctgaaatgtcatatctgaaggaagaaagcagcagctggacaatgtttctttgcaaagcaacactcgaaccaaaagatgcctcaatcccattttgatattcattttagtgaaaggatgcatcagacctgttccacatcatgcacatgggaaagggtggttatcattttccttctaacaagtaggtacagatattcggttactacacgtgcacctgtagcagtatttctagaaacatccctttttgttgagaacctcccttgaatgtctgtcacactcacacctgacgggatggttactggattagagagtagatttggcacatcttttcttagtcttttgattcaaattcaaaacttaacagcacaaaccaggtcagagttactttcggttagaatttattgccatttattcctttttataaatttctatagattatactgttatttttatgttattggcctagagctacacgtatatgggtttgtcctgagtccgttttcaaatgaccttgtgattgatagggaaatggttttgtccatgttcttggaaatacttgtgtatgtacagaaggaagggagggattatttttctacaaagtaatttatgatttctaattttctaatgtgccttggatatgtgccaaatgatggaaaagaaacagtaaactttatgattcttga

SEQ ID NO: 452776 - DNA, 4198 bp, Homo sapiens
gcgcgaattcatcatcctgcttttcgaattcatcatcctgccgcgcgaattcatgatcctgctgcgcgaattcatcatcctgcttgaagagcattttcagaccttaaatggaaaggatgtctttattcaagggaacaggattaaattaggagctggttttgcctgtcttctctcagtgcccattctctttgaagaaactttctacaatgaaaaagaagagagtttcagcatcctgtgtatagcccatcctttggaaaagagagagagttcagaagagcctttggcaccctcagatcccttttccctgaaaaccattgaagatgtgagagagttcttgggaagacactccgagcgatttgacaggaacatcgcctctttccatcgaacattccgagaatgcgagagaaagagcctccgtcaccacatagactcagcgaatgctctctacaccaaatgcctccagcagcttctgagggactctcacctgaaaatgctcgccaagcaggaggcccagatgaacctgatgaagcaggcagtggagatatacgtccatcatgaaatttacaacctgatctttaaatacgtggggaccatggaggcaagtgaggatgcggcctttaacaaaatcacaagaagccttcaagatcttcagcagaaagatattggtgtgaaaccggagttcagctttaacatacctcgtgccaaaagagagctggctcagctgaacaaatgcacctccccacagcagaagcttgtctgcttgcgaaaagtggtgcagctcattacacagtctccaagccagagagtgaacctggagaccatgtgtgctgatgatctgctatcagtcctgttatacttgcttgtgaaaacggagatccctaattggatggcaaatttgagttacatcaaaaacttcaggtttagcagcttggcaaaggatgaactgggatactgcctgacctcattcgaagctgccattgaatatattcggcaaggaagcctctctgctaaaccccctgagtctgagggatttggagacaggctgttccttaagcagagaatgagcttactctctcagatgacttcgtctcccaccgactgcctgtttaagcacattgcatcaggtaaccagaaagaagtggagagacttctgagccaagaggaccatgataaagataccgtccaaaagatgtgtcaccctctctgcttctgcgatgactgtgagaaactcgtctctgggaggttgaatgatccctcagttgtcactccattctccagagacgacagggggcacacccctctccatgtggctgctgtctgtgggcaggcatccctcatcgacctcctggtttccaagggcgccatggtaaatgccacagactaccatggggccactccgctccacctggcctgtcagaagggctaccagagcgtgacgctgctgctgctgcactacaaggccagcgcggaagtgcaggacaacaatgggaatacgccactccacctggcctgcacctacggccacgaggactgtgtgaaggctctggtttactacgacgtggagtcgtgcagacttgacattggcaatgagaaaggagacacccctctacacattgctgcccgctggggctaccaaggcgtcatagagacattgctgcagaacggagcgtccaccgagatccagaacagactgaaggagacgcccctcaagtgtgcattaaactcaaagattctgtctgtaatggaagcctatcacctgtccttcgagaggaggcagaagtcgtccgaggcccctgtgcagtccccgcagcgctccgtggactccatcagccaagagtcctccacttccagcttctcctccatgtcagccggctcaaggcaggaggagaccaagaaggactacagagaggtagaaaaacttttgagagcagttgctgatggagatctagaaatggtgcgttacctgttggaatggacagaggaggacctggaggatgcggaggacactgtcagtgcagcagaccccgaattctgtcacccgttgtgccagtgccccaagtgtgccccagctcagaagaggctggcgaaggttcctgccagtgggcttggtgtgaacgtgaccagccaggacggctcctccccgctgcatgtcgccgccctgcacggccgggcggacctcatccgcctcctgctgaagcacggggccaacgcaggtgccaggaacgcagaccaagccgtcccgctccacctggcctgccagcagggccactttcaggtggtgaagtgtctgttagattcgaatgcaaaacccaataagaaggacctcagtggaaacacgcccctcatttacgcctgctccggtggccatcacgagcttgtggcactgctgctacagcacggggcctccattaacgcttctaacaataagggcaacacagcgctgcacgaggctgtgattgaaaagcacgtcttcgtggtagagctgcttctgctccacggagcgtcagttcaggtgctgaacaagcggcagcgcacggctgtagactgtgctgaacagaattcaaaaataatggaattgcttcaggtggtaccaagctgtgttgcttcattagatgatgtggctgaaactgaccgcaaggagtatgtcactgttaagatcaggaaaaaatggaactcaaaactgtatgatctaccagatgagccttttacaagacagttttactttgtccactcagctggtcagtttaagggaaagacttcaagggagattatggcaagagatagaagtgtccctaatttaaccgaaggttctttgcatgagccagggaggcaaagtgtcacactgagacagaataacctgccagctcagagtggatctcatgctgctgagaaaggcaacagcgactggccagagaggcctggactgacacagactggccctggacacagacggatgctgcggagacacacggtagaggatgcggtcgtgtcccagggcccggaggctgctggccccctctccactccccaagaggttagtgcttcccggtcctaacaggaatgaggagttgttgaacccactgctaggaagcaaggatgcaacaagatgatgctgagcgtgaacacatctgagaactaaatgtgcttccatgagactggcttgagaagtcttcagcaccaagttcctgaaagcttttctgtggcaggaaagaatgcaacaaaaaagttaaccaccaccatctctctcctcttcaaagctaatgaatacaattgaaacagacaaaaattccagtagcatccagatccttaagccagaggtgcatgcttctttttaagtatgagggtttgttggtcacagtgggagaggtttcaccaccgcattctgacctcctcctcccaaaaggtgctaaacctctctgacctgtgtacattcacaaaccacagctagaattcctccacctaggattaagctggagagaagtaagtaatttaggtttcatggtactgtagaggccaggctgaaatgtcatatctgaaggaagaaagcagcagctggacaatgtttctttgcaaagcaacactcgaaccaaaagatgcctcaatcccattttgatattcattttagtgaaaggatgcatcagacctgttccacatcatgcacatgggaaagggtggttatcattttccttctaacaagtaggtacagatattcggttactacacgtgcacctgtagcagtatttctagaaacatccctttttgttgagaacctcccttgaatgtctgtcacactcacacctgacgggatggttactggattagagagtagatttggcacatcttttcttagtcttttgattcaaattcaaaacttaacagcacaaaccaggtcagagttactttcggttagaatttattgccatttattcctttttataaatttctatagattatactgttatttttatgttattggcctagagctacacgtatatgggtttgtcctgagtccgttttcaaatgaccttgtgattgatagggaaatggttttgtccatgttcttggaaatacttgtgtatgtacagaaggaagggagggattatttttctacaaagtaatttatgatttctaattttctaatgtgccttggatatgtgccaaatgatggaaaagaaacagtaaactttatgattcttga

SEQ ID NO: 452777 - DNA, 2058 bp, Homo sapiens
ctctatgacgccttggtagccccagcgggcagcaatgtgtaaaggggtgtctcctttctcattgctgcccgctggggctaccaaggcgtcatagagacattgctccacctggcctgccagcagggccactttcaggtggtgaagtgtctgttagattcgaatgcaaaacccaataagaaggacctcagtggaaacacgcccctcatttacgcctgctccggtggccatcacgagcttgtggcactgctgctacagcacggggcctccattaacgcttctaacaataagggcaacacagcgctgcacgaggctgtgattgaaaagcacgtcttcgtggtagagctgcttctgctccacggagcgtcagttcaggtgctgaacaagcggcagcgcacggctgtagactgtgctgaacagaattcaaaaataatggaattgcttcaggtggtaccaagctgtgttgcttcattagatgatgtggctgaaactgaccgcaaggagtatgtcactgttaagatcaggaaaaaatggaactcaaaactgtatgatctaccagatgagccttttacaagacagttttactttgtccactcagctggtcagtttaagggaaagacttcaagggagattatggcaagagatagaagtgtccctaatttaaccgaaggttctttgcatgagccagggaggcaaagtgtcacactgagacagaataacctgccagctcagagtggatctcatgctgctgagaaaggcaacagcgactggccagagaggcctggactgacacagactggccctggacacagacggatgctgcggagacacacggtagaggatgcggtcgtgtcccagggcccggaggctgctggccccctctccactccccaagaggttagtgcttcccggtcctaacaggaatgaggagttgttgaacccactgctaggaagcaaggatgcaacaagatgatgctgagcgtgaacacatctgagaactaaatgtgcttccatgagactggcttgagaagtcttcagcaccaagttcctgaaagcttttctgtggcaggaaagaatgcaacaaaaaagttaaccaccaccatctctctcctcttcaaagctaatgaatacaattgaaacagacaaaaattccagtagcatccagatccttaagccagaggtgcatgcttctttttaagtatgagggtttgttggtcacagtgggagaggtttcaccaccgcattctgacctcctcctcccaaaaggtgctaaacctctctgacctgtgtacattcacaaaccacagctagaattcctccacctaggattaagctggagagaagtaagtaatttaggtttcatggtactgtagaggccaggctgaaatgtcatatctgaaggaagaaagcagcagctggacaatgtttctttgcaaagcaacactcgaaccaaaagatgcctcaatcccattttgatattcattttagtgaaaggatgcatcagacctgttccacatcatgcacatgggaaagggtggttatcattttccttctaacaagtaggtacagatattcggttactacacgtgcacctgtagcagtatttctagaaacatccctttttgttgagaacctcccttgaatgtctgtcacactcacacctgacgggatggttactggattagagagtagatttggcacatcttttcttagtcttttgattcaaattcaaaacttaacagcacaaaccaggtcagagttactttcggttagaatttattgccatttattcctttttataaatttctatagattatactgttatttttatgttattggcctagagctacacgtatatgggtttgtcctgagtccgttttcaaatgaccttgtgattgatagggaaatggttttgtccatgttcttggaaatacttgtgtatgtacagaaggaagggagggattatttttctacaaagtaatttatgatttctaattttctaatgtgccttggatatgtgccaaatgatggaaaagaaacagtaaactttatgattcttga

SEQ ID NO: 452778 - DNA, 2139 bp, Homo sapiens
catcgcgcctggccttttattatttttaaatagagacagggccttgctatgttgcccaggctagtcttgaacacctgggctcaagcaatcctcccacctcagtctcccaaagtggtgggattgcacgcgtgagccaccgtgcccagttaattaatgtgtttcaatgagtacttactatatgggggccctcaacagcctcatgataagcatatgatagtagatcttattatggttgagctggttgcatggagtggttgaatccccagcgtggagtccacagagagggcagagcttttacccagtggtaaaagcagagccgggctccccatgcaggcctgcttttaccactgggctttatggcctccaagctccatttgtaattatttctgagctttttctgcccagtcacactaatactgacatttagatcaaaaacaaataataacctattaaaaaagaataaaaacattactgttccttttccctttcaaattgcagaattcaaaaataatggaattgcttcaggtggtaccaagctgtgttgcttcattagatgatgtggctgaaactgaccgcaaggagtatgtcactgttaagatcaggaaaaaatggaactcaaaactgtatgatctaccagatgagccttttacaagacagttttactttgtccactcagctggtcagtttaagggaaagacttcaagggagattatggcaagagatagaagtgtccctaatttaaccgaaggttctttgcatgagccagggaggcaaagtgtcacactgagacagaataacctgccagctcagagtggatctcatgctgctgagaaaggcaacagcgactggccagagaggcctggactgacacagactggccctggacacagacggatgctgcggagacacacggtagaggatgcggtcgtgtcccagggcccggaggctgctggccccctctccactccccaagaggttagtgcttcccggtcctaacaggaatgaggagttgttgaacccactgctaggaagcaaggatgcaacaagatgatgctgagcgtgaacacatctgagaactaaatgtgcttccatgagactggcttgagaagtcttcagcaccaagttcctgaaagcttttctgtggcaggaaagaatgcaacaaaaaagttaaccaccaccatctctctcctcttcaaagctaatgaatacaattgaaacagacaaaaattccagtagcatccagatccttaagccagaggtgcatgcttctttttaagtatgagggtttgttggtcacagtgggagaggtttcaccaccgcattctgacctcctcctcccaaaaggtgctaaacctctctgacctgtgtacattcacaaaccacagctagaattcctccacctaggattaagctggagagaagtaagtaatttaggtttcatggtactgtagaggccaggctgaaatgtcatatctgaaggaagaaagcagcagctggacaatgtttctttgcaaagcaacactcgaaccaaaagatgcctcaatcccattttgatattcattttagtgaaaggatgcatcagacctgttccacatcatgcacatgggaaagggtggttatcattttccttctaacaagtaggtacagatattcggttactacacgtgcacctgtagcagtatttctagaaacatccctttttgttgagaacctcccttgaatgtctgtcacactcacacctgacgggatggttactggattagagagtagatttggcacatcttttcttagtcttttgattcaaattcaaaacttaacagcacaaaccaggtcagagttactttcggttagaatttattgccatttattcctttttataaatttctatagattatactgttatttttatgttattggcctagagctacacgtatatgggtttgtcctgagtccgttttcaaatgaccttgtgattgatagggaaatggttttgtccatgttcttggaaatacttgtgtatgtacagaaggaagggagggattatttttctacaaagtaatttatgatttctaattttctaatgtgccttggatatgtgccaaatgatggaaaagaaacagtaaactttatgattcttga

SEQ ID NO: 452779 - DNA, 4122 bp, Homo sapiens
acggcggagtaaggggtgggctatagggccagatcgccgcgcgagggtggtgggcatcgaggtcccagcagcggacgagggaggtgccgccgtcgcccaggatgggctgggaatgaagcgatgtagccttttaagagatttgctctgacccatctgaagtccatatggctctgtatgatgaagacctcctgaaaaatcctttctatctggctctgcaaaagtgccgccctgacttgtgcagcaaagtggcccaaatccatggcattgtcttagtaccctgcaaaggaagcctgtcgagcagcatccagtctacttgtcagtttgagtcctacattttgatacctgtggaagagcattttcagaccttaaatggaaaggatgtctttattcaagggaacaggattaaattaggagctggttttgcctgtcttctctcagtgcccattctctttgaagaaactttctacaatgaaaaagaagagagtttcagcatcctgtgtatagcccatcctttggaaaagagagagagttcagaagagcctttggcaccctcagatcccttttccctgaaaaccattgaagatgtgagagagttcttgggaagacactccgagcgatttgacaggaacatcgcctctttccatcgaacattccgagaatgcgagagaaagagcctccgtcaccacatagactcagcgaatgctctctacaccaaatgcctccagcagcttctgagggactctcacctgaaaatgctcgccaagcaggaggcccagatgaacctgatgaagcaggcagtggagatatacgtccatcatgaaatttacaacctgatctttaaatacgtggggaccatggaggcaagtgaggatgcggcctttaacaaaatcacaagaagccttcaagatcttcagcagaaagatattggtgtgaaaccggagttcagctttaacatacctcgtgccaaaagagagctggctcagctgaacaaatgcacctccccacagcagaagcttgtctgcttgcgaaaagtggtgcagctcattacacagtctccaagccagagagtgaacctggagaccatgtgtgctgatgatctgctatcagtcctgttatacttgcttgtgaaaacggagatccctaattggatggcaaatttgagttacatcaaaaacttcaggtttagcagcttggcaaaggatgaactgggatactgcctgacctcattcgaagctgccattgaatatattcggcaaggaagcctctctgctaaaccccctgagtctgagggatttggagacaggctgttccttaagcagagaatgagcttactctctcagatgacttcgtctcccaccgactgcctgtttaagcacattgcatcaggtaaccagaaagaagtggagagacttctgagccaagaggaccatgataaagataccgtccaaaagatgtgtcaccctctctgcttctgcgatgactgtgagaaactcgtctctgggaggttgaatgatccctcagttgtcactccattctccagagacgacagggggcacacccctctccatgtggctgctgtctgtgggcaggcatccctcatcgacctcctggtttccaagggcgccatggtaaatgccacagactaccatggggccactccgctccacctggcctgtcagaagggctaccagagcgtgacgctgctgctgctgcactacaaggccagcgcggaagtgcaggacaacaatgggaatacgccactccacctggcctgcacctacggccacgaggactgtgtgaaggctctggtttactacgacgtggagtcgtgcagacttgacattggcaatgagaaaggagacacccctctacacattgctgcccgctggggctaccaaggcgtcatagagacattgctgcagaacggagcgtccaccgagatccagaacagactgaaggagacgcccctcaagtgtgcattaaactcaaagattctgtctgtaatggaagcctatcacctgtccttcgagaggaggcagaagtcgtccgaggcccctgtgcagtccccgcagcgctccgtggactccatcagccaagagtcctccacttccagcttctcctccatgtcagccggctcaaggcaggaggagaccaagaaggactacagagaggtagaaaaacttttgagagcagttgctgatggagatctagaaatggtgcgttacctgttggaatggacagaggaggacctggaggatgcggaggacactgtcagtgcagcagaccccgaattctgtcacccgttgtgccagtgccccaagtgtgccccagctcagaagaggctggcgaaggttcctgccagtgggcttggtgtgaacgtgaccagccaggacggctcctccccgctgcatgtcgccgccctgcacggccgggcggacctcatccgcctcctgctgaagcacggggccaacgcaggtgccaggaacgcagaccaagccgtcccgctccacctggcctgccagcagggccactttcaggtggtgaagtgtctgttagattcgaatgcaaaacccaataagaaggacctcagtggaaacacgcccctcatttacgcctgctccggtggccatcacgagcttgtggcactgctgctacagcacggggcctccattaacgcttctaacaataagggcaacacagcgctgcacgaggctgtgattgaaaagcacgtcttcgtggtagagctgcttctgctccacggagcgtcagttcaggtgctgaacaagcggcagcgcacggctgtagactgtgctgaacagaattcaaaaataatggaattgcttcaggtggtaccaagctgtgttgcttcattagatgatgtggctgaaactgaccgcaaggagtatgtcactgttaagatcaggaaaaaatggaactcaaaactgtatgatctaccagatgagccttttacaagacagttttactttgtccactcagctggtcagtttaagggaaagacttcaagggagattatggcaagagatagaagtgtccctaatttaaccgaaggttctttgcatgagccagggaggcaaagtgtcacactgagacagaataacctgccagctcagagtggatctcatgctgctgagaaaggcaacagcgactggccagagaggcctggactgacacagactggccctggacacagacggatgctgcggagacacacggtagaggatgcggtcgtgtcccagggcccggaggctgctggccccctctccactccccaagaggttagtgcttcccggtcctaacaggaatgaggagttgttgaacccactgctaggaagcaaggatgcaacaagatgatgctgagcgtgaacacatctgagaactaaatgtgcttccatgagactggcttgagaagtcttcagcaccaagttcctgaaagcttttctgtggcaggaaagaatgcaacaaaaaagttaaccaccaccatctctctcctcttcaaagctaatgaatacaattgaaacagacaaaaattccagtagcatccagatccttaagccagaggtgcatgcttctttttaagtatgagggtttgttggtcacagtgggagaggtttcaccaccgcattctgacctcctcctcccaaaaggtgctaaacctctctgacctgtgtacattcacaaaccacagctagaattcctccacctaggattaagctggagagaagtaagtaatttaggtttcatggtactgtagaggccaggctgaaatgtcatatctgaaggaagaaagcagcagctggacaatgtttctttgcaaagcaacactcgaaccaaaagatgcctcaatcccattttgatattcattttagtgaaaggatgcatcagacctgttccacatcatgcacatgggaaagggtggttatcattttccttctaacaagtaggtacagatattcggttactacacgtgcacctgtagcagtatttctagaaacatccctttttgttgagaacctcccttgaatgtctgtcacactcacacctgacgggagctagactgcgtcttgctcacatcagggttctgccttgctaggtatggcattc

SEQ ID NO: 452780 - DNA, 249 bp, Homo sapiens
ctccatgtcagccggctcaaggcaggaggagaccaagaaggactacagagaggtgaggcttccagaggaagggctggggaggggaggccttggcggccctgggcagtggtgtccagctgaagagccgtggcctgacaagggccgccctctcagcctgcttgcccatgctgaggccgctgctgctctgtggtggccgaggttggtgccttcaagctgggcccagcagcatctcgcggtgctgtatatttt

SEQ ID NO: 452781 - DNA, 959 bp, Homo sapiens
ctaacaattaaccggttcctccattaagcgccagtattaacaactcataagcgatgtggttcaccggtgggcgctaacttcgaagcaacattatcgatatgataggccaatcgccgggtcgatttacagacgggtcgtcttgtcggctcctgtgtgtaggagggatttcggcctgagagcgggccgaggagattggcgacggtgtcgcccgtgttttcgttggcgggtgcctgggctggtgggaacagccgcccgaaggaagcaccatgatttcggccgcgcagttgttggatgagttaatgggccgggaccgaaacctagccccggacgagaagcgcagcaacgtgcggtgggaccacgagagcgtttgtaaatattatctctgtggtttttgtcctgcggaattgttcacaaatacacgttctgatcttggtccgtgtgaaaaaattcatgatgaaaatctacgaaaacagtatgagaagagctctcgtttcatgaaagttggctatgagagagattttttgcgatacttacagagcttacttgcagaagtagaacgtaggatcagacgaggccatgctcgtttggcattatctcaaaaccagcagtcttctggggccgctggcccaacaggcaaaaatgaagaaaaaattcaggttctaacagacaaaattgatgtacttctgcaacagattgaagaattagggtctgaaggaaaagtagaagaagcccaggggatgatgaaattagttgagcaattaaaagaagagagagaactgctaaggtccacaacgtcgacaattgaaagctttgctgcacaagaaaaacaaatggaagtttgtgaagtatgtggagcctttttaatagtaggagatgcccagtcccgggtagatgaccatttgatgggaaaacaacacatgggctatgccaaaattaaagctactgtagaagaattaaaa

SEQ ID NO: 452782 - DNA, 541 bp, Homo sapiens
gccgacctactactactaaattaacagacgctcgactgaaaatctacgaaaacagtatgagaagagctctcgtttcatgaaagttggctatgagagagattttttgcgatacttacagagcttacttgcagaagtagaacgtaggatcagacgaggccatgctcgtttggcattatctcaaaaccagcagtcttctggggccgctggcccaacaggcaaaaatgaagaaaaaattcaggttctaacagacaaaattgatgtacttctgcaacagattgaagaattagggtctgaaggaaaagtagaagaagcccaggggatgatgaaattagttgagcaattaaaagaagagagagaactgctaaggtccacaacgtcgacaattgaaagctttgctgcacaagaaaaacaaatggaagtttgtgaagtatgtggagcctttttaatagtaggagatgcccagtcccgggtagatgaccatttgatgggaaaacaacacatgggctatgccaaaattaaagctactgtagaagaattaaaa

SEQ ID NO: 452783 - DNA, 3546 bp, Homo sapiens
ctaacaattaaccggttcctccattaagcgccagtattaacaactcataagcgatgtggttcaccggtgggcgctaacttcgaagcaacattatcgatatgataggccaatcgccgggtcgatttacagacgggtcgtcttgtcggctcctgtgtgtaggagggatttcggcctgagagcgggccgaggagattggcgacggtgtcgcccgtgttttcgttggcgggtgcctgggctggtgggaacagccgcccgaaggaagcaccatgatttcggccgcgcagttgttggatgagttaatgggccgggaccgaaacctagccccggacgagaagcgcagcaacgtgcggtgggaccacgagagcgtttgtaaatattatctctgtggtttttgtcctgcggaattgttcacaaatacacgttctgatcttggtccgtgtgaaaaaattcatgatgaaaatctacgaaaacagtatgagaagagctctcgtttcatgaaagttggctatgagagagattttttgcgatacttacagagcttacttgcagaagtagaacgtaggatcagacgaggccatgctcgtttggcattatctcaaaaccagcagtcttctggggccgctggcccaacaggcaaaaatgaagaaaaaattcaggttctaacagacaaaattgatgtacttctgcaacagattgaagaattagggtctgaaggaaaagtagaagaagcccaggggatgatgaaattagttgagcaattaaaagaagagagagaactgctaaggtccacaacgtcgacaattgaaagctttgctgcacaagaaaaacaaatggaagtttgtgaagtatgtggagcctttttaatagtaggagatgcccagtcccgggtagatgaccatttgatgggaaaacaacacatgggctatgccaaaattaaagctactgtagaagaattaaaagaaaagttaaggaaaagaaccgaagaacctgatcgtgatgagcgtctaaaaaaggagaagcaagaaagagaagaaagagaaaaagaacgggagagagaaagggaagaaagagaaaggaaaagacgaagggaagaggaagaaagagaaaaagaaagggctcgtgacagagaaagaagaaagagaagtcgttcacgaagtagacactcaagccgaacatcagacagaagatgcagcaggtctcgggaccacaaaaggtcacgaagtagagaaagaaggcggagcagaagtagagatcgacgaagaagcagaagccatgatcgatcagaaagaaaacacagatctcgaagtcgggatcgaagaagatcaaaaagccgggatcgaaagtcatataagcacaggagcaaaagtcgggacagagaacaagatagaaaatccaaggagaaagaaaagaggggatctgatgataaaaaaagtagtgtgaagtccggtagtcgagaaaagcagagtgaagacacaaacactgaatcgaaggaaagtgatactaagaatgaggtcaatgggaccagtgaagacattaaatctgaaggtgacactcagtccaattaaaactgatctgataagacctcagatcagacagaggtaagtgtattgtttctcactttgattagggctttttgttactgtttgacagtgcagcgtaagtatgcacagatgaagatggaactaagccgagtaagaagacatacaaaagcctcttctgaaggaaaagacagtgtagtcctgcaaaacattttgaggtacattgttttgtctcagctattttgtagcagactcgtgcccccattagtgtgcctctttggaaattatcgcccacatttgtaatatagtcgccattgaaaagttaattatcctttttttagggattttgatgtcatttcttttttttttttaataaaaaggttgaactgtttttttttttctttttggtattaagtccatcttgtgttggtacattggcagagacatatgctttaaaaacttaaatatttcggaggcacatgttggactactttgttttaattaaactgctagtatttctttgtcaaggatgtttctagttttttgctttattgccttgcattctaatgcagtttgttctgtaactcgagagccagtagcattggattgatggaagtgtagggtttatgaattattgcagctgactaccatacctcacacagcgttggtgttgtgagcggcccatgaaaagccaaattaaaaatcaaggattcagtcaaactaagcaggtactcatgccaggtactcctttctctacccacatccatgtttgaatgctattgcctgtgatctttacgcttaactgttgtgtatcttttttgttctttacaagaagtgcagaggggttttttgtgtattgcgtgaaaacttataaaacaaatgttaacagaatggaattttttttcaactgtatgtagggctgcagtggtggccagaattagatatctttaaagaattttaaatacaataaacacttcatattattcgccttgttacactcaatgcaattctcaagtctataagaggtatgtgcttaatatttcctactgtgtaggagaatttgcagtcagccataggtatgtaggaatagtcactcactggctgatacatttaaagcagcagtgtgaatagcaaggacagacaccttcaatttgtgaaatcaaagaactgatgcactatatagaacgaatttgggtttttaaagaaatattaaaagttaggtactgtaagtgttcttaaaacctgtaaacttcattctgtgggctagtggtgtgggacaaaatattcctaatgaaaggaagtaccaattagttgatttgttggtggcattccccttttgggaaagcaatgtaaggttatgtctgtgtatgtcattcacacttaggcaagcatacacaggcacatggctttaagaaccacactgatgccttgataattaaaaagaatacaagcattccatgtacacatgttaattagcagttagtgactgggccaacactttctcataaaaattggccttttacatgttgtctaattatcatttttccccaaattttgcgttgtaggactactgttcgaagatttttggaagaatactgagaacggcataaagtgaagatcgacatttaaaaaatgaggtgaaagaaagctatagtggcatagaaaaagtataaagctcagttagtttttttattattattattattaaaagttaattcaggactgatgtgacctaccagatttcagaacatgtgttaatagtatatatgccactgaaaacttaggtcctgtatcatacttttttctttaagactttttaagaaatattacttaaacatgtggcttgctcagtgtttaattgcaagttttcaatcttggactttgaaaacaggattaaacgttagtattcgtgtgaatcagactaagtgggatttcatttttacaactctgctctacttagcctttggatttagaagtaaaaataaagtatctctgactttctgttaca

SEQ ID NO: 452784 - DNA, 3739 bp, Homo sapiens
ctaacaattaaccggttcctccattaagcgccagtattaacaactcataagcgatgtggttcaccggtgggcgctaacttcgaagcaacattatcgatatgataggccaatcgccgggtcgatttacagacgggtcgtcttgtcggctcctgtgtgtaggagggatttcggcctgagagcgggccgaggagattggcgacggtgtcgcccgtgttttcgttggcgggtgcctgggctggtgggaacagccgcccgaaggaagcaccatgatttcggccgcgcagttgttggatgagttaatgggccgggaccgaaacctagccccggacgagaagcgcagcaacgtgcggtgggaccacgagagcgtttgtaaatattatctctgtggtttttgtcctgcggaattgttcacaaatacacgttctgatcttgatgtatttggaagaggagataacattagagatgtcagcaaatttttggaagatgacaagtggatggaggagtagcagcaaacgcaacagagcagagcaacctgtaccctaaaagcctgcagaaggggatactaaacagaagcgagtgtttgatcagcagaaccctggacaggctcaggatttggaggcaccaggtccgtgtgaaaaaattcatgatgaaaatctacgaaaacagtatgagaagagctctcgtttcatgaaagttggctatgagagagattttttgcgatacttacagagcttacttgcagaagtagaacgtaggatcagacgaggccatgctcgtttggcattatctcaaaaccagcagtcttctggggccgctggcccaacaggcaaaaatgaagaaaaaattcaggttctaacagacaaaattgatgtacttctgcaacagattgaagaattagggtctgaaggaaaagtagaagaagcccaggggatgatgaaattagttgagcaattaaaagaagagagagaactgctaaggtccacaacgtcgacaattgaaagctttgctgcacaagaaaaacaaatggaagtttgtgaagtatgtggagcctttttaatagtaggagatgcccagtcccgggtagatgaccatttgatgggaaaacaacacatgggctatgccaaaattaaagctactgtagaagaattaaaagaaaagttaaggaaaagaaccgaagaacctgatcgtgatgagcgtctaaaaaaggagaagcaagaaagagaagaaagagaaaaagaacgggagagagaaagggaagaaagagaaaggaaaagacgaagggaagaggaagaaagagaaaaagaaagggctcgtgacagagaaagaagaaagagaagtcgttcacgaagtagacactcaagccgaacatcagacagaagatgcagcaggtctcgggaccacaaaaggtcacgaagtagagaaagaaggcggagcagaagtagagatcgacgaagaagcagaagccatgatcgatcagaaagaaaacacagatctcgaagtcgggatcgaagaagatcaaaaagccgggatcgaaagtcatataagcacaggagcaaaagtcgggacagagaacaagatagaaaatccaaggagaaagaaaagaggggatctgatgataaaaaaagtagtgtgaagtccggtagtcgagaaaagcagagtgaagacacaaacactgaatcgaaggaaagtgatactaagaatgaggtcaatgggaccagtgaagacattaaatctgaaggtgacactcagtccaattaaaactgatctgataagacctcagatcagacagaggtaagtgtattgtttctcactttgattagggctttttgttactgtttgacagtgcagcgtaagtatgcacagatgaagatggaactaagccgagtaagaagacatacaaaagcctcttctgaaggaaaagacagtgtagtcctgcaaaacattttgaggtacattgttttgtctcagctattttgtagcagactcgtgcccccattagtgtgcctctttggaaattatcgcccacatttgtaatatagtcgccattgaaaagttaattatcctttttttagggattttgatgtcatttcttttttttttttaataaaaaggttgaactgtttttttttttctttttggtattaagtccatcttgtgttggtacattggcagagacatatgctttaaaaacttaaatatttcggaggcacatgttggactactttgttttaattaaactgctagtatttctttgtcaaggatgtttctagttttttgctttattgccttgcattctaatgcagtttgttctgtaactcgagagccagtagcattggattgatggaagtgtagggtttatgaattattgcagctgactaccatacctcacacagcgttggtgttgtgagcggcccatgaaaagccaaattaaaaatcaaggattcagtcaaactaagcaggtactcatgccaggtactcctttctctacccacatccatgtttgaatgctattgcctgtgatctttacgcttaactgttgtgtatcttttttgttctttacaagaagtgcagaggggttttttgtgtattgcgtgaaaacttataaaacaaatgttaacagaatggaattttttttcaactgtatgtagggctgcagtggtggccagaattagatatctttaaagaattttaaatacaataaacacttcatattattcgccttgttacactcaatgcaattctcaagtctataagaggtatgtgcttaatatttcctactgtgtaggagaatttgcagtcagccataggtatgtaggaatagtcactcactggctgatacatttaaagcagcagtgtgaatagcaaggacagacaccttcaatttgtgaaatcaaagaactgatgcactatatagaacgaatttgggtttttaaagaaatattaaaagttaggtactgtaagtgttcttaaaacctgtaaacttcattctgtgggctagtggtgtgggacaaaatattcctaatgaaaggaagtaccaattagttgatttgttggtggcattccccttttgggaaagcaatgtaaggttatgtctgtgtatgtcattcacacttaggcaagcatacacaggcacatggctttaagaaccacactgatgccttgataattaaaaagaatacaagcattccatgtacacatgttaattagcagttagtgactgggccaacactttctcataaaaattggccttttacatgttgtctaattatcatttttccccaaattttgcgttgtaggactactgttcgaagatttttggaagaatactgagaacggcataaagtgaagatcgacatttaaaaaatgaggtgaaagaaagctatagtggcatagaaaaagtataaagctcagttagtttttttattattattattattaaaagttaattcaggactgatgtgacctaccagatttcagaacatgtgttaatagtatatatgccactgaaaacttaggtcctgtatcatacttttttctttaagactttttaagaaatattacttaaacatgtggcttgctcagtgtttaattgcaagttttcaatcttggactttgaaaacaggattaaacgttagtattcgtgtgaatcagactaagtgggatttcatttttacaactctgctctacttagcctttggatttagaagtaaaaataaagtatctctgactttctgttaca

SEQ ID NO: 452785 - DNA, 3802 bp, Homo sapiens
ctaacaattaaccggttcctccattaagcgccagtattaacaactcataagcgatgtggttcaccggtgggcgctaacttcgaagcaacattatcgatatgataggccaatcgccgggtcgatttacagacgggtcgtcttgtcggctcctgtgtgtaggagggatttcggcctgagagcgggccgaggagattggcgacggtgtcgcccgtgttttcgttggcgggtgcctgggctggtgggaacagccgcccgaaggaagcaccatgatttcggccgcgcagttgttggatgagttaatgggccgggaccgaaacctagccccggacgagaagcgcagcaacgtgcggtgggaccacgagagcgtttgtaaatattatctctgtggtttttgtcctgcggaattgttcacaaatacacgttctgatcttgatgtatttggaagaggagataacattagagatgtcagcaaatttttggaagatgacaagtggatggaggagtagcagcaaacgcaacagagcagagcaacctgtaccctaaaagcctgcagaaggggatactaaacagaagcgagtgtttgatcagcagaaccctggacaggctcaggatttggaggcaccaggcagaagaaaagaggattcttctctagagaaagtgaacagttcctgagaagtgatctctgcaggtccgtgtgaaaaaattcatgatgaaaatctacgaaaacagtatgagaagagctctcgtttcatgaaagttggctatgagagagattttttgcgatacttacagagcttacttgcagaagtagaacgtaggatcagacgaggccatgctcgtttggcattatctcaaaaccagcagtcttctggggccgctggcccaacaggcaaaaatgaagaaaaaattcaggttctaacagacaaaattgatgtacttctgcaacagattgaagaattagggtctgaaggaaaagtagaagaagcccaggggatgatgaaattagttgagcaattaaaagaagagagagaactgctaaggtccacaacgtcgacaattgaaagctttgctgcacaagaaaaacaaatggaagtttgtgaagtatgtggagcctttttaatagtaggagatgcccagtcccgggtagatgaccatttgatgggaaaacaacacatgggctatgccaaaattaaagctactgtagaagaattaaaagaaaagttaaggaaaagaaccgaagaacctgatcgtgatgagcgtctaaaaaaggagaagcaagaaagagaagaaagagaaaaagaacgggagagagaaagggaagaaagagaaaggaaaagacgaagggaagaggaagaaagagaaaaagaaagggctcgtgacagagaaagaagaaagagaagtcgttcacgaagtagacactcaagccgaacatcagacagaagatgcagcaggtctcgggaccacaaaaggtcacgaagtagagaaagaaggcggagcagaagtagagatcgacgaagaagcagaagccatgatcgatcagaaagaaaacacagatctcgaagtcgggatcgaagaagatcaaaaagccgggatcgaaagtcatataagcacaggagcaaaagtcgggacagagaacaagatagaaaatccaaggagaaagaaaagaggggatctgatgataaaaaaagtagtgtgaagtccggtagtcgagaaaagcagagtgaagacacaaacactgaatcgaaggaaagtgatactaagaatgaggtcaatgggaccagtgaagacattaaatctgaaggtgacactcagtccaattaaaactgatctgataagacctcagatcagacagaggtaagtgtattgtttctcactttgattagggctttttgttactgtttgacagtgcagcgtaagtatgcacagatgaagatggaactaagccgagtaagaagacatacaaaagcctcttctgaaggaaaagacagtgtagtcctgcaaaacattttgaggtacattgttttgtctcagctattttgtagcagactcgtgcccccattagtgtgcctctttggaaattatcgcccacatttgtaatatagtcgccattgaaaagttaattatcctttttttagggattttgatgtcatttcttttttttttttaataaaaaggttgaactgtttttttttttctttttggtattaagtccatcttgtgttggtacattggcagagacatatgctttaaaaacttaaatatttcggaggcacatgttggactactttgttttaattaaactgctagtatttctttgtcaaggatgtttctagttttttgctttattgccttgcattctaatgcagtttgttctgtaactcgagagccagtagcattggattgatggaagtgtagggtttatgaattattgcagctgactaccatacctcacacagcgttggtgttgtgagcggcccatgaaaagccaaattaaaaatcaaggattcagtcaaactaagcaggtactcatgccaggtactcctttctctacccacatccatgtttgaatgctattgcctgtgatctttacgcttaactgttgtgtatcttttttgttctttacaagaagtgcagaggggttttttgtgtattgcgtgaaaacttataaaacaaatgttaacagaatggaattttttttcaactgtatgtagggctgcagtggtggccagaattagatatctttaaagaattttaaatacaataaacacttcatattattcgccttgttacactcaatgcaattctcaagtctataagaggtatgtgcttaatatttcctactgtgtaggagaatttgcagtcagccataggtatgtaggaatagtcactcactggctgatacatttaaagcagcagtgtgaatagcaaggacagacaccttcaatttgtgaaatcaaagaactgatgcactatatagaacgaatttgggtttttaaagaaatattaaaagttaggtactgtaagtgttcttaaaacctgtaaacttcattctgtgggctagtggtgtgggacaaaatattcctaatgaaaggaagtaccaattagttgatttgttggtggcattccccttttgggaaagcaatgtaaggttatgtctgtgtatgtcattcacacttaggcaagcatacacaggcacatggctttaagaaccacactgatgccttgataattaaaaagaatacaagcattccatgtacacatgttaattagcagttagtgactgggccaacactttctcataaaaattggccttttacatgttgtctaattatcatttttccccaaattttgcgttgtaggactactgttcgaagatttttggaagaatactgagaacggcataaagtgaagatcgacatttaaaaaatgaggtgaaagaaagctatagtggcatagaaaaagtataaagctcagttagtttttttattattattattattaaaagttaattcaggactgatgtgacctaccagatttcagaacatgtgttaatagtatatatgccactgaaaacttaggtcctgtatcatacttttttctttaagactttttaagaaatattacttaaacatgtggcttgctcagtgtttaattgcaagttttcaatcttggactttgaaaacaggattaaacgttagtattcgtgtgaatcagactaagtgggatttcatttttacaactctgctctacttagcctttggatttagaagtaaaaataaagtatctctgactttctgttaca

SEQ ID NO: 452786 - DNA, 3488 bp, Homo sapiens
ctaacaattaaccggttcctccattaagcgccagtattaacaactcataagcgatgtggttcaccggtgggcgctaacttcgaagcaacattatcgatatgataggccaatcgccgggtcgatttacagacgggtcgtcttgtcggctcctgtgtgtaggagggatttcggcctgagagcgggccgaggagattggcgacggtgtcgcccgtgttttcgttggcgggtgcctgggctggtgggaacagccgcccgaaggaagcaccatgatttcggccgcgcagttgttggatgagttaatgggccgggaccgaaacctagccccggacgagaagcgcagcaacgtgcggtgggaccacgagagcgtttgtaaatattatctctgtggtttttgtcctgcggaattgttcacaaatacacgttctgatcttggtccgtgtgaaaaaattcatgatgaaaatctacgaaaacagtatgagaagagctctcgtttcatgaaagttggctatgagagagattttttgcgatacttacagagcttacttgcagaagtagaacgtaggatcagacgaggccatgctcgtttggcattatctcaaaaccagcagtcttctggggccgctggcccaacaggcaaaaatgaagaaaaaattcaggttctaacagacaaaattgatgtacttctgcaacagattgaagaattagggtctgaaggaaaagtagaagaagcccaggggatgatgaaattagttgagcaattaaaagaagagagagaactgctaaggtccacaacgtcgacaattgaaagctttgctgcacaagaaaaacaaatggaagtttgtgaagtatgtggagcctttttaatagtaggagatgcccagtcccgggtagatgaccatttgatgggaaaacaacacatgggctatgccaaaattaaagctactgtagaagaattaaaagaaaagttaaggaaaagaaccgaagaacctgatcgtgatgagcgtctaaaaaaggagaagcaagaaagagaagaaagagaaaaagaacgggagagagaaagggaagaaagagaaaggaaaagacgaagggaagaggaagaaagagaaaaagaaagggctcgtgacagagaaagaagaaagagaagtcgttcacgaagtagacactcaagccgaacatcagacagaagatgcagcaggtctcgggaccacaaaaggtcacgaagtagagaaagaaggcggagcagaagtagagatcgacgaagaagcagaagccatgatcgatcagaaagaaaacacagatctcgaagtcgggatcgaagaagatcaaaaagccgggatcgaaagtcatataagcacaggagcaaaagtcgggacagagaacaagatagaaaatccaaggagaaagaaaagaggggatctgatgataaaaaaagtagtgtgaagtccggtagtcgagaaaagcagagtgaagacacaaacactgaatcgaaggaaagtgatactaagaatgaggtcaatgggaccagtgaagacattaaatctgaaggtgacactcagtccaattaaaactgatctgataagacctcagatcagacagaggtaagtgtattgtttctcactttgattagggctttttgttactgtttgacagtgcagcgtaagtatgcacagatgaagatggaactaagccgagtaagaagacatacaaaagcctcttctgaaggaaaagacagtgtagtcctgcaaaacattttgaggtacattgttttgtctcagctattttgtagcagactcgtgcccccattagtgtgcctctttggaaattatcgcccacatttgtaatatattttttaataaaaaggttgaactgtttttttttttctttttggtattaagtccatcttgtgttggtacattggcagagacatatgctttaaaaacttaaatatttcggaggcacatgttggactactttgttttaattaaactgctagtatttctttgtcaaggatgtttctagttttttgctttattgccttgcattctaatgcagtttgttctgtaactcgagagccagtagcattggattgatggaagtgtagggtttatgaattattgcagctgactaccatacctcacacagcgttggtgttgtgagcggcccatgaaaagccaaattaaaaatcaaggattcagtcaaactaagcaggtactcatgccaggtactcctttctctacccacatccatgtttgaatgctattgcctgtgatctttacgcttaactgttgtgtatcttttttgttctttacaagaagtgcagaggggttttttgtgtattgcgtgaaaacttataaaacaaatgttaacagaatggaattttttttcaactgtatgtagggctgcagtggtggccagaattagatatctttaaagaattttaaatacaataaacacttcatattattcgccttgttacactcaatgcaattctcaagtctataagaggtatgtgcttaatatttcctactgtgtaggagaatttgcagtcagccataggtatgtaggaatagtcactcactggctgatacatttaaagcagcagtgtgaatagcaaggacagacaccttcaatttgtgaaatcaaagaactgatgcactatatagaacgaatttgggtttttaaagaaatattaaaagttaggtactgtaagtgttcttaaaacctgtaaacttcattctgtgggctagtggtgtgggacaaaatattcctaatgaaaggaagtaccaattagttgatttgttggtggcattccccttttgggaaagcaatgtaaggttatgtctgtgtatgtcattcacacttaggcaagcatacacaggcacatggctttaagaaccacactgatgccttgataattaaaaagaatacaagcattccatgtacacatgttaattagcagttagtgactgggccaacactttctcataaaaattggccttttacatgttgtctaattatcatttttccccaaattttgcgttgtaggactactgttcgaagatttttggaagaatactgagaacggcataaagtgaagatcgacatttaaaaaatgaggtgaaagaaagctatagtggcatagaaaaagtataaagctcagttagtttttttattattattattattaaaagttaattcaggactgatgtgacctaccagatttcagaacatgtgttaatagtatatatgccactgaaaacttaggtcctgtatcatacttttttctttaagactttttaagaaatattacttaaacatgtggcttgctcagtgtttaattgcaagttttcaatcttggactttgaaaacaggattaaacgttagtattcgtgtgaatcagactaagtgggatttcatttttacaactctgctctacttagcctttggatttagaagtaaaaataaagtatctctgactttctgttaca

SEQ ID NO: 452787 - DNA, 3459 bp, Homo sapiens
ctaacaattaaccggttcctccattaagcgccagtattaacaactcataagcgatgtggttcaccggtgggcgctaacttcgaagcaacattatcgatatgataggccaatcgccgggtcgatttacagacgggtcgtcttgtcggctcctgtgtgtaggagggatttcggcctgagagcgggccgaggagattggcgacggtgtcgcccgtgttttcgttggcgggtgcctgggctggtgggaacagccgcccgaaggaagcaccatgatttcggccgcgcagttgttggatgagttaatgggccgggaccgaaacctagccccggacgagaagcgcagcaacgtgcggtgggaccacgagagcgtttgtaaatattatctctgtggtttttgtcctgcggaattgttcacaaatacacgttctgatcttggtccgtgtgaaaaaattcatgatgaaaatctacgaaaacagtatgagaagagctctcgtttcatgaaagttggctatgagagagattttttgcgatacttacagagcttacttgcagaagtagaacgtaggatcagacgaggccatgctcgtttggcattatctcaaaaccagcagtcttctggggccgctggcccaacaggcaaaaatgaagaaaaaattcaggttctaacagacaaaattgatgtacttctgcaacagattgaagaattagggtctgaaggaaaagtagaagaagcccaggggatgatgaaattagttgagcaattaaaagaagagagagaactgctaaggtccacaacgtcgacaattgaaagctttgctgcacaagaaaaacaaatggaagtttgtgaagtatgtggagcctttttaatagtaggagatgcccagtcccgggtagatgaccatttgatgggaaaacaacacatgggctatgccaaaattaaagctactgtagaagaattaaaagaaaagttaaggaaaagaaccgaagaacctgatcgtgatgagcgtctaaaaaaggagaagcaagaaagagaagaaagagaaaaagaacgggagagagaaagggaagaaagagaaaggaaaagacgaagggaagaggaagaaagagaaaaagaaagggctcgtgacagagaaagaagaaagagaagtcgttcacgaagtagacactcaagccgaacatcagacagaagatgcagcaggtctcgggaccacaaaaggtcacgaagtagagaaagaaggcggagcagaagtagagatcgacgaagaagcagaagccatgatcgatcagaaagaaaacacagatctcgaagtcgggatcgaagaagatcaaaaagccgggatcgaaagtcatataagcacaggagcaaaagtcgggacagagaacaagatagaaaatccaaggagaaagaaaagaggggatctgatgataaaaaaagtagtgtgaagtccggtagtcgagaaaagcagagtgaagacacaaacactgaatcgaaggaaagtgatactaagaatgaggtcaatgggaccagtgaagacattaaatctgaaggtgacactcagtccaattaaaactgatctgataagacctcagatcagacagaggtaagtgtattgtttctcactttgattagggctttttgttactgtttgacagtgcagcgtaagtatgcacagatgaagatggaactaagccgagtaagaagacatacaaaagcctcttctgaaggaaaagacagtgtagtcctgcaaaacattttgaggtacattgttttgtctcagctattttgtagcagactcgtgcccccattagtgtgcctctttggaaattatcgcccacatttgtaatatagtcgccattgaaaagttaattatcctttttttagggattttgatgtcatttcttttttttttttaataaaaaggttgaactgtttttttttttctttttggtattaagtccatcttgtgttggtacattggcagagacatatgctttaaaaacttaaatatttcggaggcacatgttggactactttgttttaattaaactgctagtatttctttgtcaaggatgtttctagttttttgctttattgccttgcattctaatgcagtttgttctgtaactcgagagccagtagcattggattgatggaagtgtagggtttatgaattattgcagctgactaccatacctcacacagcgttggtgttgtgagcggcccatgaaaagccaaattaaaaatcaaggattcagtcaaactaagcaggtactcatgccaggtactcctttctctacccacatccatgtttgaatgctattgcctgtgatctttacgcttaactgttgtgtatcttttttgttctttacaagaagtgcagaggggttttttgtgtattgcgtgaaaacttataaaacaaatgttaacagaatggaattttttttcaactgtatgtagggctgcagtggtggccagaattagatatctttaaagaattttaaatacaataaacacttcatattattcgccttgttacactcaatgcaattctcaagtctataagaggtatgtgcttaatatttcctactgtgtaggagaatttgcagtcagccataggtatgtaggaatagtcactcactggctgatacatttaaagcagcagtgtgaatagcaaggacagacaccttcaatttgtgaaatcaaagaactgatgcactatatagaacgaatttgggtttttaaagaaatattaaaagttaggtactgtaagtgttcttaaaacctgtaaacttcattctgtgggctagtggtgtgggacaaaatattcctaatgaaaggaagtaccaattagttgatttgttggtggcattccccttttgggaaagcaatgtaaggttatgtctgtgtatgtcattcacacttaggcaagcatacacaggcacatggctttaagaaccacactgatgccttgataattaaaaagaatacaagcattccatgtacacatgttaattagcagttagtgactgggccaacactttctcataaaaattggccttttacatgttgtctaattatcatttttccccaaattttgcgttgtaggactactgttcgaagatttttggaagaatactgagaacggcataaagtgaagatcgacatttaaaaaatgaggtgaaagaaagctatagtggcatagaaaaagtataaagctcagttagtttttttattattattattattaaaagttaattcaggactgatgtgacctaccagatttcagaacatgtgttaatagtatatatgccactgaaaacttaggtcctgtatcatacttttttctttaagactttttaagaaatattacttaaacatgtggcttgctcagtgtttaattgcaagttttcaatcttggactttgaaaacaggattaaacgttagtattcgtgtgaatcaga

SEQ ID NO: 452788 - DNA, 3614 bp, Homo sapiens
ctaacaattaaccggttcctccattaagcgccagtattaacaactcataagcgatgtggttcaccggtgggcgctaacttcgaagcaacattatcgatatgataggccaatcgccgggtcgatttacagacgggtcgtcttgtcggctcctgtgtgtaggagggatttcggcctgagagcgggccgaggagattggcgacggtgtcgcccgtgttttcgttggcgggtgcctgggctggtgggaacagccgcccgaaggaagcaccatgatttcggccgcgcagttgttggatgagttaatgggccgggaccgaaacctagccccggacgagaagcgcagcaacgtgcggtgggaccacgagagcgtttgtaaatattatctctgtggtttttgtcctgcggaattgttcacaaatacacgttctgatcttggtccgtgtgaaaaaattcatgatgaaaatctacgaaaacagtatgagaagagctctcgtttcatgaaagttggctatgagagagattttttgcgatacttacagagcttacttgcagaagtagaacgtaggatcagacgaggccatgctcgtttggcattatctcaaaaccagcagtcttctggggccgctggcccaacaggcaaaaatgaagaaaaaattcaggttctaacagacaaaattgatgtacttctgcaacagattgaagaattagggtctgaaggaaaagtagaagaagcccaggggatgatgaaattagttgagcaattaaaagaagagagagaactgctaaggtccacaacgtcgacaattgaaagctttgctgcacaagaaaaacaaatggaagtttgtgaagtatgtggagcctttttaatagtaggagatgcccagtcccgggtagatgaccatttgatgggaaaacaacacatgggctatgccaaaattaaagctactgtagaagaattaaaagaaaagttaaggaaaagaaccgaagaacctgatcgtgatgagcgtctaaaaaaggagaagcaagaaagagaagaaagagaaaaagaacgggagagagaaagggaagaaagagaaaggaaaagacgaagggaagaggaagaaagagaaaaagaaagggctcgtgacagagaaagaagaaagagaagtcgttcacgaagtagacactcaagccgaacatcagacagaagatgcagcaggtctcgggaccacaaaaggtcacgaagtagagaaagaaggcggagcagaagtagagatcgacgaagaagcagaagccatgatcgatcagaaagaaaacacagatctcgaagtcgggatcgaagaagatcaaaaagccgggatcgaaagtcatataagcacaggagcaaaagtcgggacagagaacaagatagaaaatccaaggagaaagaaaagaggggatctgatgataaaaaaagtagtgtgaagtccggtagtcgagaaaagcagagtgaagacacaaacactgaatcgaaggaaagtgatactaagaatgaggtcaatgggaccagtgaagacattaaatctgaaggtgacactcagtccaattaaaactgatctgataagacctcagatcagacagaggtaagtgtattgtttctcactttgattagggctttttgttactgtttgacagtgcagcgtaagtatgcacagatgaagatggaactaagccgagtaagaagacatacaaaagcctcttctgaaggaaaagacagtgtagtcctgcaaaacattttgaggtacattgttttgtctcagctattttgtagcagactcgtgcccccattagtgtgcctctttggaaattatcgcccacatttgtaatatagtcgccattgaaaagttaattatcctttttttagggattttgatgtcatttcttttttttttttaataaaaaggttgaactgtttttttttttctttttggtattaagtccatcttgtgttggtacattggcagagacatatgctttaaaaacttaaatatttcggaggcacatgttggactactttgttttaattaaactgctagtatttctttgtcaaggatgtttctagttttttgctttattgccttgcattctaatgcagtttgttctgtaactcgagagccagtagcattggattgatggaagtgtagggtttatgaattattgcagctgactaccatacctcacacagcgttggtgttgtgagcggcccatgaaaagccaaattaaaaatcaaggattcagtcaaactaagcaggtactcatgccaggtactcctttctctacccacatccatgtttgaatgctattgcctgtgatctttacgcttaactgttgtgtatcttttttgttctttacaagaagtgcagaggggttttttgtgtattgcgtgaaaacttataaaacaaatgttaacagaatggaattttttttcaactgtatgtagggctgcagtggtggccagaattagatatctttaaagaattttaaatacaataaacacttcatattattcgccttgttacactcaatgcaattctcaagtctataagaggtatgtgcttaatatttcctactgtgtaggagaatttgcagtcagccataggtatgtaggaatagtcactcactggctgatacatttaaagcagcagtgtgaatagcaaggacagacaccttcaatttgtgaaatcaaagaactgatgcactatatagaacgaatttgggtttttaaagaaatattaaaagttaggtactgtaagtgttcttaaaacctgtaaacttcattctgtgggctagtggtgtgggacaaaatattcctaatgaaaggaagtaccaattagttgatttgttggtggcattccccttttgggaaagcaatgtaaggttatgtctgtgtatgtcattcacacttaggcaagcatacacaggcacatggctttaagaaccacactgatgccttgataattaaaaagaatacaagcattccatgtacacatgttaattagcagttagtgactgggccaacactttctcataaaaattggccttttacatgttgtctaattatcatttttccccaaattttgcgttgtaggactactgttcgaagatttttggaagaatactgagaacggcataaagtgaagatcgacatttaaaaaatgaggtgaaagaaagctatagtggcatagaaaaagtataaagctcagttagtttttttattattattattattaaaagttaattcaggactgatgtgacctaccagatttcagaacatgtgttaatagtatatatgccactgaaaacttaggtcctgtatcatacttttttctttaagactttttaagaaatattacttaaacatgtggcttgctcagtgtttaattgcaagttttcaatcttggactttgaaaacaggattaaacgttagtattcgtgtgaatcagactaagtgggatttcatttttacaactctgctctacttagcctttggatttagaagtaaaaataaagtatctctgactttctgttacaaagttgattgtctctgtcattgaaaagttttagtattaatctttttctaataaagttattgactctga

SEQ ID NO: 452789 - DNA, 3229 bp, Homo sapiens
ctcaacgctttatacttcctcatcttgccaggggcagcgaagaatatttgggaggactatcatgaatgcgtgattatgtcagacaccggtctggaaagctgcaagcaaccctttcaccaccatcccctcaaaaatagtaacaaatggtttctcccaccacccacctgcccgtatcctttcaatctctctaatcctcactaaatcacccaggttcaccatatgcatcgagcaactctccattttatcccacgagctggtatttttccccacctgcccagtcttggcgttaacgcccactgggaagtataaagcgttgagctcaaggctgtatacttccaggttctagcagagaggagtgatgtacttctgcaacagattgaagaattagggtctgaaggaaaagtagaagaagcccaggggatgatgaaattagttgagcaattaaaagaagagagagaactgctaaggtccacaacgtcgacaattgaaagctttgctgcacaagaaaaacaaatggaagtttgtgaagtatgtggagcctttttaatagtaggagatgcccagtcccgggtagatgaccatttgatgggaaaacaacacatgggctatgccaaaattaaagctactgtagaagaattaaaagaaaagttaaggaaaagaaccgaagaacctgatcgtgatgagcgtctaaaaaaggagaagcaagaaagagaagaaagagaaaaagaacgggagagagaaagggaagaaagagaaaggaaaagacgaagggaagaggaagaaagagaaaaagaaagggctcgtgacagagaaagaagaaagagaagtcgttcacgaagtagacactcaagccgaacatcagacagaagatgcagcaggtctcgggaccacaaaaggtcacgaagtagagaaagaaggcggagcagaagtagagatcgacgaagaagcagaagccatgatcgatcagaaagaaaacacagatctcgaagtcgggatcgaagaagatcaaaaagccgggatcgaaagtcatataagcacaggagcaaaagtcgggacagagaacaagatagaaaatccaaggagaaagaaaagaggggatctgatgataaaaaaagtagtgtgaagtccggtagtcgagaaaagcagagtgaagacacaaacactgaatcgaaggaaagtgatactaagaatgaggtcaatgggaccagtgaagacattaaatctgaaggtgacactcagtccaattaaaactgatctgataagacctcagatcagacagaggtaagtgtattgtttctcactttgattagggctttttgttactgtttgacagtgcagcgtaagtatgcacagatgaagatggaactaagccgagtaagaagacatacaaaagcctcttctgaaggaaaagacagtgtagtcctgcaaaacattttgaggtacattgttttgtctcagctattttgtagcagactcgtgcccccattagtgtgcctctttggaaattatcgcccacatttgtaatatagtcgccattgaaaagttaattatcctttttttagggattttgatgtcatttcttttttttttttaataaaaaggttgaactgtttttttttttctttttggtattaagtccatcttgtgttggtacattggcagagacatatgctttaaaaacttaaatatttcggaggcacatgttggactactttgttttaattaaactgctagtatttctttgtcaaggatgtttctagttttttgctttattgccttgcattctaatgcagtttgttctgtaactcgagagccagtagcattggattgatggaagtgtagggtttatgaattattgcagctgactaccatacctcacacagcgttggtgttgtgagcggcccatgaaaagccaaattaaaaatcaaggattcagtcaaactaagcaggtactcatgccaggtactcctttctctacccacatccatgtttgaatgctattgcctgtgatctttacgcttaactgttgtgtatcttttttgttctttacaagaagtgcagaggggttttttgtgtattgcgtgaaaacttataaaacaaatgttaacagaatggaattttttttcaactgtatgtagggctgcagtggtggccagaattagatatctttaaagaattttaaatacaataaacacttcatattattcgccttgttacactcaatgcaattctcaagtctataagaggtatgtgcttaatatttcctactgtgtaggagaatttgcagtcagccataggtatgtaggaatagtcactcactggctgatacatttaaagcagcagtgtgaatagcaaggacagacaccttcaatttgtgaaatcaaagaactgatgcactatatagaacgaatttgggtttttaaagaaatattaaaagttaggtactgtaagtgttcttaaaacctgtaaacttcattctgtgggctagtggtgtgggacaaaatattcctaatgaaaggaagtaccaattagttgatttgttggtggcattccccttttgggaaagcaatgtaaggttatgtctgtgtatgtcattcacacttaggcaagcatacacaggcacatggctttaagaaccacactgatgccttgataattaaaaagaatacaagcattccatgtacacatgttaattagcagttagtgactgggccaacactttctcataaaaattggccttttacatgttgtctaattatcatttttccccaaattttgcgttgtaggactactgttcgaagatttttggaagaatactgagaacggcataaagtgaagatcgacatttaaaaaatgaggtgaaagaaagctatagtggcatagaaaaagtataaagctcagttagtttttttattattattattattaaaagttaattcaggactgatgtgacctaccagatttcagaacatgtgttaatagtatatatgccactgaaaacttaggtcctgtatcatacttttttctttaagactttttaagaaatattacttaaacatgtggcttgctcagtgtttaattgcaagttttcaatcttggactttgaaaacaggattaaacgttagtattcgtgtgaatcagactaagtgggatttcatttttacaactctgctctacttagcctttggatttagaagtaaaaataaagtatctctgactttctgttaca

SEQ ID NO: 452790 - DNA, 5097 bp, Homo sapiens
ctaacaattaaccggttcctccattaagcgccagtattaacaactcataagcgatgtggttcaccggtgggcgctaacttcgaagcaacattatcgatatgataggccaatcgccgggtcgatttacagacgggtcgtcttgtcggctcctgtgtgtaggagggatttcggcctgagagcgggccgaggagattggcgacggtgtcgcccgtgttttcgttggcgggtgcctgggctggtgggaacagccgcccgaaggaagcaccatgatttcggccgcgcagttgttggatgagttaatgggccgggaccgaaacctagccccggacgagaagcgcagcaacgtgcggtgggaccacgagagcgtttgtaaatattatctctgtggtttttgtcctgcggaattgttcacaaatacacgttctgatcttggtccgtgtgaaaaaattcatgatgaaaatctacgaaaacagtatgagaagagctctcgtttcatgaaagttggctatgagagagattttttgcgatacttacagagcttacttgcagaagtagaacgtaggatcagacgaggccatgctcgtttggcattatctcaaaaccagcagtcttctggggccgctggcccaacaggcaaaaatgaagaaaaaattcaggttctaacagacaaaattgatgtacttctgcaacagattgaagaattagggtctgaaggaaaagtagaagaagcccaggggatgatgaaattagttgagcaattaaaagaagagagagaactgctaaggtccacaacgtcgacaattgaaagctttgctgcacaagaaaaacaaatggaagtttgtgaagtatgtggagcctttttaatagtaggagatgcccagtcccgggtagatgaccatttgatgggaaaacaacacatgggctatgccaaaattaaagctactgtagaagaattaaaagaaaagttaaggaaaagaaccgaagaacctgatcgtgatgagcgtctaaaaaaggagaagcaagaaagagaagaaagagaaaaagaacgggagagagaaagggaagaaagagaaaggaaaagacgaagggaagaggaagaaagagaaaaagaaagggctcgtgacagagaaagaagaaagagaagtcgttcacgaagtagacactcaagccgaacatcagacagaagatgcagcaggtctcgggaccacaaaaggtcacgaagtagagaaagaaggcggagcagaagtagagatcgacgaagaagcagaagccatgatcgatcagaaagaaaacacagatctcgaagtcgggatcgaagaagatcaaaaagccgggatcgaaagtcatataagcacaggagcaaaagtcgggacagagaacaagatagaaaatccaaggagaaagaaaagaggggatctgatgataaaaaaagtagtgtgaagtccggtagtcgagaaaagcagagtgaagacacaaacactgaatcgaaggaaagtgatactaagaatgaggtcaatgggaccagtgaagacattaaatctgaaggtgacactcagtccaattaaaactgatctgataagacctcagatcagacagaggtaagtgtattgtttctcactttgattagggctttttgttactgtttgacagtgcagcgtaagtatgcacagatgaagatggaactaagccgagtaagaagacatacaaaagcctcttctgaaggaaaagacagtgtagtcctgcaaaacattttgaggtacattgttttgtctcagctattttgtagcagactcgtgcccccattagtgtgcctctttggaaattatcgcccacatttgtaatatagtcgccattgaaaagttaattatcctttttttagggattttgatgtcatttcttttttttttttaataaaaaggttgaactgtttttttttttctttttggtattaagtccatcttgtgttggtacattggcagagacatatgctttaaaaacttaaatatttcggaggcacatgttggactactttgttttaattaaactgctagtatttctttgtcaaggatgtttctagttttttgctttattgccttgcattctaatgcagtttgttctgtaactcgagagccagtagcattggattgatggaagtgtagggtttatgaattattgcagctgactaccatacctcacacagcgttggtgttgtgagcggcccatgaaaagccaaattaaaaatcaaggattcagtcaaactaagcaggtactcatgccaggtactcctttctctacccacatccatgtttgaatgctattgcctgtgatctttacgcttaactgttgtgtatcttttttgttctttacaagaagtgcagaggggttttttgtgtattgcgtgaaaacttataaaacaaatgttaacagaatggaattttttttcaactgtatgtagggctgcagtggtggccagaattagatatctttaaagaattttaaatacaataaacacttcatattattcgccttgttacactcaatgcaattctcaagtctataagaggtatgtgcttaatatttcctactgtgtaggagaatttgcagtcagccataggtatgtaggaatagtcactcactggctgatacatttaaagcagcagtgtgaatagcaaggacagacaccttcaatttgtgaaatcaaagaactgatgcactatatagaacgaatttgggtttttaaagaaatattaaaagttaggtactgtaagtgttcttaaaacctgtaaacttcattctgtgggctagtggtgtgggacaaaatattcctaatgaaaggaagtaccaattagttgatttgttggtggcattccccttttgggaaagcaatgtaaggttatgtctgtgtatgtcattcacacttaggcaagcatacacaggcacatggctttaagaaccacactgatgccttgataattaaaaagaatacaagcattccatgtacacatgttaattagcagttagtgactgggccaacactttctcataaaaattggccttttacatgttgtctaattatcatttttccccaaattttgcgttgtaggactactgttcgaagatttttggaagaatactgagaacggcataaagtgaagatcgacatttaaaaaatgaggtgaaagaaagctatagtggcatagaaaaagtataaagctcagttagtttttttattattattattattaaaagttaattcaggactgatgtgacctaccagatttcagaacatgtgttaatagtatatatgccactgattaaacatgtggcttgctcagtgtttaattgcaagttttcaatcttggactttgaaaacaggattaaacgttagtattcgtgtgaatcagactaagtgggatttcatttttacaactctgctctacttagcctttggatttagaagtaaaaataaagtatctctgactttctgttacaaagttgattgtctctgtcattgaaaagttttagtattaatctttttctaataaagttattgactctgaactagtcccctgttttaaatacaagagttacactattactagaggtgttggtgtacagttttatctgatttgttctgtttaagactaatttttatagactttctaatgttttaaataatggtgcttcaattttaggtggttatgaataaatttgaattttgcttttaatagcaaagatgtgcagtgaactagaatatatttttacatccctgagagattcatttagtagaaaattccaagtatcctgacaagcactctttagctggctagctatgggatgatgtagaaaagcattcaagagctagtttttgttaagtcctgtatcaagattaacccagctgtgtcagtttataaatgtatttgtgtatagggtgtgtagtatatatggcaagggttttttccccccacttaagtgattatttttgtgtcacatctaggaaaaccggcagcatgtttctatctatagccagcttcttcgactgtataaaagtattctctccagctacgtatatacacacatacatatatatcatagcaattccttgtggtttataacttgcaaatactgctatcagtttataggtaaagaaacagtgtgttaaatgacttatccagggagggtcctgtggcttcatgtttatggagttgctaggtctctgcctcatggtccagtgcctgttaagccactgtgttcattctaataggcataatgaattgttaaagaatttactaaaatctcttccaccaaactttgaaaaataatgaagccgcccccactttagaggctctgtatgaaaaaatgctgtggagacagagccctcctggctccctagctgatcctggagatgcagcaatagatgaatgggttatctctgaatttgtaagagataattcacatgaggattaagataaaatgggaagtaaaatctaacaaacacaaagatagctcccaggcactgctttgtgtagtttgacagcattgtggttgtagcagcaaaggacttaaagtgatagtttttaaaccatattctgtccctaagtaataaaaaatctaggaagttactaaaataccagatttgttctgctctgcctcatctagaatcaacgtctaactaacttaaatgaagtataataaatgagttcatatgaaaaggcttcctctatggacacttagatatattgtaactattgaagttacctgggatgtgggggtggtgggaggaggacctgcctccccaggacatctatgactaaggcctggctttagttatggagagagacgtagaagttgaattttacacccaaaattgatgtgactgaagaggaactgattgttgctaaccagctcacaagaatccagtattgagaccagttcactagaagaaacaaacatttctgccatgcagaccaaaaagttattagttggtgaatatgtattttctctttggaaggtctttaaggggagcaaaccagttttaatcaatcagattgcttggtaagtttggaatctgcaatcagttggtcttaaaaaaaaaaa

SEQ ID NO: 452791 - DNA, 1954 bp, Homo sapiens
ctaacaattaaccggttcctccattaagcgccagtattaacaactcataagcgatgtggttcaccggtgggcgctaacttcgaagcaacattatcgatatgataggccaatcgccgggtcgatttacagacgggtcgtcttgtcggctcctgtgtgtaggagggatttcggcctgagagcgggccgaggagattggcgacggtgtcgcccgtgttttcgttggcgggtgcctgggctggtgggaacagccgcccgaaggaagcaccatgatttcggccgcgcagttgttggatgagttaatgggccgggaccgaaacctagccccggacgagaagcgcagcaacgtgcggtgggaccacgagagcgtttgtaaatattatctctgtggtttttgtcctgcggaattgttcacaaatacacgttctgatcttggtccgtgtgaaaaaattcatgatgaaaatctacgaaaacagtatgagaagagctctcgtttcatgaaagttggctatgagagagattttttgcgatacttacagagcttacttgcagaagtagaacgtaggatcagacgaggccatgctcgtttggcattatctcaaaaccagcagtcttctggggccgctggcccaacaggcaaaaatgaagaaaaaattcaggttctaacagacaaaattgatgtacttctgcaacagattgaagaattagggtctgaaggaaaagtagaagaagcccaggggatgatgaaattagttgagcaattaaaagaagagagagaactgctaaggtccacaacgtcgacaattgaaagctttgctgcacaagaaaaacaaatggaagtttgtgaagtatgtggagcctttttaatagtaggagatgcccagtcccgggtagatgaccatttgatgggaaaacaacacatgggctatgccaaaattaaagctactgtagaagaattaaaagaaaagttaaggaaaagaaccgaagaacctgatcgtgatgagcgtctaaaaaaggagaagcaagaaagagaagaaagagaaaaagaacgggagagagaaagggaagaaagagaaaggaaaagacgaagggaagaggaagaaagagaaaaagaaagggctcgtgacagagaaagaagaaagagaagtcgttcacgaagtagacactcaagccgaacatcagacagaagatgcagcaggtctcgggaccacaaaaggtcacgaagtagagaaagaaggcggagcagaagtagagatcgacgaagaagcagaagccatgatcgatcagaaagaaaacacagatctcgaagtcgggatcgaagaagatcaaaaagccgggatcgaaagtcatataagcacaggagcaaaagtcgggacagagaacaagatagaaaatccaaggagaaagaaaagaggggatctgatgataaaaaaagtagtgtgaagtccggtagtcgagaaaagcagagtgaagacacaaacactgaatcgaaggaaagtgatactaagaatgaggtcaatgggaccagtgaagacattaaatctgaaggtgacactcagtccaattaaaactgatctgataagacctcagatcagacagaggactactgttcgaagatttttggaagaatactgagaacggcataaagtgaagatcgacatttaaaaaatgaggtgaaagaaagctatagtggcatagaaaaagtataaagctcagttagtttttttattattattattattaaaagttaattcaggactgatgtgacctaccagatttcagaacatgtgttaatagtatatatgccactgaaaacttaggtcctgtatcatacttttttctttaagactttttaagaaatattacttaaacatgtggcttgctcagtgtttaattgcaagttttcaatcttggactttgaaaacaggattaaacgttagtattcgtgtgaatcaga

SEQ ID NO: 452792 - DNA, 2669 bp, Homo sapiens
tctagccgtggaaacaagagtgaaactctgtctcaaaaggcgaaacagaaagaaagaaagaaagaaagaaagaaagaaagaaagaaagatagaaagaaagaaagaaagaaaggaaagaaagaaagaatgaatgaatgaaagacaagaaagagaagaaagagaaaaagaacgggagagagaaagggaagaaagagaaaggaaaagacgaagggaagaggaagaaagagaaaaagaaagggctcgtgacagagaaagaagaaagagaagtcgttcacgaagtagacactcaagccgaacatcagacagaagatgcagcaggtctcgggaccacaaaaggtcacgaagtagagaaagaaggcggagcagaagtagagatcgacgaagaagcagaagccatgatcgatcagaaagaaaacacagatctcgaagtcgggatcgaagaagatcaaaaagccgggatcgaaagtcatataagcacaggagcaaaagtcgggacagagaacaagatagaaaatccaaggagaaagaaaagaggggatctgatgataaaaaaagtagtgtgaagtccggtagtcgagaaaagcagagtgaagacacaaacactgaatcgaaggaaagtgatactaagaatgaggtcaatgggaccagtgaagacattaaatctgaaggtgacactcagtccaattaaaactgatctgataagacctcagatcagacagaggtaagtgtattgtttctcactttgattagggctttttgttactgtttgacagtgcagcgtaagtatgcacagatgaagatggaactaagccgagtaagaagacatacaaaagcctcttctgaaggaaaagacagtgtagtcctgcaaaacattttgaggtacattgttttgtctcagctattttgtagcagactcgtgcccccattagtgtgcctctttggaaattatcgcccacatttgtaatatagtcgccattgaaaagttaattatcctttttttagggattttgatgtcatttcttttttttttttaataaaaaggttgaactgtttttttttttctttttggtattaagtccatcttgtgttggtacattggcagagacatatgctttaaaaacttaaatatttcggaggcacatgttggactactttgttttaattaaactgctagtatttctttgtcaaggatgtttctagttttttgctttattgccttgcattctaatgcagtttgttctgtaactcgagagccagtagcattggattgatggaagtgtagggtttatgaattattgcagctgactaccatacctcacacagcgttggtgttgtgagcggcccatgaaaagccaaattaaaaatcaaggattcagtcaaactaagcaggtactcatgccaggtactcctttctctacccacatccatgtttgaatgctattgcctgtgatctttacgcttaactgttgtgtatcttttttgttctttacaagaagtgcagaggggttttttgtgtattgcgtgaaaacttataaaacaaatgttaacagaatggaattttttttcaactgtatgtagggctgcagtggtggccagaattagatatctttaaagaattttaaatacaataaacacttcatattattcgccttgttacactcaatgcaattctcaagtctataagaggtatgtgcttaatatttcctactgtgtaggagaatttgcagtcagccataggtatgtaggaatagtcactcactggctgatacatttaaagcagcagtgtgaatagcaaggacagacaccttcaatttgtgaaatcaaagaactgatgcactatatagaacgaatttgggtttttaaagaaatattaaaagttaggtactgtaagtgttcttaaaacctgtaaacttcattctgtgggctagtggtgtgggacaaaatattcctaatgaaaggaagtaccaattagttgatttgttggtggcattccccttttgggaaagcaatgtaaggttatgtctgtgtatgtcattcacacttaggcaagcatacacaggcacatggctttaagaaccacactgatgccttgataattaaaaagaatacaagcattccatgtacacatgttaattagcagttagtgactgggccaacactttctcataaaaattggccttttacatgttgtctaattatcatttttccccaaattttgcgttgtaggactactgttcgaagatttttggaagaatactgagaacggcataaagtgaagatcgacatttaaaaaatgaggtgaaagaaagctatagtggcatagaaaaagtataaagctcagttagtttttttattattattattattaaaagttaattcaggactgatgtgacctaccagatttcagaacatgtgttaatagtatatatgccactgaaaacttaggtcctgtatcatacttttttctttaagactttttaagaaatattacttaaacatgtggcttgctcagtgtttaattgcaagttttcaatcttggactttgaaaacaggattaaacgttagtattcgtgtgaatcagactaagtgggatttcatttttacaactctgctctacttagcctttggatttagaagtaaaaataaagtatctctgactttctgttaca

SEQ ID NO: 452793 - DNA, 2467 bp, Homo sapiens
cgcgttatggtaggcggagggttgtacacgtgaccggagttagtaggaagaggtccgattttggatcgttcacgaagtagacactcaagccgaacatcagacagaagatgcagcaggtctcgggaccacaaaaggtcacgaagtagagaaagaaggcggagcagaagtagagatcgacgaagaagcagaagccatgatcgatcagaaagaaaacacagatctcgaagtcgggatcgaagaagatcaaaaagccgggatcgaaagtcatataagcacaggagcaaaagtcgggacagagaacaagatagaaaatccaaggagaaagaaaagaggggatctgatgataaaaaaagtagtgtgaagtccggtagtcgagaaaagcagagtgaagacacaaacactgaatcgaaggaaagtgatactaagaatgaggtcaatgggaccagtgaagacattaaatctgaaggtgacactcagtccaattaaaactgatctgataagacctcagatcagacagaggtaagtgtattgtttctcactttgattagggctttttgttactgtttgacagtgcagcgtaagtatgcacagatgaagatggaactaagccgagtaagaagacatacaaaagcctcttctgaaggaaaagacagtgtagtcctgcaaaacattttgaggtacattgttttgtctcagctattttgtagcagactcgtgcccccattagtgtgcctctttggaaattatcgcccacatttgtaatatagtcgccattgaaaagttaattatcctttttttagggattttgatgtcatttcttttttttttttaataaaaaggttgaactgtttttttttttctttttggtattaagtccatcttgtgttggtacattggcagagacatatgctttaaaaacttaaatatttcggaggcacatgttggactactttgttttaattaaactgctagtatttctttgtcaaggatgtttctagttttttgctttattgccttgcattctaatgcagtttgttctgtaactcgagagccagtagcattggattgatggaagtgtagggtttatgaattattgcagctgactaccatacctcacacagcgttggtgttgtgagcggcccatgaaaagccaaattaaaaatcaaggattcagtcaaactaagcaggtactcatgccaggtactcctttctctacccacatccatgtttgaatgctattgcctgtgatctttacgcttaactgttgtgtatcttttttgttctttacaagaagtgcagaggggttttttgtgtattgcgtgaaaacttataaaacaaatgttaacagaatggaattttttttcaactgtatgtagggctgcagtggtggccagaattagatatctttaaagaattttaaatacaataaacacttcatattattcgccttgttacactcaatgcaattctcaagtctataagaggtatgtgcttaatatttcctactgtgtaggagaatttgcagtcagccataggtatgtaggaatagtcactcactggctgatacatttaaagcagcagtgtgaatagcaaggacagacaccttcaatttgtgaaatcaaagaactgatgcactatatagaacgaatttgggtttttaaagaaatattaaaagttaggtactgtaagtgttcttaaaacctgtaaacttcattctgtgggctagtggtgtgggacaaaatattcctaatgaaaggaagtaccaattagttgatttgttggtggcattccccttttgggaaagcaatgtaaggttatgtctgtgtatgtcattcacacttaggcaagcatacacaggcacatggctttaagaaccacactgatgccttgataattaaaaagaatacaagcattccatgtacacatgttaattagcagttagtgactgggccaacactttctcataaaaattggccttttacatgttgtctaattatcatttttccccaaattttgcgttgtaggactactgttcgaagatttttggaagaatactgagaacggcataaagtgaagatcgacatttaaaaaatgaggtgaaagaaagctatagtggcatagaaaaagtataaagctcagttagtttttttattattattattattaaaagttaattcaggactgatgtgacctaccagatttcagaacatgtgttaatagtatatatgccactgaaaacttaggtcctgtatcatacttttttctttaagactttttaagaaatattacttaaacatgtggcttgctcagtgtttaattgcaagttttcaatcttggactttgaaaacaggattaaacgttagtattcgtgtgaatcagactaagtgggatttcatttttacaactctgctctacttagcctttggatttagaagtaaaaataaagtatctctgactttctgttaca

SEQ ID NO: 452794 - DNA, 3870 bp, Homo sapiens
ctaacaattaaccggttcctccattaagcgccagtattaacaactcataagcgatgtggttcaccggtgggcgctaacttcgaagcaacattatcgatatgataggccaatcgccgggtcgatttacagacgggtcgtcttgtcggctcctgtgtgtaggagggatttcggcctgagagcgggccgaggagattggcgacggtgtcgcccgtgttttcgttggcgggtgcctgggctggtgggaacagccgcccgaaggaagcaccatgatttcggccgcgcagttgttggatgagttaatgggccgggaccgaaacctagccccggacgagaagcgcagcaacgtgcggtgggaccacgagagcgtttgtaaatattatctctgtggtttttgtcctgcggaattgttcacaaatacacgttctgatcttggtccgtgtgaaaaaattcatgatgaaaatctacgaaaacagtatgagaagagctctcgtttcatgaaagttggctatgagagagattttttgcgatacttacagagcttacttgcagaagtagaacgtaggatcagacgaggccatgctcgtttggcattatctcaaaaccagcagtcttctggggccgctggcccaacaggcaaaaatgaagaaaaaattcaggttctaacagacaaaattgatgtacttctgcaacagattgaagaattagggtctgaaggaaaagtagaagaagcccaggggatgatgaaattagttgagcaattaaaagaagagagagaactgctaaggtccacaacgtcgacaattgaaagctttgctgcacaagaaaaacaaatggaagtttgtgaagtatgtggagcctttttaatagtaggagatgcccagtcccgggtagatgaccatttgatgggaaaacaacacatgggctatgccaaaattaaagctactgtagaagaattaaaagaaaagttaaggaaaagaaccgaagaacctgatcgtgatgagcgtctaaaaaaggagaagcaagaaagagaagaaagagaaaaagaacgggagagagaaagggaagaaagagaaaggaaaagacgaagggaagaggaagaaagagaaaaagaaagggctcgtgacagagaaagaagaaagagaagtcgttcacgaagtagacactcaagccgaacatcagacagaagatgcagcaggtctcgggaccacaaaaggtcacgaagtagagaaagaaggcggagcagaagtagagatcgacgaagaagcagaagccatgatcgatcagaaagaaaacacagatctcgaagtcgggatcgaagaagatcaaaaagccgggatcgaaagtcatataagcacaggagcaaaagtcgggacagagaacaagatagaaaatccaaggagaaagaaaagaggggatctgatgataaaaaaagtagtgtgaagtccggtagtcgagaaaagcagagtgaagacacaaacactgaatcgaaggaaagtgatactaagaatgaggtcaatgggaccagtgaagacattaaatctgaaggtgacactcagtccaattaaaactgatctgataagacctcagatcagacagaggtaagtgtattgtttctcactttgattagggctttttgttactgtttgacagtgcagcgtaagtatgcacagatgaagatggaactaagccgagtaagaagacatacaaaagcctcttctgaaggaaaagacagtgtagtcctgcaaaacattttgagcgttggtgttgtgagcggcccatgaaaagccaaattaaaaatcaaggattcagtcaaactaagcaggactactgttcgaagatttttggaagaatactgagaacggcataaagtgaagatcgacatttaaaaaatgaggtgaaagaaagctatagtggcatagaaaaagtataaagctcagttagtttttttattattattattattaaaagttaattcaggactgatgtgacctaccagatttcagaacatgtgttaatagtatatatgccactgaaaacttaggtcctgtatcatacttttttctttaagactttttaagaaatattacttaaacatgtggcttgctcagtgtttaattgcaagttttcaatcttggactttgaaaacaggattaaacgttagtattcgtgtgaatcagactaagtgggatttcatttttacaactctgctctacttagcctttggatttagaagtaaaaataaagtatctctgactttctgttacaaagttgattgtctctgtcattgaaaagttttagtattaatctttttctaataaagttattgactctgaactagtcccctgttttaaatacaagagttacactattactagaggtgttggtgtacagttttatctgatttgttctgtttaagactaatttttatagactttctaatgttttaaataatggtgcttcaattttaggtggttatgaataaatttgaattttgcttttaatagcaaagatgtgcagtgaactagaatatatttttacatccctgagagattcatttagtagaaaattccaagtatcctgacaagcactctttagctggctagctatgggatgatgtagaaaagcattcaagagctagtttttgttaagtcctgtatcaagattaacccagctgtgtcagtttataaatgtatttgtgtatagggtgtgtagtatatatggcaagggttttttccccccacttaagtgattatttttgtgtcacatctaggaaaaccggcagcatgtttctatctatagccagcttcttcgactgtataaaagtattctctccagctacgtatatacacacatacatatatatcatagcaattccttgtggtttataacttgcaaatactgctatcagtttataggtaaagaaacagtgtgttaaatgacttatccagggagggtcctgtggcttcatgtttatggagttgctaggtctctgcctcatggtccagtgcctgttaagccactgtgttcattctaataggcataatgaattgttaaagaatttactaaaatctcttccaccaaactttgaaaaataatgaagccgcccccactttagaggctctgtatgaaaaaatgctgtggagacagagccctcctggctccctagctgatcctggagatgcagcaatagatgaatgggttatctctgaatttgtaagagataattcacatgaggattaagataaaatgggaagtaaaatctaacaaacacaaagatagctcccaggcactgctttgtgtagtttgacagcattgtggttgtagcagcaaaggacttaaagtgatagtttttaaaccatattctgtccctaagtaataaaaaatctaggaagttactaaaataccagatttgttctgctctgcctcatctagaatcaacgtctaactaacttaaatgaagtataataaatgagttcatatgaaaaggcttcctctatggacacttagatatattgtaactattgaagttacctgggatgtgggggtggtgggaggaggacctgcctccccaggacatctatgactaaggcctggctttagttatggagagagacgtagaagttgaattttacacccaaaattgatgtgactgaagaggaactgattgttgctaaccagctcacaagaatccagtattgagaccagttcactagaagaaacaaacatttctgccatgcagaccaaaaagttattagttggtgaatatgtattttctctttggaaggtctttaaggggagcaaaccagttttaatcaatcagattgcttggtaagtttggaatctgcaatcagttggtcttaaaaaaaaaaa

SEQ ID NO: 452795 - DNA, 2388 bp, Homo sapiens
tgcagcttgcttctgctggtcgactctgaggtatccccaacccgggacacctttggtcacgaagtagagaaagaaggcggagcagaagtagagatcgacgaagaagcagaagccatgatcgatcagaaagaaaacacagatctcgaagtcgggatcgaagaagatcaaaaagccgggatcgaaagtcatataagcacaggagcaaaagtcgggacagagaacaagatagaaaatccaaggagaaagaaaagaggggatctgatgataaaaaaagtagtgtgaagtccggtagtcgagaaaagcagagtgaagacacaaacactgaatcgaaggaaagtgatactaagaatgaggtcaatgggaccagtgaagacattaaatctgaaggtgacactcagtccaattaaaactgatctgataagacctcagatcagacagaggtaagtgtattgtttctcactttgattagggctttttgttactgtttgacagtgcagcgtaagtatgcacagatgaagatggaactaagccgagtaagaagacatacaaaagcctcttctgaaggaaaagacagtgtagtcctgcaaaacattttgaggtacattgttttgtctcagctattttgtagcagactcgtgcccccattagtgtgcctctttggaaattatcgcccacatttgtaatatagtcgccattgaaaagttaattatcctttttttagggattttgatgtcatttcttttttttttttaataaaaaggttgaactgtttttttttttctttttggtattaagtccatcttgtgttggtacattggcagagacatatgctttaaaaacttaaatatttcggaggcacatgttggactactttgttttaattaaactgctagtatttctttgtcaaggatgtttctagttttttgctttattgccttgcattctaatgcagtttgttctgtaactcgagagccagtagcattggattgatggaagtgtagggtttatgaattattgcagctgactaccatacctcacacagcgttggtgttgtgagcggcccatgaaaagccaaattaaaaatcaaggattcagtcaaactaagcaggtactcatgccaggtactcctttctctacccacatccatgtttgaatgctattgcctgtgatctttacgcttaactgttgtgtatcttttttgttctttacaagaagtgcagaggggttttttgtgtattgcgtgaaaacttataaaacaaatgttaacagaatggaattttttttcaactgtatgtagggctgcagtggtggccagaattagatatctttaaagaattttaaatacaataaacacttcatattattcgccttgttacactcaatgcaattctcaagtctataagaggtatgtgcttaatatttcctactgtgtaggagaatttgcagtcagccataggtatgtaggaatagtcactcactggctgatacatttaaagcagcagtgtgaatagcaaggacagacaccttcaatttgtgaaatcaaagaactgatgcactatatagaacgaatttgggtttttaaagaaatattaaaagttaggtactgtaagtgttcttaaaacctgtaaacttcattctgtgggctagtggtgtgggacaaaatattcctaatgaaaggaagtaccaattagttgatttgttggtggcattccccttttgggaaagcaatgtaaggttatgtctgtgtatgtcattcacacttaggcaagcatacacaggcacatggctttaagaaccacactgatgccttgataattaaaaagaatacaagcattccatgtacacatgttaattagcagttagtgactgggccaacactttctcataaaaattggccttttacatgttgtctaattatcatttttccccaaattttgcgttgtaggactactgttcgaagatttttggaagaatactgagaacggcataaagtgaagatcgacatttaaaaaatgaggtgaaagaaagctatagtggcatagaaaaagtataaagctcagttagtttttttattattattattattaaaagttaattcaggactgatgtgacctaccagatttcagaacatgtgttaatagtatatatgccactgaaaacttaggtcctgtatcatacttttttctttaagactttttaagaaatattacttaaacatgtggcttgctcagtgtttaattgcaagttttcaatcttggactttgaaaacaggattaaacgttagtattcgtgtgaatcagactaagtgggatttcatttttacaactctgctctacttagcctttggatttagaagtaaaaataaagtatctctgactttctgttaca

SEQ ID NO: 452796 - DNA, 2360 bp, Homo sapiens
  misc_feature (2118)..(2118): n is a, c, g, or t
ctaacaattaaccggttcctccattaagcgccagtattaacaactcataagcgatgtggttcaccggtgggcgctaacttcgaagcaacattatcgatatgataggccaatcgccgggtcgatttacagacgggtcgtcttgtcggctcctgtgtgtaggagggatttcggcctgagagcgggccgaggagattggcgacggtgtcgcccgtgttttcgttggcgggtgcctgggctggtgggaacagccgcccgaaggaagcaccatgatttcggccgcgcagttgttggatgagttaatgggccgggaccgaaacctagccccggacgagaagcgcagcaacgtgcggtgggaccacgagagcgtttgtaaatattatctctgtggtttttgtcctgcggaattgttcacaaatacacgttctgatcttggtccgtgtgaaaaaattcatgatgaaaatctacgaaaacagtatgagaagagctctcgtttcatgaaagttggctatgagagagattttttgcgatacttacagagcttacttgcagaagtagaacgtaggatcagacgaggccatgctcgtttggcattatctcaaaaccagcagtcttctggggccgctggcccaacaggcaaaaatgaagaaaaaattcaggttctaacagacaaaattgatgtacttctgcaacagattgaagaattagggtctgaaggaaaagtagaagaagcccaggggatgatgaaattagttgagcaattaaaagaagagagagaactgctaaggtccacaacgtcgacaattgaaagctttgctgcacaagaaaaacaaatggaagtttgtgaagtatgtggagcctttttaatagtaggagatgcccagtcccgggtagatgaccatttgatgggaaaacaacacatgggctatgccaaaattaaagctactgtagaagaattaaaagaaaagttaaggaaaagaaccgaagaacctgatcgtgatgagcgtctaaaaaaggagaagcaagaaagagaagaaagagaaaaagaacgggagagagaaagggaagaaagagaaaggaaaagacgaagggaagaggaagaaagagaaaaagaaagggctcgtgacagagaaagaagaaagagaagtcgttcacgaagtagacactcaagccgaacatcagacagaagatgcagcaggtctcgggaccacaaaaggtcacgaagtagagaaagaaggcggagcagaagtagagatcgacgaagaagcagaagccatgatcgatcagaaagaaaacacagatctcgaagtcgggatcgaagaagatcaaaaagccgggatcgaaagtcatataagcacaggagcaaaagtcgggacagagaacaagatagaaaatccaaggagaaagaaaagaggggatctgatgataaaaaaagtagtgtgaagtccggtagtcgagaaaagcagagtgaagacacaaacactgaatcgaaggaaagtgatactaagaatgaggtcaatgggaccagtgaagacattaaatctgaaggtgacactcagtccaattaaaactgatctgataagacctcagatcagacagaggactactgttcgaagatttttggaagaatactgagaacggcataaagtgaagatcgacatttaaaaaatgaggtgaaagaaagctatagtggcatagaaaaagtataaagctcagttagtttttttattattattattattaaaagttaattcaggactgatgtgacctaccagatttcagaacatgtgttaatagtatatatgccactgaaaacttaggtcctgtatcatacttttttctttaagactttttaagaaatattacttaaacatgtggcttgctcagtgtttaattgcaagttttcaatcttggactttgaaaacaggattaaacgttagtattcgtgtgaatcagaaacaaccaaaccaaacaacaaaaaaaacaaaaaaaaaaaaaaaaaaaacacaacaaacaaacaaacacaacacaacaacaaacacaagaaacaaaacaggggggggggggcagaaaagaaaaacccccgggagggggaacaaacacaagcagcacatacacagnttggtctagacagaaagggaagcccacaacatagagagggcgcaatataaaacaaacccaggcggcgcgtaacaacaaaacacgcgggaggagaaaagcggctcgatactaccagaggagaaaccacacaactgggggggggacaaagcggaaaaccaccacaagaacaagagcaggaggagaaataaaggggtaaaggagacacgaagacatcgggcaaagatgtcacgaatggcgcaacc

SEQ ID NO: 452797 - DNA, 1306 bp, Homo sapiens
ctaacaattaaccggttcctccattaagcgccagtattaacaactcataagcgatgtggttcaccggtgggcgctaacttcgaagcaacattatcgatatgataggccaatcgccgggtcgatttacagacgggtcgtcttgtcggctcctgtgtgtaggagggatttcggcctgagagcgggccgaggagattggcgacggtgtcgcccgtgttttcgttggcgggtgcctgggctggtgggaacagccgcccgaaggaagcaccatgatttcggccgcgcagttgttggatgagttaatgggccgggaccgaaacctagccccggacgagaagcgcagcaacgtgcggtgggaccacgagagcgtttgtaaatattatctctgtggtttttgtcctgcggaattgttcacaaatacacgttctgatcttggtccgtgtgaaaaaattcatgatgaaaatctacgaaaacagtatgagaagagctctcgtttcatgaaagttggctatgagagagattttttgcgatacttacagagcttacttgcagaagtagaacgtaggatcagacgaggccatgctcgtttggcattatctcaaaaccagcagtcttctggggccgctggcccaacaggcaaaaatgaagaaaaaattcaggttctaacagacaaaattgatgtacttctgcaacagattgaagaattagggtctgaaggaaaagtagaagaagcccaggggatgatgaaattagttgagcaattaaaagaagagagagaactgctaaggtccacaacgtcgacaattgaaagctttgctgcacaagaaaaacaaatggaagtttgtgaagtatgtggagcctttttaatagtaggagatgcccagtcccgggtagatgaccatttgatgggaaaacaacacatgggctatgccaaaattaaagctactgtagaagaattaaaagaaaagttaaggaaaagaaccgaagaacctgatcgtgatgagcgtctaaaaaaggagaagcaagaaagagaagaaagagaaaaagaacgggagagagaaagggaagaaagagaaaggaaaagacgaagggaagaggaagaaagagaaaaagaaagggctcgtgacagagaaagaagaaagagaagtcgttcacgaagtagacactcaagccgaacatcagacagaagatgcagcaggtctcgggaccacaaaaggtcacgaagtagagaaagaaggcggagcagagaaaggaaaagacgaagggaagaggaagaaagagaaaaagaaagggctcgtgacaaaaaaaa

SEQ ID NO: 452798 - DNA, 1254 bp, Homo sapiens
tcggtaccccgagtgggtccctgcattgcctgtgatctttacgcttaactgttgtgtatcttttttgttctttacaagaagtgcagaggggttttttgtgtattgcgtgaaaacttataaaacaaatgttaacagaatggaattttttttcaactgtatgtagggctgcagtggtggccagaattagatatctttaaagaattttaaatacaataaacacttcatattattcgccttgttacactcaatgcaattctcaagtctataagaggtatgtgcttaatatttcctactgtgtaggagaatttgcagtcagccataggtatgtaggaatagtcactcactggctgatacatttaaagcagcagtgtgaatagcaaggacagacaccttcaatttgtgaaatcaaagaactgatgcactatatagaacgaatttgggtttttaaagaaatattaaaagttaggtactgtaagtgttcttaaaacctgtaaacttcattctgtgggctagtggtgtgggacaaaatattcctaatgaaaggaagtaccaattagttgatttgttggtggcattccccttttgggaaagcaatgtaaggttatgtctgtgtatgtcattcacacttaggcaagcatacacaggcacatggctttaagaaccacactgatgccttgataattaaaaagaatacaagcattccatgtacacatgttaattagcagttagtgactgggccaacactttctcataaaaattggccttttacatgttgtctaattatcatttttccccaaattttgcgttgtaggactactgttcgaagatttttggaagaatactgagaacggcataaagtgaagatcgacatttaaaaaatgaggtgaaagaaagctatagtggcatagaaaaagtataaagctcagttagtttttttattattattattattaaaagttaattcaggactgatgtgacctaccagatttcagaacatgtgttaatagtatatatgccactgaaaacttaggtcctgtatcatacttttttctttaagactttttaagaaatattacttaaacatgtggcttgctcagtgtttaattgcaagttttcaatcttggactttgaaaacaggattaaacgttagtattcgtgtgaatcagactaagtgggatttcatttttacaactctgctctacttagcctttggatttagaagtaaaaataaagtatctctgactttctgttaca

SEQ ID NO: 452799 - DNA, 1608 bp, Homo sapiens
ctaacaattaaccggttcctccattaagcgccagtattaacaactcataagcgatgtggttcaccggtgggcgctaacttcgaagcaacattatcgatatgataggccaatcgccgggtcgatttacagacgggtcgtcttgtcggctcctgtgtgtaggagggatttcggcctgagagcgggccgaggagattggcgacggtgtcgcccgtgttttcgttggcgggtgcctgggctggtgggaacagccgcccgaaggaagcaccatgatttcggccgcgcagttgttggatgagttaatgggccgggaccgaaacctagccccggacgagaagcgcagcaacgtgcggtgggaccacgagagcgtttgtaaatattatctctgtggtttttgtcctgcggaattgttcacaaatacacgttctgatcttgatgtatttggaagaggagataacattagagatgtcagcaaatttttggaagatgacaagtggatggaggagtagcagcaaacgcaacagagcagagcaacctgtaccctaaaagcctgcagaaggggatactaaacagaagcgagtgtttgatcagcagaaccctggacaggctcaggatttggaggcaccaggcagaagaaaagaggattcttctctagagaaagtgaacagttcctgagaagtgatctctgcaggtactgacccttggggaatctcttaaaagaaagtcttactgcctgattttcctatgataaagcccattcatgagctgacaaaccctgcctaatccctactaacttccagtcagattttggaagtgtctttttaaaaaattagttgcttgcccaggaccaccagccagacgttcgaagaaagccttcaacacaagagattaacaaaaccaacagagaaagaagaatttagtggaattggagatactggggaaagcagaagagagattcttcaaaatcttaagaaatttagtatcttcagagacatatgagaagacactatattcttcagcaataatacgatgccataaagagggaacttgtggaaaaagtgaaaaacattttctgaaaaacaggtcttagaaattaaaactgaagaaatagaactaaaatcaccagaaagatttgaaaataaaattaaggaaatttactggaatattgggcagtacgacagaaggatttttaaaaaacttagtccaggaactgtactaccagcttaatagttgtggacagaataaaagcagagggaattgcttaagaaaaaaaatttgcagtactaaaggacattcatctttaggttgagcaggtcctacaagtgatcaggacagtgaatgaaaaagatccatacctaggcatacccctgtgaaattttagaacacgggggtggtgggggtgggtgtaggtcacagaattatgaatcagaatggcctaagactggtcagtaacaacgggggaagttgaagacattggagaaacatcctcagggtgctgagtgaaaatgtgtctgccggagggggaaaaagacattttcagatatacagggtctcaactgatttatctcccacgggccttttctcaggaaactccaccaaaacatgtccata

SEQ ID NO: 452800 - DNA, 1181 bp, Homo sapiens
ctaacaattaaccggttcctccattaagcgccagtattaacaactcataagcgatgtggttcaccggtgggcgctaacttcgaagcaacattatcgatatgataggccaatcgccgggtcgatttacagacgggtcgtcttgtcggctcctgtgtgtaggagggatttcggcctgagagcgggccgaggagattggcgacggtgtcgcccgtgttttcgttggcgggtgcctgggctggtgggaacagccgcccgaaggaagcaccatgatttcggccgcgcagttgttggatgagttaatgggccgggaccgaaacctagccccggacgagaagcgcagcaacgtgcggtgggaccacgagagcgtttgtaaatattatctctgtggtttttgtcctgcggaattgttcacaaatacacgttctgatcttgatgtatttggaagaggagataacattagagatgtcagcaaatttttggaagatgacaagtggatggaggagtagcagcaaacgcaacagagcagagcaacctgtaccctaaaagcctgcagaaggggatactaaacagaagcgagtgtttgatcagcagaaccctggacaggctcaggatttggaggcaccaggtaccacagaaggcagggttgagtcatggggctgaaaatgagagagattagtctgtagtctagttcagggtttctcaaccttgacattgttgacattttgagccagttttggagggggcttttcatgcattgtgggatgtttagcaacatctctggcctttacccactagataaccagtagcaccccctgttgtgacaccccaaaatgtcttcagacattgccagatgtcccccaggatgcaaaattgccactagtgtaggtggtcctgtgcatctgttgatcttactctcctccccatagaccccaggagaagagagggttattttctggagaaattggactagagagactagtttatctgaaccacaaaatagaaaaaaataattgactatttcctcaattctctcaaggatggtacataaccaggatcattctggatacataaaagaagtcaattcattatgtacaatctttgccttagagcattaggagcatattaaggcaggaccagtctagatcttgagatttcagacacagcaggggcagtagtaagtt

SEQ ID NO: 452801 - DNA, 803 bp, Homo sapiens
  misc_feature (433)..(433): n is a, c, g, or t
  misc_feature (436)..(438): n is a, c, g, or t
  misc_feature (448)..(448): n is a, c, g, or t
  misc_feature (450)..(450): n is a, c, g, or t
  misc_feature (459)..(460): n is a, c, g, or t
  misc_feature (463)..(464): n is a, c, g, or t
  misc_feature (616)..(618): n is a, c, g, or t
  misc_feature (620)..(620): n is a, c, g, or t
  misc_feature (623)..(625): n is a, c, g, or t
  misc_feature (630)..(632): n is a, c, g, or t
  misc_feature (651)..(651): n is a, c, g, or t
  misc_feature (657)..(657): n is a, c, g, or t
  misc_feature (661)..(661): n is a, c, g, or t
  misc_feature (665)..(665): n is a, c, g, or t
  misc_feature (675)..(675): n is a, c, g, or t
  misc_feature (693)..(693): n is a, c, g, or t
  misc_feature (706)..(706): n is a, c, g, or t
  misc_feature (727)..(729): n is a, c, g, or t
  misc_feature (802)..(802): n is a, c, g, or t
ctaacaattaaccggttcctccattaagcgccagtattaacaactcataagcgatgtggttcaccggtgggcgctaacttcgaagcaacattatcgatatgataggccaatcgccgggtcgatttacagacgggtcgtcttgtcggctcctgtgtgtaggagggatttcggcctgagagcgggccgaggagattggcgacggtgtcgcccgtgttttcgttggcgggtgcctgggctggtgggaacagccgcccgaaggaagcaccatgatttcggccgcgcagttgttggatgagttaatgggccgggaccgaaacctagccccggacgagaagcgcagcaacgtgcggtgggaccacgagagcgtttgtaaatattatctctgtggtttttgtcctgcggaattgttcacaaatacacgttctgatcttgncgnnnaaaaaaattnanaaaaaaaanntannaaaacagtatgagaagagctctcgtttcatgaaagttggctatgagagagattttttgcgatacttacagagcttacttgcagaagtagaacgtaggatcagacgaggccatgctcgtttggcattatctcaaaaccagcagtcttctgggnnngnttnnnaacannnaaaaataaaaaaaaaattnagtttntaanaaanaaaaataatntagttgtggaagaaattnaagaattagggtntgaaggaaaactataataatnnnattttattatgaaattattttatgaattaaaagaagagagataacgttgtaatttggagaagttgtagaattna

SEQ ID NO: 452802 - DNA, 223 bp, Homo sapiens
agcaattttttaagtacctttgtttttctttactaggtttgtaaatattatctctgtggtttttgtcctgcggaattgttcacaaatacacgttctgatcttggtaagtgaattttctgtgtaacttttatcaaatttatgatatttaaaatgttgaataggagtggtgaaaggaaaaaaactgattataattctgtgaagttttttcttaaagatttgctaa

SEQ ID NO: 452803 - DNA, 3435 bp, Homo sapiens
ctaacaattaaccggttcctccattaagcgccagtattaacaactcataagcgatgtggttcaccggtgggcgctaacttcgaagcaacattatcgatatgataggccaatcgccgggtcgatttacagacgggtcgtcttgtcggctcctgtgtgtaggagggatttcggcctgagagcgggccgaggagattggcgacggtgtcgcccgtgttttcgttggcgggtgcctgggctggtgggaacagccgcccgaaggaagcaccatgatttcggccgcgcagttgttggatgagttaatgggccgggaccgaaacctagccccggacgagaagcgcagcaacgtgcggtgggaccacgagagcgtttgtaaatattatctctgtggtttttgtcctgcggaattgttcacaaatacacgttctgatcttggtccgtgtgaaaaaattcatgatgaaaatctacgaaaacagtatgagaagagctctcgtttcatgaaagttggctatgagagagattttttgcgatacttacagagcttacttgcagaagtagaacgtaggatcagacgaggccatgctcgtttggcattatctcaaaaccagcagtcttctggggccgctggcccaacaggcaaaaatgaagaaaaaattcaggttctaacagacaaaattgatgtacttctgcaacagattgaagaattagggtctgaaggaaaagtagaagaagcccaggggatgatgaaattagttgagcaattaaaagaagagagagaactgctaaggtccacaacgtcgacaattgaaagctttgctgcacaagaaaaacaaatggaagtttgtgaagtatgtggagcctttttaatagtaggagatgcccagtcccgggtagatgaccatttgatgggaaaacaacacatgggctatgccaaaattaaagctactgtagaagaattaaaagaaaagttaaggaaaagaaccgaagaacctgatcgtgatgagcgtctaaaaaaggagaagcaagaaagagaagaaagagaaaaagaacgggagagagaaagggaagaaagagaaaggaaaagacgaagggaagaggaagaaagagaaaaagaaagggctcgtgacagagaaagaagaaagagaagtcgttcacgaagtagacactcaagccgaacatcagacagaagatgcagcaggtctcgggaccacaaaaggtcacgaagtagagaaagaaggcggagcagaagtagagatcgacgaagaagcagaagccatgatcgatcagaaagaaaacacagatctcgaagtcgggatcgaagaagatcaaaaagccgggatcgaaagtcatataagcacaggagcaaaagtcgggacagagaacaagatagaaaatccaaggagaaagaaaagaggggatctgatgataaaaaaagtagtgtgaagtccggtagtcgagaaaagcagagtgaagacacaaacactgaatcgaaggaaagtgatactaagaatgaggtcaatgggaccagtgaagacattaaatctcagcgtaagtatgcacagatgaagatggaactaagccgagtaagaagacatacaaaagcctcttctgaaggaaaagacagtgtagtcctgcaaaacattttgaggtacattgttttgtctcagctattttgtagcagactcgtgcccccattagtgtgcctctttggaaattatcgcccacatttgtaatatagtcgccattgaaaagttaattatcctttttttagggattttgatgtcatttcttttttttttttaataaaaaggttgaactgtttttttttttctttttggtattaagtccatcttgtgttggtacattggcagagacatatgctttaaaaacttaaatatttcggaggcacatgttggactactttgttttaattaaactgctagtatttctttgtcaaggatgtttctagttttttgctttattgccttgcattctaatgcagtttgttctgtaactcgagagccagtagcattggattgatggaagtgtagggtttatgaattattgcagctgactaccatacctcacacagcgttggtgttgtgagcggcccatgaaaagccaaattaaaaatcaaggattcagtcaaactaagcaggtactcatgccaggtactcctttctctacccacatccatgtttgaatgctattgcctgtgatctttacgcttaactgttgtgtatcttttttgttctttacaagaagtgcagaggggttttttgtgtattgcgtgaaaacttataaaacaaatgttaacagaatggaattttttttcaactgtatgtagggctgcagtggtggccagaattagatatctttaaagaattttaaatacaataaacacttcatattattcgccttgttacactcaatgcaattctcaagtctataagaggtatgtgcttaatatttcctactgtgtaggagaatttgcagtcagccataggtatgtaggaatagtcactcactggctgatacatttaaagcagcagtgtgaatagcaaggacagacaccttcaatttgtgaaatcaaagaactgatgcactatatagaacgaatttgggtttttaaagaaatattaaaagttaggtactgtaagtgttcttaaaacctgtaaacttcattctgtgggctagtggtgtgggacaaaatattcctaatgaaaggaagtaccaattagttgatttgttggtggcattccccttttgggaaagcaatgtaaggttatgtctgtgtatgtcattcacacttaggcaagcatacacaggcacatggctttaagaaccacactgatgccttgataattaaaaagaatacaagcattccatgtacacatgttaattagcagttagtgactgggccaacactttctcataaaaattggccttttacatgttgtctaattatcatttttccccaaattttgcgttgtaggactactgttcgaagatttttggaagaatactgagaacggcataaagtgaagatcgacatttaaaaaatgaggtgaaagaaagctatagtggcatagaaaaagtataaagctcagttagtttttttattattattattattaaaagttaattcaggactgatgtgacctaccagatttcagaacatgtgttaatagtatatatgccactgaaaacttaggtcctgtatcatacttttttctttaagactttttaagaaatattacttaaacatgtggcttgctcagtgtttaattgcaagttttcaatcttggactttgaaaacaggattaaacgttagtattcgtgtgaatcagactaagtgggatttcatttttacaactctgctctacttagcctttggatttagaagtaaaaataaagtatctctgactttctgttaca

SEQ ID NO: 452804 - DNA, 3422 bp, Homo sapiens
ctaacaattaaccggttcctccattaagcgccagtattaacaactcataagcgatgtggttcaccggtgggcgctaacttcgaagcaacattatcgatatgataggccaatcgccgggtcgatttacagacgggtcgtcttgtcggctcctgtgtgtaggagggatttcggcctgagagcgggccgaggagattggcgacggtgtcgcccgtgttttcgttggcgggtgcctgggctggtgggaacagccgcccgaaggaagcaccatgatttcggccgcgcagttgttggatgagttaatgggccgggaccgaaacctagccccggacgagaagcgcagcaacgtgcggtgggaccacgagagcgtttgtaaatattatctctgtggtttttgtcctgcggaattgttcacaaatacacgttctgatcttggtccgtgtgaaaaaattcatgatgaaaatctacgaaaacagtatgagaagagctctcgtttcatgaaagttggctatgagagagattttttgcgatacttacagagcttacttgcagaagtagaacgtaggatcagacgaggccatgctcgtttggcattatctcaaaaccagcagtcttctggggccgctggcccaacaggcaaaaatgaagaaaaaattcaggttctaacagacaaaattgatgtacttctgcaacagattgaagaattagggtctgaaggaaaagtagaagaagcccaggggatgatgaaattagttgagcaattaaaagaagagagagaactgctaaggtccacaacgtcgacaattgaaagctttgctgcacaagaaaaacaaatggaagtttgtgaagtatgtggagcctttttaatagtaggagatgcccagtcccgggtagatgaccatttgatgggaaaacaacacatgggctatgccaaaattaaagctactgtagaagaattaaaagaaaagttaaggaaaagaaccgaagaacctgatcgtgatgagcgtctaaaaaaggagaagcaagaaagagaagaaagagaaaaagaacgggagagagaaagggaagaaagagaaaggaaaagacgaagggaagaggaagaaagagaaaaagaaagggctcgtgacagagaaagaagaaagagaagtcgttcacgaagtagacactcaagccgaacatcagacagaagatgcagcaggtctcgggaccacaaaaggtcacgaagtagagaaagaaggcggagcagaagtagagatcgacgaagaagcagaagccatgatcgatcagaaagaaaacacagatctcgaagtcgggatcgaagaagatcaaaaagccgggatcgaaagtcatataagcacaggagcaaaagtcgggacagagaacaagatagaaaatccaaggagaaagcagaagataagattattggactgactactagtcctctacgggacaacaagacgactcttcctcattgaagctacctgtgcaccggagaagcccataaggcacaaagggaggactttcccacaagcagcgtaagtatgcacagatgaagatggaactaagccgagtaagaagacatacaaaagcctcttctgaaggaaaagacagtgtagtcctgcaaaacattttgaggtacattgttttgtctcagctattttgtagcagactcgtgcccccattagtgtgcctctttggaaattatcgcccacatttgtaatatagtcgccattgaaaagttaattatcctttttttagggattttgatgtcatttcttttttttttttaataaaaaggttgaactgtttttttttttctttttggtattaagtccatcttgtgttggtacattggcagagacatatgctttaaaaacttaaatatttcggaggcacatgttggactactttgttttaattaaactgctagtatttctttgtcaaggatgtttctagttttttgctttattgccttgcattctaatgcagtttgttctgtaactcgagagccagtagcattggattgatggaagtgtagggtttatgaattattgcagctgactaccatacctcacacagcgttggtgttgtgagcggcccatgaaaagccaaattaaaaatcaaggattcagtcaaactaagcaggtactcatgccaggtactcctttctctacccacatccatgtttgaatgctattgcctgtgatctttacgcttaactgttgtgtatcttttttgttctttacaagaagtgcagaggggttttttgtgtattgcgtgaaaacttataaaacaaatgttaacagaatggaattttttttcaactgtatgtagggctgcagtggtggccagaattagatatctttaaagaattttaaatacaataaacacttcatattattcgccttgttacactcaatgcaattctcaagtctataagaggtatgtgcttaatatttcctactgtgtaggagaatttgcagtcagccataggtatgtaggaatagtcactcactggctgatacatttaaagcagcagtgtgaatagcaaggacagacaccttcaatttgtgaaatcaaagaactgatgcactatatagaacgaatttgggtttttaaagaaatattaaaagttaggtactgtaagtgttcttaaaacctgtaaacttcattctgtgggctagtggtgtgggacaaaatattcctaatgaaaggaagtaccaattagttgatttgttggtggcattccccttttgggaaagcaatgtaaggttatgtctgtgtatgtcattcacacttaggcaagcatacacaggcacatggctttaagaaccacactgatgccttgataattaaaaagaatacaagcattccatgtacacatgttaattagcagttagtgactgggccaacactttctcataaaaattggccttttacatgttgtctaattatcatttttccccaaattttgcgttgtaggactactgttcgaagatttttggaagaatactgagaacggcataaagtgaagatcgacatttaaaaaatgaggtgaaagaaagctatagtggcatagaaaaagtataaagctcagttagtttttttattattattattattaaaagttaattcaggactgatgtgacctaccagatttcagaacatgtgttaatagtatatatgccactgaaaacttaggtcctgtatcatacttttttctttaagactttttaagaaatattacttaaacatgtggcttgctcagtgtttaattgcaagttttcaatcttggactttgaaaacaggattaaacgttagtattcgtgtgaatcagactaagtgggatttcatttttacaactctgctctacttagcctttggatttagaagtaaaaataaagtatctctgactttctgttaca

SEQ ID NO: 452805 - DNA, 5151 bp, Homo sapiens
ctaacaattaaccggttcctccattaagcgccagtattaacaactcataagcgatgtggttcaccggtgggcgctaacttcgaagcaacattatcgatatgataggccaatcgccgggtcgatttacagacgggtcgtcttgtcggctcctgtgtgtaggagggatttcggcctgagagcgggccgaggagattggcgacggtgtcgcccgtgttttcgttggcgggtgcctgggctggtgggaacagccgcccgaaggaagcaccatgatttcggccgcgcagttgttggatgagttaatgggccgggaccgaaacctagccccggacgagaagcgcagcaacgtgcggtgggaccacgagagcgtttgtaaatattatctctgtggtttttgtcctgcggaattgttcacaaatacacgttctgatcttggtccgtgtgaaaaaattcatgatgaaaatctacgaaaacagtatgagaagagctctcgtttcatgaaagttggctatgagagagattttttgcgatacttacagagcttacttgcagaagtagaacgtaggatcagacgaggccatgctcgtttggcattatctcaaaaccagcagtcttctggggccgctggcccaacaggcaaaaatgaagaaaaaattcaggttctaacagacaaaattgatgtacttctgcaacagattgaagaattagggtctgaaggaaaagtagaagaagcccaggggatgatgaaattagttgagcaattaaaagaagagagagaactgctaaggtccacaacgtcgacaattgaaagctttgctgcacaagaaaaacaaatggaagtttgtgaagtatgtggagcctttttaatagtaggagatgcccagtcccgggtagatgaccatttgatgggaaaacaacacatgggctatgccaaaattaaagctactgtagaagaattaaaagaaaagttaaggaaaagaaccgaagaacctgatcgtgatgagcgtctaaaaaaggagaagcaagaaagagaagaaagagaaaaagaacgggagagagaaagggaagaaagagaaaggaaaagacgaagggaagaggaagaaagagaaaaagaaagggctcgtgacagagaaagaagaaagagaagtcgttcacgaagtagacactcaagccgaacatcagacagaagatgcagcaggtctcgggaccacaaaaggtcacgaagtagagaaagaaggcggagcagaagtagagatcgacgaagaagcagaagccatgatcgatcagaaagaaaacacagatctcgaagtcgggatcgaagaagatcaaaaagccgggatcgaaagtcatataagcacaggagcaaaagtcgggacagagaacaagatagaaaatccaaggagaaagaaaagaggggatctgatgataaaaaaagtagtgtgaagtccggtagtcgagaaaagcagagtgaagacacaaacactgaatcgaaggaaagtgatactaagaatgaggtcaatgggaccagtgaagacattaaatctgaaggtgacactcagtccaattaaaactgatctgataagacctcagatcagacagaggtaagtgtattgtttctcactttgattagggctttttgttactgtttgacagtgcagcgtaagtatgcacagatgaagatggaactaagccgagtaagaagacatacaaaagcctcttctgaaggaaaagacagtgtagtcctgcaaaacattttgaggtacattgttttgtctcagctattttgtagcagactcgtgcccccattagtgtgcctctttggaaattatcgcccacatttgtaatatagtcgccattgaaaagttaattatcctttttttagggattttgatgtcatttcttttttttttttaataaaaaggttgaactgtttttttttttctttttggtattaagtccatcttgtgttggtacattggcagagacatatgctttaaaaacttaaatatttcggaggcacatgttggactactttgttttaattaaactgctagtatttctttgtcaaggatgtttctagttttttgctttattgccttgcattctaatgcagtttgttctgtaactcgagagccagtagcattggattgatggaagtgtagggtttatgaattattgcagctgactaccatacctcacacagcgttggtgttgtgagcggcccatgaaaagccaaattaaaaatcaaggattcagtcaaactaagcaggtactcatgccaggtactcctttctctacccacatccatgtttgaatgctattgcctgtgatctttacgcttaactgttgtgtatcttttttgttctttacaagaagtgcagaggggttttttgtgtattgcgtgaaaacttataaaacaaatgttaacagaatggaattttttttcaactgtatgtagggctgcagtggtggccagaattagatatctttaaagaattttaaatacaataaacacttcatattattcgccttgttacactcaatgcaattctcaagtctataagaggtatgtgcttaatatttcctactgtgtaggagaatttgcagtcagccataggtatgtaggaatagtcactcactggctgatacatttaaagcagcagtgtgaatagcaaggacagacaccttcaatttgtgaaatcaaagaactgatgcactatatagaacgaatttgggtttttaaagaaatattaaaagttaggtactgtaagtgttcttaaaacctgtaaacttcattctgtgggctagtggtgtgggacaaaatattcctaatgaaaggaagtaccaattagttgatttgttggtggcattccccttttgggaaagcaatgtaaggttatgtctgtgtatgtcattcacacttaggcaagcatacacaggcacatggctttaagaaccacactgatgccttgataattaaaaagaatacaagcattccatgtacacatgttaattagcagttagtgactgggccaacactttctcataaaaattggccttttacatgttgtctaattatcatttttccccaaattttgcgttgtaggactactgttcgaagatttttggaagaatactgagaacggcataaagtgaagatcgacatttaaaaaatgaggtgaaagaaagctatagtggcatagaaaaagtataaagctcagttagtttttttattattattattattaaaagttaattcaggactgatgtgacctaccagatttcagaacatgtgttaatagtatatatgccactgaaaacttaggtcctgtatcatacttttttctttaagactttttaagaaatattacttaaacatgtggcttgctcagtgtttaattgcaagttttcaatcttggactttgaaaacaggattaaacgttagtattcgtgtgaatcagactaagtgggatttcatttttacaactctgctctacttagcctttggatttagaagtaaaaataaagtatctctgactttctgttacaaagttgattgtctctgtcattgaaaagttttagtattaatctttttctaataaagttattgactctgaactagtcccctgttttaaatacaagagttacactattactagaggtgttggtgtacagttttatctgatttgttctgtttaagactaatttttatagactttctaatgttttaaataatggtgcttcaattttaggtggttatgaataaatttgaattttgcttttaatagcaaagatgtgcagtgaactagaatatatttttacatccctgagagattcatttagtagaaaattccaagtatcctgacaagcactctttagctggctagctatgggatgatgtagaaaagcattcaagagctagtttttgttaagtcctgtatcaagattaacccagctgtgtcagtttataaatgtatttgtgtatagggtgtgtagtatatatggcaagggttttttccccccacttaagtgattatttttgtgtcacatctaggaaaaccggcagcatgtttctatctatagccagcttcttcgactgtataaaagtattctctccagctacgtatatacacacatacatatatatcatagcaattccttgtggtttataacttgcaaatactgctatcagtttataggtaaagaaacagtgtgttaaatgacttatccagggagggtcctgtggcttcatgtttatggagttgctaggtctctgcctcatggtccagtgcctgttaagccactgtgttcattctaataggcataatgaattgttaaagaatttactaaaatctcttccaccaaactttgaaaaataatgaagccgcccccactttagaggctctgtatgaaaaaatgctgtggagacagagccctcctggctccctagctgatcctggagatgcagcaatagatgaatgggttatctctgaatttgtaagagataattcacatgaggattaagataaaatgggaagtaaaatctaacaaacacaaagatagctcccaggcactgctttgtgtagtttgacagcattgtggttgtagcagcaaaggacttaaagtgatagtttttaaaccatattctgtccctaagtaataaaaaatctaggaagttactaaaataccagatttgttctgctctgcctcatctagaatcaacgtctaactaacttaaatgaagtataataaatgagttcatatgaaaaggcttcctctatggacacttagatatattgtaactattgaagttacctgggatgtgggggtggtgggaggaggacctgcctccccaggacatctatgactaaggcctggctttagttatggagagagacgtagaagttgaattttacacccaaaattgatgtgactgaagaggaactgattgttgctaaccagctcacaagaatccagtattgagaccagttcactagaagaaacaaacatttctgccatgcagaccaaaaagttattagttggtgaatatgtattttctctttggaaggtctttaaggggagcaaaccagttttaatcaatcagattgcttggtaagtttggaatctgcaatcagttggtcttaaaaaaaaaaa

SEQ ID NO: 452806 - DNA, 3492 bp, Homo sapiens
ctaacaattaaccggttcctccattaagcgccagtattaacaactcataagcgatgtggttcaccggtgggcgctaacttcgaagcaacattatcgatatgataggccaatcgccgggtcgatttacagacgggtcgtcttgtcggctcctgtgtgtaggagggatttcggcctgagagcgggccgaggagattggcgacggtgtcgcccgtgttttcgttggcgggtgcctgggctggtgggaacagccgcccgaaggaagcaccatgatttcggccgcgcagttgttggatgagttaatgggccgggaccgaaacctagccccggacgagaagcgcagcaacgtgcggtgggaccacgagagcgtttgtaaatattatctctgtggtttttgtcctgcggaattgttcacaaatacacgttctgatcttggtccgtgtgaaaaaattcatgatgaaaatctacgaaaacagtatgagaagagctctcgtttcatgaaagttggctatgagagagattttttgcgatacttacagagcttacttgcagaagtagaacgtaggatcagacgaggccatgctcgtttggcattatctcaaaaccagcagtcttctggggccgctggcccaacaggcaaaaatgaagaaaaaattcaggttctaacagacaaaattgatgtacttctgcaacagattgaagaattagggtctgaaggaaaagtagaagaagcccaggggatgatgaaattagttgagcaattaaaagaagagagagaactgctaaggtccacaacgtcgacaattgaaagctttgctgcacaagaaaaacaaatggaagtttgtgaagtatgtggagcctttttaatagtaggagatgcccagtcccgggtagatgaccatttgatgggaaaacaacacatgggctatgccaaaattaaagctactgtagaagaattaaaagaaaagttaaggaaaagaaccgaagaacctgatcgtgatgagcgtctaaaaaaggagaagcaagaaagagaagaaagagaaaaagaacgggagagagaaagggaagaaagagaaaggaaaagacgaagggaagaggaagaaagagaaaaagaaagggctcgtgacagagaaagaagaaagagaagtcgttcacgaagtagacactcaagccgaacatcagacagaagatgcagcaggtctcgggaccacaaaaggtcacgaagtagagaaagaaggcggagcagaagtagagatcgacgaagaagcagaagccatgatcgatcagaaagaaaacacagatctcgaagtcgggatcgaagaagatcaaaaagccgggatcgaaagtcatataagcacaggagcaaaagtcgggacagagaacaagatagaaaatccaaggagaaagaaaagaggggatctgatgataaaaaaagtagtgtgaagtccggtagtcgagaaaagcagagtgaagacacaaacactgaatcgaaggaaagtgatactaagaatgaggtcaatgggaccagtgaagacattaaatctgaaggtgacactcagtccaattaaaactgatctgataagacctcagatcagacagaggtaagtgtattgtttctcactttgattagggctttttgttactgtttgacagtgcagcgtaagtatgcacagatgaagatggaactaagccgagtaagaagacatacaaaagcctcttctgaaggaaaagacagtgtagtcctgcaaaacattttgaggtacattgttttgtctcagctattttgtagcagactcgtgcccccattagtgtgcctctttggaaattatcgcccacatttgtaatatagtcgccattgaaaagttaattatcctttttttagggattttgatgtcatttcttttttttttttaataaaaaggttgaactgtttttttttttctttttggtattaagtccatcttgtgttggtacattggcagagacatatgctttgctagtatttctttgtcaaggatgtttctagttttttgctttattgccttgcattctaatgcagtttgttctgtaactcgagagccagtagcattggattgatggaagtgtagggtttatgaattattgcagctgactaccatacctcacacagcgttggtgttgtgagcggcccatgaaaagccaaattaaaaatcaaggattcagtcaaactaagcaggtactcatgccaggtactcctttctctacccacatccatgtttgaatgctattgcctgtgatctttacgcttaactgttgtgtatcttttttgttctttacaagaagtgcagaggggttttttgtgtattgcgtgaaaacttataaaacaaatgttaacagaatggaattttttttcaactgtatgtagggctgcagtggtggccagaattagatatctttaaagaattttaaatacaataaacacttcatattattcgccttgttacactcaatgcaattctcaagtctataagaggtatgtgcttaatatttcctactgtgtaggagaatttgcagtcagccataggtatgtaggaatagtcactcactggctgatacatttaaagcagcagtgtgaatagcaaggacagacaccttcaatttgtgaaatcaaagaactgatgcactatatagaacgaatttgggtttttaaagaaatattaaaagttaggtactgtaagtgttcttaaaacctgtaaacttcattctgtgggctagtggtgtgggacaaaatattcctaatgaaaggaagtaccaattagttgatttgttggtggcattccccttttgggaaagcaatgtaaggttatgtctgtgtatgtcattcacacttaggcaagcatacacaggcacatggctttaagaaccacactgatgccttgataattaaaaagaatacaagcattccatgtacacatgttaattagcagttagtgactgggccaacactttctcataaaaattggccttttacatgttgtctaattatcatttttccccaaattttgcgttgtaggactactgttcgaagatttttggaagaatactgagaacggcataaagtgaagatcgacatttaaaaaatgaggtgaaagaaagctatagtggcatagaaaaagtataaagctcagttagtttttttattattattattattaaaagttaattcaggactgatgtgacctaccagatttcagaacatgtgttaatagtatatatgccactgaaaacttaggtcctgtatcatacttttttctttaagactttttaagaaatattacttaaacatgtggcttgctcagtgtttaattgcaagttttcaatcttggactttgaaaacaggattaaacgttagtattcgtgtgaatcagactaagtgggatttcatttttacaactctgctctacttagcctttggatttagaagtaaaaataaagtatctctgactttctgttaca

SEQ ID NO: 452807 - DNA, 3491 bp, Homo sapiens
ctaacaattaaccggttcctccattaagcgccagtattaacaactcataagcgatgtggttcaccggtgggcgctaacttcgaagcaacattatcgatatgataggccaatcgccgggtcgatttacagacgggtcgtcttgtcggctcctgtgtgtaggagggatttcggcctgagagcgggccgaggagattggcgacggtgtcgcccgtgttttcgttggcgggtgcctgggctggtgggaacagccgcccgaaggaagcaccatgatttcggccgcgcagttgttggatgagttaatgggccgggaccgaaacctagccccggacgagaagcgcagcaacgtgcggtgggaccacgagagcgtttgtaaatattatctctgtggtttttgtcctgcggaattgttcacaaatacacgttctgatcttggtccgtgtgaaaaaattcatgatgaaaatctacgaaaacagtatgagaagagctctcgtttcatgaaagttggctatgagagagattttttgcgatacttacagagcttacttgcagaagtagaacgtaggatcagacgaggccatgctcgtttggcattatctcaaaaccagcagtcttctggggccgctggcccaacaggcaaaaatgaagaaaaaattcaggttctaacagacaaaattgatgtacttctgcaacagattgaagaattagggtctgaaggaaaagtagaagaagcccaggggatgatgaaattagttgagcaattaaaagaagagagagaactgctaaggtccacaacgtcgacaattgaaagctttgctgcacaagaaaaacaaatggaagtttgtgaagtatgtggagcctttttaatagtaggagatgcccagtcccgggtagatgaccatttgatgggaaaacaacacatgggctatgccaaaattaaagctactgtagaagaattaaaagaaaagttaaggaaaagaaccgaagaacctgatcgtgatgagcgtctaaaaaaggagaagcaagaaagagaagaaagagaaaaagaacgggagagagaaagggaagaaagagaaaggaaaagacgaagggaagaggaagaaagagaaaaagaaagggctcgtgacagagaaagaagaaagagaagtcgttcacgaagtagacactcaagccgaacatcagacagaagatgcagcaggtctcgggaccacaaaaggtcacgaagtagagaaagaaggcggagcagaagtagagatcgacgaagaagcagaagccatgatcgatcagaaagaaaacacagatctcgaagtcgggatcgaagaagatcaaaaagccgggatcgaaagtcatataagcacaggagcaaaagtcgggacagagaacaagatagaaaatccaaggagaaagaaaagaggggatctgatgataaaaaaagtagtgtgaagtccggtagtcgagaaaagcagagtgaagacacaaacactgaatcgaaggaaagtgatactaagaatgaggtcaatgggaccagtgaagacattaaatctgaaggtgacactcagtccaattaaaactgatctgataagacctcagatcagacagaggtaagtgtattgtttctcactttgattagggctttttgttactgtttgacagtgcagcgtaagtatgcacagatgaagatggaactaagccgagtaagaagacatacaaaagcctcttctgaaggaaaagacagtgtagtcctgcaaaacattttgaggtacattgttttgtctcagctattttgtagcagactcgtgcccccattagtgtgcctctttggaaattatcgcccacatttgtaatatagtcgccattgaaaagttaattatcctttttttagggattttgatgtcatttcttttttttttttaataaaaaggttgaactgtttttttttttctttttggtattaagtccatcttgtgttggtacattggcagagacatatgctttaaaaacttaaatatttcggaggcacatgttggactactttgttttaattaaactgctagtatttctttgtcaaggatgtttctagttttttgctttattgccttgcattctaatgcagtttgttctgtaactcgagagccagtagcattggattgatggaagtgtagggtttatgaattattgcagctgactaccatacctcacacagcgttggtgttgtgagcggcccatgaaaagccaaattaaaaatcaaggattcagtcaaactaagcaggtactcatgccaggtactcctttctctacccacatccatgtttgaatgctattgcctgtgatctttacgcttaactgttgtgtatcttttttgttctttacaagaagtgcagaggggttttttgtgtattgcgtgaaaacttataaaacaaatgttaacagaatggaattttttttcaactgtatgtagggctgcagtggtggccagaattagatatctttaaagaattttaaatacaataaacacttcatattattcgccttgttacactcaatgcaattctcaagtctataagaggtatgtgcttaatatttcctactgtgtaggagaatttgcagtcagccataggtatgtaggaatagtcactcactggctgatacatttaaagcagcagtgtgaatagcaaggacagacaccttcaatttgtgaaatcaaagaactgatgcactatatagaacgaatttgggtttttaaagaaatattaaaagttaggtactgtaagtgttcttaaaacctgtaaacttcattctgtgggctagtggtgtgggaccttttgggaaagcaatgtaaggttatgtctgtgtatgtcattcacacttaggcaagcatacacaggcacatggctttaagaaccacactgatgccttgataattaaaaagaatacaagcattccatgtacacatgttaattagcagttagtgactgggccaacactttctcataaaaattggccttttacatgttgtctaattatcatttttccccaaattttgcgttgtaggactactgttcgaagatttttggaagaatactgagaacggcataaagtgaagatcgacatttaaaaaatgaggtgaaagaaagctatagtggcatagaaaaagtataaagctcagttagtttttttattattattattattaaaagttaattcaggactgatgtgacctaccagatttcagaacatgtgttaatagtatatatgccactgaaaacttaggtcctgtatcatacttttttctttaagactttttaagaaatattacttaaacatgtggcttgctcagtgtttaattgcaagttttcaatcttggactttgaaaacaggattaaacgttagtattcgtgtgaatcagactaagtgggatttcatttttacaactctgctctacttagcctttggatttagaagtaaaaataaagtatctctgactttctgttaca

SEQ ID NO: 452808 - DNA, 2854 bp, Homo sapiens
ctaacaattaaccggttcctccattaagcgccagtattaacaactcataagcgatgtggttcaccggtgggcgctaacttcgaagcaacattatcgatatgataggccaatcgccgggtcgatttacagacgggtcgtcttgtcggctcctgtgtgtaggagggatttcggcctgagagcgggccgaggagattggcgacggtgtcgcccgtgttttcgttggcgggtgcctgggctggtgggaacagccgcccgaaggaagcaccatgatttcggccgcgcagttgttggatgagttaatgggccgggaccgaaacctagccccggacgagaagcgcagcaacgtgcggtgggaccacgagagcgtttgtaaatattatctctgtggtttttgtcctgcggaattgttcacaaatacacgttctgatcttggtccgtgtgaaaaaattcatgatgaaaatctacgaaaacagtatgagaagagctctcgtttcatgaaagttggctatgagagagattttttgcgatacttacagagcttacttgcagaagtagaacgtaggatcagacgaggccatgctcgtttggcattatctcaaaaccagcagtcttctggggccgctggcccaacaggcaaaaatgaagaaaaaattcaggttctaacagacaaaattgatgtacttctgcaacagattgaagaattagggtctgaaggaaaagtagaagaagcccaggggatgatgaaattagttgagcaattaaaagaagagagagaactgctaaggtccacaacgtcgacaattgaaagctttgctgcacaagaaaaacaaatggaagtttgtgaagtatgtggagcctttttaatagtaggagatgcccagtcccgggtagatgaccatttgatgggaaaacaacacatgggctatgccaaaattaaagctactgtagaagaattaaaagaaaagttaaggaaaagaaccgaagaacctgatcgtgatgagcgtctaaaaaaggagaagcaagaaagagaagaaagagaaaaagaacgggagagagaaagggaagaaagagaaaggaaaagacgaagggaagaggaagaaagagaaaaagaaagggctcgtgacagagaaagaagaaagagaagtcgttcacgaagtagacactcaagccgaacatcagacagaagatgcagcaggtctcgggaccacaaaaggtcacgaagtagagaaagaaggcggagcagaagtagagatcgacgaagaagcagaagccatgatcgatcagaaagaaaacacagatctcgaagtcgggatcgaagaagatcaaaaagccgggatcgaaagtcatataagcacaggagcaaaagtcgggacagagaacaagatagaaaatccaaggagaaagcagcgtaagtatgcacagatgaagatggaactaagccgagtaagaagacatacaaaagcctcttctgaaggaaaagacagtgtagtcctgcaaaacattttgagcgttggtgttgtgagcggcccatgaaaagccaaattaaaaatcaaggattcagtcaaactaagcaggtactcatgccaggtactcctttctctacccacatccatgtttgaatgctattgcctgtgatctttacgcttaactgttgtgtatcttttttgttctttacaagaagtgcagaggggttttttgtgtattgcgtgaaaacttataaaacaaatgttaacagaatggaattttttttcaactgtatgtagggctgcagtggtggccagaattagatatctttaaagaattttaaatacaataaacacttcatattattcgccttgttacactcaatgcaattctcaagtctataagaggtatgtgcttaatatttcctactgtgtaggagaatttgcagtcagccataggtatgtaggaatagtcactcactggctgatacatttaaagcagcagtgtgaatagcaaggacagacaccttcaatttgtgaaatcaaagaactgatgcactatatagaacgaatttgggtttttaaagaaatattaaaagttaggtactgtaagtgttcttaaaacctgtaaacttcattctgtgggctagtggtgtgggacaaaatattcctaatgaaaggaagtaccaattagttgatttgttggtggcattccccttttgggaaagcaatgtaaggttatgtctgtgtatgtcattcacacttaggcaagcatacacaggcacatggctttaagaaccacactgatgccttgataattaaaaagaatacaagcattccatgtacacatgttaattagcagttagtgactgggccaacactttctcataaaaattggccttttacatgttgtctaattatcatttttccccaaattttgcgttgtaggactactgttcgaagatttttggaagaatactgagaacggcataaagtgaagatcgacatttaaaaaatgaggtgaaagaaagctatagtggcatagaaaaagtataaagctcagttagtttttttattattattattattaaaagttaattcaggactgatgtgacctaccagatttcagaacatgtgttaatagtatatatgccactgaaaacttaggtcctgtatcatacttttttctttaagactttttaagaaatattacttaaacatgtggcttgctcagtgtttaattgcaagttttcaatcttggactttgaaaacaggattaaacgttagtattcgtgtgaatcagactaagtgggatttcatttttacaactctgctctacttagcctttggatttagaagtaaaaataaagtatctctgactttctgttaca

SEQ ID NO: 452809 - DNA, 2109 bp, Homo sapiens
ctaacaattaaccggttcctccattaagcgccagtattaacaactcataagcgatgtggttcaccggtgggcgctaacttcgaagcaacattatcgatatgataggccaatcgccgggtcgatttacagacgggtcgtcttgtcggctcctgtgtgtaggagggatttcggcctgagagcgggccgaggagattggcgacggtgtcgcccgtgttttcgttggcgggtgcctgggctggtgggaacagccgcccgaaggaagcaccatgatttcggccgcgcagttgttggatgagttaatgggccgggaccgaaacctagccccggacgagaagcgcagcaacgtgcggtgggaccacgagagcgtttgtaaatattatctctgtggtttttgtcctgcggaattgttcacaaatacacgttctgatcttggtccgtgtgaaaaaattcatgatgaaaatctacgaaaacagtatgagaagagctctcgtttcatgaaagttggctatgagagagattttttgcgatacttacagagcttacttgcagaagtagaacgtaggatcagacgaggccatgctcgtttggcattatctcaaaaccagcagtcttctggggccgctggcccaacaggcaaaaatgaagaaaaaattcaggttctaacagacaaaattgatgtacttctgcaacagattgaagaattagggtctgaaggaaaagtagaagaagcccaggggatgatgaaattagttgagcaattaaaagaagagagagaactgctaaggtccacaacgtcgacaattgaaagctttgctgcacaagaaaaacaaatggaagtttgtgaagtatgtggagcctttttaatagtaggagatgcccagtcccgggtagatgaccatttgatgggaaaacaacacatgggctatgccaaaattaaagctactgtagaagaattaaaagaaaagttaaggaaaagaaccgaagaacctgatcgtgatgagcgtctaaaaaaggagaagcaagaaagagaagaaagagaaaaagaacgggagagagaaagggaagaaagagaaaggaaaagacgaagggaagaggaagaaagagaaaaagaaagggctcgtgacagagaaagaagaaagagaagtcgttcacgaagtagacactcaagccgaacatcagacagaagatgcagcaggtctcgggaccacaaaaggtcacgaagtagagaaagaaggcggagcagaagtagagatcgacgaagaagcagaagccatgatcgatcagaaagaaaacacagatctcgaagtcgggatcgaagaagatcaaaaagccgggatcgaaagtcatataagcacaggagcaaaagtcgggacagagaacaagatagaaaatccaaggagaaagaaaagaggggatctgatgataaaaaaagtagtgtgaagtccggtagtcgagaaaagcagagtgaagacacaaacactgaatcgaaggaaagtgatactaagaatgaggtcaatgggaccagtgaagacattaaatctgaaggtgacactcagtccaattaaaactgatctgataagacctcagatcagacagaggactactgttcgaagatttttggaagaatactgagaacggcataaagtgaagatcgacatttaaaaaatgaggtgaaagaaagctatagtggcatagaaaaagtataaagctcagttagtttttttattattattattattaaaagttaattcaggactgatgtgacctaccagatttcagaacatgtgttaatagtatatatgccactgaaaacttaggtcctgtatcatacttttttctttaagactttttaagaaatattacttaaacatgtggcttgctcagtgtttaattgcaagttttcaatcttggactttgaaaacaggattaaacgttagtattcgtgtgaatcagactaagtgggatttcatttttacaactctgctctacttagcctttggatttagaagtaaaaataaagtatctctgactttctgttacaaagttgattgtctctgtcattgaaaagttttagtattaatctttttctaataaagttattgactctga

SEQ ID NO: 452810 - DNA, 2041 bp, Homo sapiens
ctaacaattaaccggttcctccattaagcgccagtattaacaactcataagcgatgtggttcaccggtgggcgctaacttcgaagcaacattatcgatatgataggccaatcgccgggtcgatttacagacgggtcgtcttgtcggctcctgtgtgtaggagggatttcggcctgagagcgggccgaggagattggcgacggtgtcgcccgtgttttcgttggcgggtgcctgggctggtgggaacagccgcccgaaggaagcaccatgatttcggccgcgcagttgttggatgagttaatgggccgggaccgaaacctagccccggacgagaagcgcagcaacgtgcggtgggaccacgagagcgtttgtaaatattatctctgtggtttttgtcctgcggaattgttcacaaatacacgttctgatcttggtccgtgtgaaaaaattcatgatgaaaatctacgaaaacagtatgagaagagctctcgtttcatgaaagttggctatgagagagattttttgcgatacttacagagcttacttgcagaagtagaacgtaggatcagacgaggccatgctcgtttggcattatctcaaaaccagcagtcttctggggccgctggcccaacaggcaaaaatgaagaaaaaattcaggttctaacagacaaaattgatgtacttctgcaacagattgaagaattagggtctgaaggaaaagtagaagaagcccaggggatgatgaaattagttgagcaattaaaagaagagagagaactgctaaggtccacaacgtcgacaattgaaagctttgctgcacaagaaaaacaaatggaagtttgtgaagtatgtggagcctttttaatagtaggagatgcccagtcccgggtagatgaccatttgatgggaaaacaacacatgggctatgccaaaattaaagctactgtagaagaattaaaagaaaagttaaggaaaagaaccgaagaacctgatcgtgatgagcgtctaaaaaaggagaagcaagaaagagaagaaagagaaaaagaacgggagagagaaagggaagaaagagaaaggaaaagacgaagggaagaggaagaaagagaaaaagaaagggctcgtgacagagaaagaagaaagagaagtcgttcacgaagtagacactcaagccgaacatcagacagaagatgcagcaggtctcgggaccacaaaaggtcacgaagtagagaaagaaggcggagcagaagtagagatcgacgaagaagcagaagccatgatcgatcagaaagaaaacacagatctcgaagtcgggatcgaagaagatcaaaaagccgggatcgaaagtcatataagcacaggagcaaaagtcgggacagagaacaagatagaaaatccaaggagaaagaaaagaggggatctgatgataaaaaaagtagtgtgaagtccggtagtcgagaaaagcagagtgaagacacaaacactgaatcgaaggaaagtgatactaagaatgaggtcaatgggaccagtgaagacattaaatctgaaggtgacactcagtccaattaaaactgatctgataagacctcagatcagacagaggactactgttcgaagatttttggaagaatactgagaacggcataaagtgaagatcgacatttaaaaaatgaggtgaaagaaagctatagtggcatagaaaaagtataaagctcagttagtttttttattattattattattaaaagttaattcaggactgatgtgacctaccagatttcagaacatgtgttaatagtatatatgccactgaaaacttaggtcctgtatcatacttttttctttaagactttttaagaaatattacttaaacatgtggcttgctcagtgtttaattgcaagttttcaatcttggactttgaaaacaggattaaacgttagtattcgtgtgaatcagactaagtgggatttcatttttacaactctgctctacttagcctttggatttagaagtaaaaataaagtatctctgactttctgttaca

SEQ ID NO: 452811 - DNA, 2709 bp, Homo sapiens
ctaacaattaaccggttcctccattaagcgccagtattaacaactcataagcgatgtggttcaccggtgggcgctaacttcgaagcaacattatcgatatgataggccaatcgccgggtcgatttacagacgggtcgtcttgtcggctcctgtgtgtaggagggatttcggcctgagagcgggccgaggagattggcgacggtgtcgcccgtgttttcgttggcgggtgcctgggctggtgggaacagccgcccgaaggaagcaccatgatttcggccgcgcagttgttggatgagttaatgggccgggaccgaaacctagccccggacgagaagcgcagcaacgtgcggtgggaccacgagagcgtttgtaaatattatctctgtggtttttgtcctgcggaattgttcacaaatacacgttctgatcttggtccgtgtgaaaaaattcatgatgaaaatctacgaaaacagtatgagaagagctctcgtttcatgaaagttggctatgagagagattttttgcgatacttacagagcttacttgcagaagtagaacgtaggatcagacgaggccatgctcgtttggcattatctcaaaaccagcagtcttctggggccgctggcccaacaggcaaaaatgaagaaaaaattcaggttctaacagacaaaattgatgtacttctgcaacagattgaagaattagggtctgaaggaaaagtagaagaagcccaggggatgatgaaattagttgagcaattaaaagaagagagagaactgctaaggtccacaacgtcgacaattgaaagctttgctgcacaagaaaaacaaatggaagtttgtgaagtatgtggagcctttttaatagtaggagatgcccagtcccgggtagatgaccatttgatgggaaaacaacacatgggctatgccaaaattaaagctactgtagaagaattaaaagaaaagttaaggaaaagaaccgaagaacctgatcgtgatgagcgtctaaaaaaggagaagcaagaaagagaagaaagagaaaaagaacgggagagagaaagggaagaaagagaaaggaaaagacgaagggaagaggaagaaagagaaaaagaaagggctcgtgacagagaaagaagaaagagaagtcgttcacgaagtagacactcaagccgaacatcagacagaagatgcagcaggtctcgggaccacaaaaggtcacgaagtagagaaagaaggcggagcagaagtagagatcgacgaagaagcagaagccatgatcgatcagaaagaaaacacagatctcgaagtcgggatcgaagaagatcaaaaagccgggatcgaaagtcatataagcacaggagcaaaagtcgggacagagaacaagatagaaaatccaaggagaaagaaaagaggggatctgatgataaaaaaagtagtgtgaagtccggtagtcgagaaaagcagagtgaagacacaaacactgaatcgaaggaaagtgatactaagaatgaggtcaatgggaccagtgaagacattaaatctgaaggtgacactcagtccaattaaaactgatctgataagacctcagatcagacagaggtaagtgtattgtttctcactttgattagggctttttgttactgtttgacagtgcagcgtaagtatgcacagatgaagatggaactaagccgagtaagaagacatacaaaagcctcttctgaaggaaaagacagtgtagtcctgcaaaacattttgaggtacattgttttgtctcagctattttgtagcagactcgtgcccccattagtgtgcctctttggaaattatcgcccacatttgtaatatagtcgccattgaaaagttaattatcctttttttagggattttgatgtcatttcttttttttttttaataaaaaggttgaactgtttttttttttctttttggtattaagtccatcttgtgttggtacattggcagagacatatgctttaaaaacttaaatatttcggaggcacatgttggactactttgttttaattaaactgctagtatttctttgtcaaggatgtttctagttttttgctttattgccttgcattctaatgcagtttgttctgtaactcgagagccagtagcattggattgatggaagtgtagggtttatgaattattgcagctgactaccatacctcacacagcgttggtgttgtgagcggcccatgaaaagccaaattaaaaatcaaggattcagtcaaactaagcaggactactgttcgaagatttttggaagaatactgagaacggcataaagtgaagatcgacatttaaaaaatgaggtgaaagaaagctatagtggcatagaaaaagtataaagctcagttagtttttttattattattattattaaaagttaattcaggactgatgtgacctaccagatttcagaacatgtgttaatagtatatatgccactgaaaacttaggtcctgtatcatacttttttctttaagactttttaagaaatattacttaaacatgtggcttgctcagtgtttaattgcaagttttcaatcttggactttgaaaacaggattaaacgttagtattcgtgtgaatcagactaagtgggatttcatttttacaactctgctctacttagcctttggatttagaagtaaaaataaagtatctctgactttctgttaca

SEQ ID NO: 452812 - DNA, 2424 bp, Homo sapiens
ctaacaattaaccggttcctccattaagcgccagtattaacaactcataagcgatgtggttcaccggtgggcgctaacttcgaagcaacattatcgatatgataggccaatcgccgggtcgatttacagacgggtcgtcttgtcggctcctgtgtgtaggagggatttcggcctgagagcgggccgaggagattggcgacggtgtcgcccgtgttttcgttggcgggtgcctgggctggtgggaacagccgcccgaaggaagcaccatgatttcggccgcgcagttgttggatgagttaatgggccgggaccgaaacctagccccggacgagaagcgcagcaacgtgcggtgggaccacgagagcgtttgtaaatattatctctgtggtttttgtcctgcggaattgttcacaaatacacgttctgatcttggtccgtgtgaaaaaattcatgatgaaaatctacgaaaacagtatgagaagagctctcgtttcatgaaagttggctatgagagagattttttgcgatacttacagagcttacttgcagaagtagaacgtaggatcagacgaggccatgctcgtttggcattatctcaaaaccagcagtcttctggggccgctggcccaacaggcaaaaatgaagaaaaaattcaggttctaacagacaaaattgatgtacttctgcaacagattgaagaattagggtctgaaggaaaagtagaagaagcccaggggatgatgaaattagttgagcaattaaaagaagagagagaactgctaaggtccacaacgtcgacaattgaaagctttgctgcacaagaaaaacaaatggaagtttgtgaagtatgtggagcctttttaatagtaggagatgcccagtcccgggtagatgaccatttgatgggaaaacaacacatgggctatgccaaaattaaagctactgtagaagaattaaaagaaaagttaaggaaaagaaccgaagaacctgatcgtgatgagcgtctaaaaaaggagaagcaagaaagagaagaaagagaaaaagaacgggagagagaaagggaagaaagagaaaggaaaagacgaagggaagaggaagaaagagaaaaagaaagggctcgtgacagagaaagaagaaagagaagtcgttcacgaagtagacactcaagccgaacatcagacagaagatgcagcaggtctcgggaccacaaaaggtcacgaagtagagaaagaaggcggagcagaagtagagatcgacgaagaagcagaagccatgatcgatcagaaagaaaacacagatctcgaagtcgggatcgaagaagatcaaaaagccgggatcgaaagtcatataagcacaggagcaaaagtcgggacagagaacaagatagaaaatccaaggagaaagaaaagaggggatctgatgataaaaaaagtagtgtgaagtccggtagtcgagaaaagcagagtgaagacacaaacactgaatcgaaggaaagtgatactaagaatgaggtcaatgggaccagtgaagacattaaatctgaaggtgacactcagtccaattaaaactgatctgataagacctcagatcagacagaggtaagtgtattgtttctcactttgattagggctttttgttactgtttgacagtgcagcgtaagtatgcacagatgaagatggaactaagccgagtaagaagacatacaaaagcctcttctgaaggaaaagacagtgtagtcctgcaaaacattttgaggtacattgttttgtctcagctattttgtagcagactcgtgcccccattagtgtgcctctttggaaattatcgcccacatttgtaatatagtcgccattgaaaagttaattatcctttttttagggattttgatgtcatttcttttttttttttaataaaaaggttgaactgtttttttttttctttttggtattaagtccatcttgtgttggtacattggcagagacatatgctttaaaaacttaaatatttcggaggcacatgttggactactttgttttaattaaactgctagtatttctttgtcaaggatgtttctagttttttgctttattgccttgcattctaatgcagtttgttctgtaactcgagagccagtagcattggattgatggaagtgtagggtttatgaattattgcagctgactaccatacctcacacagcgttggtgttgtgagcggcccatgaaaagccaaattaaaaatcaaggattcagtcaaactaagcaggtactcatgccaggtactcctttctctacccacatccatgtttgaatgctattgcctgtgatctttacgcttaactgttgtgtatcttttttgttctttacaagaagtgcagaggggttttttgtcgatgcaacacgtctctcagggatcctcagaat

SEQ ID NO: 452813 - DNA, 2511 bp, Homo sapiens
tgcagcttgcttctgctggtcgactctgaggtatccccaacccgggacacctttggtcacgaagtagagaaagaaggcggagcagaagtagagatcgacgaagaagcagaagccatgatcgatcagaaagaaaacacagatctcgaagtcgggatcgaagaagatcaaaaagccgggatcgaaagtcatataagcacaggagcaaaagtcgggacagagaacaagatagaaaatccaaggagaaagcgacacagaacaaggaggggactctgactgactaaccacaaacacgtacgtgtgaactgtcctggtacgtcgacgaacaacgcacgacgtgacacgaccagcaaaccacctgaacttcgacacggacacacgtgactacctacacgacactgactggtcaattggggacccaggttgacacgaacacttacaacttctgaacatggtgaacacatcacgttccaaagttaagactctgagtcttgagtaaggaaccatcaagactcatgaccatgagtgttacagctgtactatggttttcatcatcgtattgaatatacggggactttcttagtgattacctggttctgaccagttggcagcggtaacgtcagcgtaagtatgcacagatgaagatggaactaagccgagtaagaagacatacaaaagcctcttctgaaggaaaagacagtgtagtcctgcaaaacattttgaggtacattgttttgtctcagctattttgtagcagactcgtgcccccattagtgtgcctctttggaaattatcgcccacatttgtaatatagtcgccattgaaaagttaattatcctttttttagggattttgatgtcatttcttttttttttttaataaaaaggttgaactgtttttttttttctttttggtattaagtccatcttgtgttggtacattggcagagacatatgctttaaaaacttaaatatttcggaggcacatgttggactactttgttttaattaaactgctagtatttctttgtcaaggatgtttctagttttttgctttattgccttgcattctaatgcagtttgttctgtaactcgagagccagtagcattggattgatggaagtgtagggtttatgaattattgcagctgactaccatacctcacacagcgttggtgttgtgagcggcccatgaaaagccaaattaaaaatcaaggattcagtcaaactaagcaggtactcatgccaggtactcctttctctacccacatccatgtttgaatgctattgcctgtgatctttacgcttaactgttgtgtatcttttttgttctttacaagaagtgcagaggggttttttgtgtattgcgtgaaaacttataaaacaaatgttaacagaatggaattttttttcaactgtatgtagggctgcagtggtggccagaattagatatctttaaagaattttaaatacaataaacacttcatattattcgccttgttacactcaatgcaattctcaagtctataagaggtatgtgcttaatatttcctactgtgtaggagaatttgcagtcagccataggtatgtaggaatagtcactcactggctgatacatttaaagcagcagtgtgaatagcaaggacagacaccttcaatttgtgaaatcaaagaactgatgcactatatagaacgaatttgggtttttaaagaaatattaaaagttaggtactgtaagtgttcttaaaacctgtaaacttcattctgtgggctagtggtgtgggacaaaatattcctaatgaaaggaagtaccaattagttgatttgttggtggcattccccttttgggaaagcaatgtaaggttatgtctgtgtatgtcattcacacttaggcaagcatacacaggcacatggctttaagaaccacactgatgccttgataattaaaaagaatacaagcattccatgtacacatgttaattagcagttagtgactgggccaacactttctcataaaaattggccttttacatgttgtctaattatcatttttccccaaattttgcgttgtaggactactgttcgaagatttttggaagaatactgagaacggcataaagtgaagatcgacatttaaaaaatgaggtgaaagaaagctatagtggcatagaaaaagtataaagctcagttagtttttttattattattattattaaaagttaattcaggactgatgtgacctaccagatttcagaacatgtgttaatagtatatatgccactgaaaacttaggtcctgtatcatacttttttctttaagactttttaagaaatattacttaaacatgtggcttgctcagtgtttaattgcaagttttcaatcttggactttgaaaacaggattaaacgttagtattcgtgtgaatcagactaagtgggatttcatttttacaactctgctctacttagcctttggatttagaagtaaaaataaagtatctctgactttctgttaca

SEQ ID NO: 452814 - DNA, 2262 bp, Homo sapiens
ggcggctctgggcgccgggagtcggcgggcggcgaggagcgcggagccggagctggacgccgccgccgccaccgccacctgcgcggcagtcatcaagatgtcatggcacccccagtaccggagctccaagttccgtcatgtctttggcaaaccagccagcaaggagaactgctacgactccgtgcctatcacccgcagcgttcacgacaaccacttctgtgccgtgaacccccacttcattgcagttgtgactgagtgtgctggtggaggggccttcctcgtcatccccctgcaccagacagggaagttggacccccactacccaaaagtctgcgggcacagaggcaacgttttggatgtcaagtggaacccttttgatgattttgagatcgcctcctgttctgaagatgccacaattaagatctggagcatccccaagcagctgctgaccaggaacctcacggcctacaggaaggaactcgtgggccacgcgcgcagagtaggcctggtggagtggcaccccacggccgccaacatcctcttcagtgctggctatgactacaaggtgatgatctggaacctggatacaaaggagtctgtcatcacaagccccatgagtacgattagctgtcaccaagatgtgatcctctccatgtccttcaacaccaacggcagcctgttggccaccacctgcaaagaccgcaagattcgggttattgacccccgagcagggaccgtcctccaggaggccagctacaaagggcaccgggccagcaaagtgctgtttctggggaacctgaagaagctgatgtccacaggcacatcccgatggaacaaccggcaggtggccttgtgggaccaggataacctctctgtgcctctgatggaggaggacctggacggctcctcgggcgtgctgtttcccttctatgacgcggacaccagcatgctctacgtggtggggaagggagatggcaacatccgctactacgaggtgagcgccgacaagcctcacctgagctacctgactgagtaccgctcctataacccacagaaggggatcggtgtcatgccaaagagaggactcgacgtgtcctcctgcgagatcttccgcttctacaagctgatcacaaccaaaagcctcatcgagcccatctccatgattgtgccccggcggtcagaatcctaccaagaggacatataccctccaacagcaggggcccagccctccctgacggcccaggagtggctcagcgggatgaatcgagacccaatcctggtgtcccttaggcctggctctgagctgctgagaccccacccactgcctgcagagagacctatcttcaattccatggccccagcctcaccccggctcttgaatcagacagaaaagctggctgcagaagatggctggaggtcttcctccctgttggaggagaagatgccaaggtgggcagcagaacacaggctggaggagaagaaaacctggctgacaaatggctttgacgttttcgaatgccccccaccaaagacagagaatgagttgctgcagatgttctaccggcaacaggaggagatccgaaggctccgggagctgttgacccagcgagaggtccaggccaaacagttggaactggagatcaaaaacttgcggatgggctcagagcagctctgagcagagacctctgccctcctcaccctcagggacaccactcggctccatggggaggtttagaaccaaaccacaagtcccctcaaggacaaccactatttctatattttttaccagaaaacaaaactctccatcgctgaaagagattccagtgggacatggtgccgtttttctgtttgccttcttgcaacaacagtttctgaattgactttgttttcagatgatgccttctgttgaattctgttattaagggcccatgatgagctgtaacttctcaagaggaaagaacacagtagaaaactagagctggaaggatctaggttgacctgtctgtgattttcaaactgtggtccagagaataggggaagactgggccagacgcagtggctcatgcctgtaatcccagcactctgggaggctgaggtgggcggattgcttgaggtcgggagtttgaaaccagtctcaccaggcgcagtggctcacgcctgtaattccagcatgttgggaggccgaggctggtggatcacgaggtcagcagttcgagaccagcctgaccaacatggtgaaaccccatctctactaaaaatccc

SEQ ID NO: 452815 - DNA, 4329 bp, Homo sapiens
  misc_feature (1)..(1): n is a, c, g, or t
  misc_feature (230)..(230): n is a, c, g, or t
  misc_feature (710)..(710): n is a, c, g, or t
  misc_feature (866)..(866): n is a, c, g, or t
  misc_feature (877)..(877): n is a, c, g, or t
  misc_feature (1020)..(1020): n is a, c, g, or t
  misc_feature (1161)..(1161): n is a, c, g, or t
  misc_feature (1662)..(1662): n is a, c, g, or t
  misc_feature (1795)..(1795): n is a, c, g, or t
  misc_feature (1804)..(1804): n is a, c, g, or t
  misc_feature (2018)..(2018): n is a, c, g, or t
  misc_feature (2056)..(2056): n is a, c, g, or t
  misc_feature (2114)..(2114): n is a, c, g, or t
  misc_feature (2166)..(2166): n is a, c, g, or t
  misc_feature (2193)..(2193): n is a, c, g, or t
  misc_feature (2206)..(2206): n is a, c, g, or t
  misc_feature (2320)..(2320): n is a, c, g, or t
  misc_feature (2381)..(2381): n is a, c, g, or t
  misc_feature (2390)..(2390): n is a, c, g, or t
  misc_feature (2548)..(2548): n is a, c, g, or t
ntttttgtatttttagtagagacagggtttcaccatgttggccaggctggtctcgaactcctgacctcaggtgatccacccaccttggcctcccaaagtgctgggattaggtgaaacagtttcttgcggacttatcttttcattttccatggagatagacctaggagtggaattgctgggtcatgtgggaaccggttaaccttttgaggaactgccagactattttccanaagagctgcaccattttacatgcctaccagcagtgtgtgaggggaaatgcccttttattgaacatctgccatgtgctaggcactgtgccatacctcctctcccatgatcctcacaccaacctgtgaaatacctgtgattgctcccttttactgaggaggacaccagagctcagagaagtgaagtaactcccccaggatcccacaggaataagaagtaaggcctagattcacacccagctctgtcccttatgttttcctgttgactggttgctaactgactatgtgactgtccagatgctaatgtggaatccacctcctccccaaccctcctgggcactgtcttgcagacagggaagttggacccccactacccaaaagtctgcgggcacagaggcaacgttttggatgtcaagtggaacccttttgatgattttgagatcgcctcctgttctgaagatgccacagtgagtgtcagccccngaggggcttccccttcctgaagagtgggattggggtggttggggtggaatggtacctgttcttggctctggtgcccctgactccatcgcggaggtgaggtcactgtgtggggaggtgttaagttaaggtagaggaggagacattcttggtgctgtnggactagcggnaccacccctcctctctatgggccttagttcccccccatataaaatgggcataatagttccacccagctaataaagcccagtgaaaatgtatattccgatgggaaaacccatccttcggggagctataaaaggctatgaggggnatttttatggtgatcagaaaagatgttccacttaatcccatagtgaggaagcgagctataaaaggctgtgagggccttggatgaatgtggacactaaaaccattccagcagcttcagtctcactcacttttttgagcccgngttctgtaccagggttatcatccctgccccaacaatgttcagtgttacttatttacaattcattttgtacccacttctaaaatatggtggtatggcttaagacaagaaccacagatatgccaggttcagtggctcacacctgtaatctcagcactttgggagactgaggtgggagaatcacttgaggccaggagttggagaccaacctaggcaacatagtgagaccctgtctctattaaaaaattaaaaaacacagatatgatcagatgattaaaataaagataaaagtcattgtcaccatttattgtgagcccactgtattcctaactgtcatcacacttatcatttcacagtctccccagcaaccccacaaggtaggatatttttctgatggagaagctgaggatcagagaggtacagcaatttgcctaatgttacacagcctgtgggaggcagagcaagacttcagactgaggcctgtctgattccacagcccattcnctttccaatgtgctgtgacacatctttaaagagaagcagccacagatggagaaactgaggaaatactagaaatgatggctaagaagggttgcagcagctaagctgctagtttagctaagagctacctggcagncaaggcaanatgggcaacagaatgtattgcaaaaccttcagttagatcaaaagaagcagaccagttcatcaggaaaggaaggcagaaaattcaaagaggatttgtgtcggtttccatatagcagatgctgaggaacgtaaaggacagtgtctgccgaggtgatttcaccaaagggacaatcaggtcctgtgagaattggccctgtccccagggagtatagggnctctggcaggatatcaaatatctgaaactgtccccacntttgtgatacctgccttttcaggactgctttgaaggctcccatcaagatctttataantctcttgctagcctcattgcctgccactgccccttccccgatgccccagggnaggacgtgactgttgggggactgaagnaggaaggggcttncctccccgaagctatgcccacagtgaatttatggggtgttcctccctgccttcagggcctggagggcacggttgctcctctagcagtggggagtcttctctgcttcagtgttgngggtggtaccttcatcttccaaacatacctcttcagagtgtgtcttcctcccggggttctntgcagtganagccctcatcagaccgaagtatctggagcctgtcactactctcgtggggttggcttcctggttttaaatccaagatgaccaggaaataaatatttgctgaattgaaagcaaagtcgtctacctgaaaaacctgtatacctctaagggaaacagtgcanacaatcaactaggggccagagaaccttgcaggaccaataaggaagatcaagtcagcagcatcccaggatcaccttgtactccatttgtatacctctgtgacagggagcttactctctgccatggcagccccctccatcttcagacaacactactctggaaggaagtcccagcacctcttctcaggccctcaccatgaaatacaggcccatgaccccatccagcccagcctcctgaccttcagagtttcctcttgcaggccatccagggtgcacctccaaagcaagaagtttgtccctgccctgctgcagagacctcgccggctccctagtgcctgaggatgcagcctaaacccttcatcctggcatttgaggctctaccctgggtctttgggacaagaagaacactgtactttggggatatcctagcttaggagacaggcctgaaacccagccacctgcccaccacctcaggccagcaggatgacaaagatctctcaagggcagatttggaggcctagactcatccctggtcagcgctggcccctgctcaggctggaggagcttggggaagcccctgtctgtctgaggaccctcagctgcccctccactgcccctcaatgcccatagccactgagtgggaggtggctatggagagagctcccttggtccttctgctggtcactgccagatctgtggcttaggctggtgacggtgccaaggtgccctggctaatgctgccttgggccctgtctcccctgccagattaagatctggagcatccccaagcagctgctgaccaggaacctcacggcctacaggaaggaactcgtgggccacgcgcgcagagtaggcctggtggagtggcaccccacggccgccaacatcctcttcagtgctggctatgactacaaggtgagtctgggtattctttctctggggcagccccaacaagttcccacaaactggaatacaatggaaatgtattctgtcacagttctggagaccagaaatcgaaaatcaaggtgttgggagagccagctcctccagatgccctagggaagaatccttccatgcctctcccagcttctggtggctccaggcatccttggctatagctgcgtcactccaggctctgtttctgtcttcacacggccttctctctgtgtacctgtcttccttataggaagaggagagcaactatcattggatttagggcccacctaatccattatgatctcatcttaactaatttcagcagcgaagaccccatttccaaataaggtcacattctgaggttccaggtggacatgagttttggggggaaccctgttcaactcattatagcctgcccggagtggatgggatgcactgcccagaaaatcgttcccccgaccctgctccactgacaatcaagcatgcaggcagtaggccctgtagattgggacccacagtacaggagacctcaattctattccgactcagtctctgacctgcactatagcctgggaaagtgccttgacttctctaggcctcagtttcccaatctgtacacaaatggaattggtggcaccatagctatggcctttcagttctttccttttgacactataggggtttacagagacacctcgggaccctctgtgttggataaaagggaggtggggggccggacatggtggctcacacctgtaatcccaacagtttgagaggctgaggtgggaggatcacttgagcccaaggatttgagaccagccaacatagtgagaccccatctctacaaa

SEQ ID NO: 452816 - DNA, 2275 bp, Homo sapiens
  misc_feature (2058)..(2058): n is a, c, g, or t
  misc_feature (2070)..(2070): n is a, c, g, or t
ggcggctctgggcgccgggagtcggcgggcggcgaggagcgcggagccggagctggacgccgccgccgccaccgccacctgcgcggcagtcatcaagatgtcatggcacccccagtaccggagctccaagttccgtcatgtctttggcaaaccagccagcaaggagaactgctacgactccgtgcctatcacccgcagcgttcacgacaaccacttctgtgccgtgaacccccacttcattgcagttgtgactgagtgtgctggtggaggggccttcctcgtcatccccctgcaccagacagggaagttggacccccactacccaaaagtctgcgggcacagaggcaacgttttggatgtcaagtggaacccttttgatgattttgagatcgcctcctgttctgaagatgccacaattaagatctggagcatccccaagcagctgctgaccaggaacctcacggcctacaggaaggaactcgtgggccacgcgcgcagagtaggcctggtggagtggcaccccacggccgccaacatcctcttcagtgctggctatgactacaaggtgatgatctggaacctggatacaaaggagtctgtcatcacaagccccatgagtacgattagctgtcaccaagatgtgatcctctccatgtccttcaacaccaacggcagcctgttggccaccacctgcaaagaccgcaagattcgggttattgacccccgagcagggaccgtcctccaggaggccagctacaaagggcaccgggccagcaaagtgctgtttctggggaacctgaagaagctgatgtccacaggcacatcccgatggaacaaccggcaggtggccttgtgggaccaggataacctctctgtgcctctgatggaggaggacctggacggctcctcgggcgtgctgtttcccttctatgacgcggacaccagcatgctctacgtggtggggaagggagatggcaacatccgctactacgaggtgagcgccgacaagcctcacctgagctacctgactgagtaccgctcctataacccacagaaggggatcggtgtcatgccaaagagaggactcgacgtgtcctcctgcgagatcttccgcttctacaagctgatcacaaccaaaagcctcatcgagcccatctccatgattgtgccccggcggtcagaatcctaccaagaggacatataccctccaacagcaggggcccagccctccctgacggcccaggagtggctcagcgggatgaatcgagacccaatcctggtgtcccttaggcctggctctgagctgctgagaccccacccactgcctgcagagagacctatcttcaattccatggccccagcctcaccccggctcttgaatcagacagaaaagctggctgcagaagatggctggaggtcttcctccctgttggaggagaagatgccaaggtgggcagcagaacacaggctggaggagaagaaaacctggctgacaaatggctttgacgttttcgaatgccccccaccaaagacagagaatgagttgctgcagatgttctaccggcaacaggaggagatccgaaggctccgggagctgttgacccagcgagaggtccaggccaaacagttggaactggagatcaaaaacttgcggatgggctcagagcagctctgagcagagacctctgccctcctcaccctcagggacaccactcggctccatggggaggtttagaaccaaaccacaagtcccctcaaggacaaccactatttctatattttttaccagaaaacaaaactctccatcgctgaaagagattccagtgggacatggtgccgtttttctgtttgccttcttgcaacaacagtttctgaattgactttgttttcagatgatgccttctgttgaattctgttattaagggcccatgatgagctgtaacttctcaagaggaaagaacacagtagaaaactagagctggaaggatctaggttgacctgtctgtgattttcaaactgtggtccagagaataggggaagactgggccagacgcaggnatgctgtatccngactgggaagcgaggggcgatgttgagcggggagtgaacctcttacagggacggcgagcgtgatccgagtggagcaagggggcacagcgtcgtcgaaacggcatggaccctctaacaaaaatgggggggcgacacagggaaggaataacggctggattcccgtacgtgtttaccaccctgaggtcgtgaccccgccgcgccgctg

SEQ ID NO: 452817 - DNA, 2065 bp, Homo sapiens
ggcggctctgggcgccgggagtcggcgggcggcgaggagcgcggagccggagctggacgccgccgccgccaccgccacctgcgcggcagtcatcaagatgtcatggcacccccagtaccggagctccaagttccgtcatgtctttggcaaaccagccagcaaggagaactgctacgactccgtgcctatcacccgcagcgttcacgacaaccacttctgtgccgtgaacccccacttcattgcagttgtgactgagtgtgctggtggaggggccttcctcgtcatccccctgcaccagacagggaagttggacccccactacccaaaagtctgcgggcacagaggcaacgttttggatgtcaagtggaacccttttgatgattttgagatcgcctcctgttctgaagatgccacaattaagatctggagcatccccaagcagctgctgaccaggaacctcacggcctacaggaaggaactcgtgggccacgcgcgcagagtaggcctggtggagtggcaccccacggccgccaacatcctcttcagtgctggctatgactacaaggtgatgatctggaacctggatacaaaggagtctgtcatcacaagccccatgagtacgattagctgtcaccaagatgtgatcctctccatgtccttcaacaccaacggcagcctgttggccaccacctgcaaagaccgcaagattcgggttattgacccccgagcagggaccgtcctccaggaggccagctacaaagggcaccgggccagcaaagtgctgtttctggggaacctgaagaagctgatgtccacaggcacatcccgatggaacaaccggcaggtggccttgtgggaccaggataacctctctgtgcctctgatggaggaggacctggacggctcctcgggcgtgctgtttcccttctatgacgcggacaccagcatgctctacgtggtggggaagggagatggcaacatccgctactacgaggtgagcgccgacaagcctcacctgagctacctgactgagtaccgctcctataacccacagaaggggatcggtgtcatgccaaagagaggactcgacgtgtcctcctgcgagatcttccgcttctacaagctgatcacaaccaaaagcctcatcgagcccatctccatgattgtgccccggcggtcagaatcctaccaagaggacatataccctccaacagcaggggcccagccctccctgacggcccaggagtggctcagcgggatgaatcgagacccaatcctggtgtcccttaggcctggctctgagctgctgagaccccacccactgcctgcagagagacctatcttcaattccatggccccagcctcaccccggctcttgaatcagacagaaaagctggctgcagaagatggctggaggtcttcctccctgttggaggagaagatgccaagttgctgcagatgttctaccggcaacaggaggagatccgaaggctccgggagctgttgacccagcgagaggtccaggccaaacagttggaactggagatcaaaaacttgcggatgggctcagagcagctctgagcagagacctctgccctcctcaccctcagggacaccactcggctccatggggaggtttagaaccaaaccacaagtcccctcaaggacaaccactatttctatattttttaccagaaaacaaaactctccatcgctgaaagagattccagtgggacatggtgccgtttttctgtttgccttcttgcaacaacagtttctgaattgactttgttttcagatgatgccttctgttgaattctgttattaagggcccatgatgagctgtaacttctcaagaggaaagaacacagtagaaaactagagctggaaggatctaggttgacctgtctgtgattttcaaactgtggtccagagaataggggaagactgggccagacgcagtggctcatgcctgtaatcccagcactctgggaggctgaggtgggcggattgcttgaggtcgggagtttgaaacccctgggtgacagagcgagactccatctcc

SEQ ID NO: 452818 - DNA, 564 bp, Homo sapiens
gtaagtgagggacactgaagttcatgcctgtaatcccagcacttcgggaggccgaggtgggagaatcagggtcagggcttcagtgcggggtctggggagacagggatgagtcagatgggaggagagacagcatagcaacactctgacttggtgggggctgtacttgacgtgtgcaacagcacaaaggaggaagtcagggaaggcttctcagaggaggcaacattggaggaactgaaagaggaagcagagcccagcaggggagagagggatgtgttctaggtcaaggttaagcagttaccacaagagcagagatggaaagggctgacctagaagagcctctaggaagcagtcctcagttcctttctaagtgtgcttgaggattaaaaacacagctatatttctgtaatctacaagaaacccactttaaacataaagacatggctagattaaaagtaagggactggagaaagatgcaccctgctaaccctactcaaaaggaatctggagcggtttgattaagagcatttgggtcacaggagctgtggggatggagatggggaacct

SEQ ID NO: 452819 - DNA, 2431 bp, Homo sapiens
cacaggggcactgacatctttgctggactcttttaatcctcataaacccaggctgctggcactcgaaatttgagaagggcaatcagtctggcctcttgcctttctggcctgcaggcccagcctgaacaaacaatttaggtggagctcctggaggctggaagcagagaggaggtacctcaccatcctctcctgccagctgttgcagactctgcctggggaactgtttaagggtgagcagaggcatttatctccatgttaacaagcagatgtcatggcacccccagtaccggagctccaagttccgtcatgtctttggcaaaccagccagcaaggagaactgctacgactccgtgcctatcacccgcagcgttcacgacaaccacttctgtgccgtgaacccccacttcattgcagttgtgactgagtgtgctggtggaggggccttcctcgtcatccccctgcaccagacagggaagttggacccccactacccaaaagtctgcgggcacagaggcaacgttttggatgtcaagtggaacccttttgatgattttgagatcgcctcctgttctgaagatgccacaattaagatctggagcatccccaagcagctgctgaccaggaacctcacggcctacaggaaggaactcgtgggccacgcgcgcagagtaggcctggtggagtggcaccccacggccgccaacatcctcttcagtgctggctatgactacaaggtgatgatctggaacctggatacaaaggagtctgtcatcacaagccccatgagtacgattagctgtcaccaagatgtgatcctctccatgtccttcaacaccaacggcagcctgttggccaccacctgcaaagaccgcaagattcgggttattgacccccgagcagggaccgtcctccaggaggccagctacaaagggcaccgggccagcaaagtgctgtttctggggaacctgaagaagctgatgtccacaggcacatcccgatggaacaaccggcaggtggccttgtgggaccaggataacctctctgtgcctctgatggaggaggacctggacggctcctcgggcgtgctgtttcccttctatgacgcggacaccagcatgctctacgtggtggggaagggagatggcaacatccgctactacgaggtgagcgccgacaagcctcacctgagctacctgactgagtaccgctcctataacccacagaaggggatcggtgtcatgccaaagagaggactcgacgtgtcctcctgcgagatcttccgcttctacaagctgatcacaaccaaaagcctcatcgagcccatctccatgattgtgccccggcggtcagaatcctaccaagaggacatataccctccaacagcaggggcccagccctccctgacggcccaggagtggctcagcgggatgaatcgagacccaatcctggtgtcccttaggcctggctctgagctgctgagaccccacccactgcctgcagagagacctatcttcaattccatggccccagcctcaccccggctcttgaatcagacagaaaagctggctgcagaagatggctggaggtcttcctccctgttggaggagaagatgccaaggtgggcagcagaacacaggctggaggagaagaaaacctggctgacaaatggctttgacgttttcgaatgccccccaccaaagacagagaatgagttgctgcagatgttctaccggcaacaggaggagatccgaaggctccgggagctgttgacccagcgagaggtccaggccaaacagttggaactggagatcaaaaacttgcggatgggctcagagcagctctgagcagagacctctgccctcctcaccctcagggacaccactcggctccatggggaggtttagaaccaaaccacaagtcccctcaaggacaaccactatttctatattttttaccagaaaacaaaactctccatcgctgaaagagattccagtgggacatggtgccgtttttctgtttgccttcttgcaacaacagtttctgaattgactttgttttcagatgatgccttctgttgaattctgttattaagggcccatgatgagctgtaacttctcaagaggaaagaacacagtagaaaactagagctggaaggatctaggttgacctgtctgtgattttcaaactgtggtccagagaataggggaagactgggccagacgcagtggctcatgcctgtaatcccagcactctgggaggctgaggtgggcggattgcttgaggtcgggagtttgaaaccagtctcaccaggcgcagtggctcacgcctgtaattccagcatgttgggaggccgaggctggtggatcacgaggtcagcagttcgagaccagcctgaccaacatggtgaaaccccatctctactaaaaatccc

SEQ ID NO: 452820 - DNA, 2159 bp, Homo sapiens
ggcggctctgggcgccgggagtcggcgggcggcgaggagcgcggagccggagctggacgccgccgccgccaccgccacctgcgcggcagtcatcaagatgtcatggcacccccagtaccggagctccaagttccgtcatgtctttggcaaaccagccagcaaggagaactgctacgactccgtgcctatcacccgcagcgttcacgacaaccacttctgtgccgtgaacccccacttcattgcagttgtgactgagtgtgctggtggaggggccttcctcgtcatccccctgcaccagacagggaagttggacccccactacccaaaagtctgcgggcacagaggcaacgttttggatgtcaagtggaacccttttgatgattttgagatcgcctcctgttctgaagatgccacaattaagatctggagcatccccaagcagctgctgaccaggaacctcacggcctacaggaaggaactcgtgggccacgcgcgcagagtaggcctggtggagtggcaccccacggccgccaacatcctcttcagtgctggctatgactacaaggtgatgatctggaacctggatacaaaggagtctgtcatcacaagccccatgagtacgattagctgtcaccaagatgtgatcctctccatgtccttcaacaccaacggcagcctgttggccaccacctgcaaagaccgcaagattcgggttattgacccccgagcagggaccgtcctccaggaggccagctacaaagggcaccgggccagcaaagtgctgtttctggggaacctgaagaagctgatgtccacaggcacatcccgatggaacaaccggcaggtggccttgtgggaccaggataacctctctgtgcctctgatggaggaggacctggacggctcctcgggcgtgctgtttcccttctatgacgcggacaccagcatgctctacgtggtggggaagggagatggcaacatccgctactacgaggtgagcgccgacaagcctcacctgagctacctgactgagtaccgctcctataacccacagaaggggatcggtgtcatgccaaagagaggactcgacgtgtcctcctgcgagatcttccgcttctacaagctgatcacaaccaaaagcctcatcgagcccatctccatgattgtgccccggcggtcagaatcctaccaagaggacatataccctccaacagcaggggcccagccctccctgacggcccaggagtggctcagcgggatgaatcgagacccaatcctggtgtcccttaggcctggctctgagctgctgagaccccacccactgcctgcagagagacctatcttcaattccatggccccagcctcaccccggctcttgaatcagacagaaaagctggctgcagaagatggctggaggtcttcctccctgttggaggagaagatgccaaggtgggcagcagaacacaggctggaggagaagaaaacctggctgacaaatggctttgacgttttcgaatgccccccaccaaagacagagaatgagttgctgcagatgttctaccggcaacaggaggagatccgaaggctccgggagctgttgacccagcgagaggtccaggccaaacagttggaactggagatcaaaaacttgcggatgggctcagagcagctctgagcagagacctctgccctcctcaccctcagggacaccactcggctccatggggaggtttagaaccaaaccacaagtcccctcaaggacaaccactatttctatattttttaccagaaaacaaaactctccatcgctgaaagagattccagtgggacatggtgccgtttttctgtttgccttcttgcaacaacagtttctgaattgactttgttttcagatgatgccttctgttgaattctgttattaagggcccatgatgagctgtaacttctcaagaggaaagaacacagtagaaaactagagctggaaggatctaggttgacctgtctgtgattttcaaactgtggtccagagaataggggaagactgggccagacgcagtggctcatgcctgtaatcccagcactctgggaggctgaggtgggcggattgcttgaggtcgggagtttgaaacccctgggtgacagagcgagactccatctcc

SEQ ID NO: 452821 - DNA, 979 bp, Homo sapiens
  misc_feature (135)..(135): n is a, c, g, or t
ggtgaccacgaatgacgtgcggagggagcatgtctacgactgacgagtaggacggccggccgtccaaccccgagtcttctgtggagatcgacactatagacatcgccctcgcgcctgccaggacatcactcgagncctcgtgcgcgctgccgtgtgcgccgtctcccttggtaagggcacgcgtacgaagagcactgacacacacgcggtgggcgtcacgccaagtagagcaacacgcgacgtgtggatggcaccacaagagaagagactcgagcgtagagagagatggacgttctgactggtaatttgcgcacaatgcgccgcgcaccgaggagcaccacgtagagatgcagttcgcgtgtccgtatgtctcgtaagcgcgtaacggggcaggagatccgaaggctccgggagctgttgacccagcgagaggtccaggccaaacagttggaactggagatcaaaaacttgcggatgggctcagagcagctctgagcagagacctctgccctcctcaccctcagggacaccactcggctccatggggaggtttagaaccaaaccacaagtcccctcaaggacaaccactatttctatattttttaccagaaaacaaaactctccatcgctgaaagagattccagtgggacatggtgccgtttttctgtttgccttcttgcaacaacagtttctgaattgactttgttttcagatgatgccttctgttgaattctgttattaagggcccatgatgagctgtaacttctcaagaggaaagaacacagtagaaaactagagctggaaggatctaggttgacctgtctgtgattttcaaactgtggtccagagaataggggaagactgggccagacgcagtggctcatgcctgtaatcccagcactctgggaggctgaggtgggcggattgcttgaggtcgggagtttgaaacccctgggtgacagagcgagactccatctcc

SEQ ID NO: 452822 - DNA, 1306 bp, Homo sapiens
tagggcgacactagagaatatcgccgactgactacggacgaagaaggagagccatgactagagagctaagccacacacggataatcagttactagggatggaggtgtgagggttcattatattattcattttactgttgtatatgtttgaaaatgtctataataaaaagctttaaaaaaaaaaagaaacaaaaatagttcaggccagcaatgggccctccatgttcagtggattttatccttgtttcaattggggtaggagttccaggaggtgtggattggaggttgtctaaagaattgaactggcctttgtccctgcttcctgggagggagactttcagtccttgacatttccagggtaataggagtgtctttgttatttgtgaggccatgggatcacacctgagcttatgctaaaaggtgggatgactcagagctggggctggtcaccagacagactgaccatgtgattagaggtttgaggctttgagtcagcctgacctatggggcgggggactggaggctgagtttaatcatctggccagtgctttaatcagtacatcatgaaaccctaataaaaactctggacactaaagctcagcatagcttcctgggtggtgaagctgtggctatgccggcagggcagtgtgccctaattccacgaagagggggcatgggagcactgtgctcaagacccttccagacctttccctgtgtcttccttggcttgtggagctgatttgtatcctttataataaaactaatcataagtatagtcctgagttctgtgatttttagtgaatcattgaacctgaggaagatcatggtaccctcctgggattgtaggcagttggtcacaagcgctgatggcctgggatccccacatggggctggtgtctgaggtgagggcagccctgttggggactatgtcccttcgctggtggcatctgatctaactctgctggtcgttgttagaattgtggtgcggtacaccaggtggtgtcagaacagaggcggtgggatctgcacaccttgagtaagcccttctcgaccagcctgttggaacaaaacacactactcttcatgggagcctcccgagtttcttctcacctgtgtgaagtcccctttgtttactgtcctgagttttgttctcgctcatctccaacccctcttgtagttttttcttcctcactgtcactgtaaccataaaaatactcagtatgtcagtgatagacttgtctttctattcagagatgactcttcaactgtccggggacacttttttccaataaaaagttcaggatggt

SEQ ID NO: 452823 - DNA, 429 bp, Homo sapiens
caccgacccatggcaaagctggctgtagggtcagtgagaggagccgcacacgctgagcccttcttctctgacacaggtgaccctggagagcatgacccagcgtccacacacaaatccacacgccctgtgaagaaggtctccagtaagtagccccacccctgtctccatggcaacagcatggctgtggcctccccaggctctggccaagtcacttccggcccatcccgagtcactgtggggcctggacctcagtgggaaagaagttggtggcagtccccaccgcggggggctgtagggctgtggcagaagctcccctgtccatcagcattgcacgtttgggctgcctggaacagcaagatgcctgaggctggcttgttttgagaaatatttactatacccaagtccttgggcagagccttgggcaaggag

SEQ ID NO: 452824 - DNA, 6223 bp, Homo sapiens
gctaggtttcgtttcctcggcggcctcggagcgcgggtgcagcagttgtgtcccgacccctgggagcgccatggcagagctgtgccccctggccgaggagctgtcgtgctccatctgcctggagcccttcaaggagccggtcaccactccgtgcggccacaacttctgcgggtcgtgcctgaatgagacgtgggcagtccagggctcgccatacctgtgcccgcagtgccgcgccgtctaccaggcgcgaccgcagctgcacaagaacacggtgctgtgcaacgtggtggagcagttcctgcaggccgacctggcccgggagccacccgccgacgtctggacgccgcccgcccgcgcctctgcacccagcccgaatgcccaggtggcctgcgaccactgcctgaaggaggccgccgtgaagacgtgcttggtgtgcatggcctccttctgtcaggagcacctgcagccgcacttcgacagccccgccttccaggaccacccgctgcagccgcccgttcgcgacctgttgcgccgcaaatgttcccagcacaatcggctgcgggaatttttctgccccgagcacagcgagtgcatctgccacatctgcctggtggagcataagacctgctctcccgcgtccctgagccaggccagcgccgacctggaggccaccctgaggcacaaactaactgtcatgtacagtcagatcaacggggcgtcgagagcactggatgatgtgagaaacaggcagcaggatgtgcggatgactgcaaacagaaaggtggagcagctacaacaagaatacacggaaatgaaggctctcttggacgcctcagagaccacctcgacaaggaagataaaggaagaggagaagagggtcaacagcaagtttgacaccatttatcagattctcctcaagaagaagagtgagatccagaccttgaaggaggagattgaacagagcctgaccaagagggatgagttcgagtttctggagaaagcatcaaaactgcgaggaatctcaacaaagccagtctacatccccgaggtggaactgaaccacaagctgataaaaggcatccaccagagcaccatagacctcaaaaacgagctgaagcagtgcatcgggcggctccaggagctcacccccagttcaggtgaccctggagagcatgacccagcgtccacacacaaatccacacgccctgtgaagaaggtctccaaagaggaaaagaaatccaagaaacctccccctgtccctgccttacccagcaagcttcccacgtttggagccccggaacagttagtggatttaaaacaagctggcttggaggctgcagccaaagccaccagctcacatccgaactcaacatctctcaaggccaaggtgctggagaccttcctggccaagtccagacctgagctcctggagtattacattaaagtcatcctggactacaacaccgcccacaacaaagtggctctgtcagagtgctatacagtagcttctgtggctgagatgcctcagaactaccggccgcatccccagaggttcacatactgctctcaggtgctgggcctgcactgctacaagaaggggatccactactgggaggtggagctgcagaagaacaacttctgtggggtaggcatctgctacggaagcatgaaccggcagggcccagaaagcaggctcggccgcaacagcgcctcctggtgcgtggagtggttcaacaccaagatctctgcctggcacaataacgtggagaaaaccctgccctccaccaaggccacgcgggtgggcgtgcttctcaactgtgaccacggctttgtcatcttcttcgctgttgccgacaaggtccacctgatgtataagttcagggtggactttactgaggctttgtacccggctttctgggtattttctgctggtgccacactctccatctgctcccccaagtaggcaggctgtaggcacttgggctgactgcctgcagaagtcccaagaccctagtgaaaatacagcaggcagaactctccttggataattcccccaagaggtccccaaggattgggagcatgggaggggagctggcgggagggtgggaggtgggatttagccaggaaaggggtgagagtgattgtgttgtgggcgaggaggcgtttccaccccctggtgcctatcagggcagggtgacctactccccattgttctggaaatctccaggctgctgggcagctgggcagagctctgggaagtgaagtcatgagtgcccgattcctcttagagaaaatccataccttcagatcttggtgttttgaattcttactatagatgtttttaaagttccaaagtcattgagtttcaatgttacataaactccattacccgcatgttggggcttgatctcctggttattatctgtgcttgaggaaacacccacagcagtctctacccagaacagtttcctaaagaggcataccctcttcctccactggaaaatagtgcgttcccttcctaccctgcacacccatcgcccccacattgatggttttcaaacagcaaacttttcagctaaagcttcaaaccatgattggaatcagcctgtgttggatttgtgattcagggtcatggtgaccctgatccagtttgggtggaaatccttcctaagtatcataagaagcatcttggcagagatgctttggtggcagccatgagctttgctggaggccttgcttcccatagccttggctgtggggcaaggaactctgccaggcgagggggatgctgccctggatcaacagaagcctggtgggtttgctcgtgttagagtgtcctgccttcttactgacaactcttctcggtgatagcctctcttccctggattgtgacatatggaatgacagtgcaggtaccaccgaggctagcacagtcaagcctccagctaagctggatccctgaagcctgctatcatgcagacaggctatgcggctgcctcggaccatgctaggccacttgctggggtgtcaacctaccaccaaaggggtcttttagcaaacctcatggggaacaggaacattcctgttcatccctggccacaggctgcagacccagcactggcccttgcgtgagtcagagcctggggctggccctagccccttctactgacttcctcatttaagccaattatataagctcacattgatcagggagggagggaaagagctaaagagggtcacacaagtggctattttccctgcagtgtttctgtgtggtgaaaataacccagtccactaaggggcgggagtgaatggatggctggattttccccaagctccttatagcctaatgttgtcaggatgtgagtatgaggaatttagcctcttatagtgaaatgagtccaactctgggctttgcttagaggagagctcccgtcaggcttcctataatatgaaaagaagtcaccattggggaactagagaccccagaccttttcatatggatatttgagaatgtaatgcatctcaggcctcgtgctggaactctagggcactctgggcaggctcagaacacttgatattcctgacagctacacacctgacatgcaggtacatacctgatcggtgtcatctcctaacaaggattttcagttcctcgggagagcaataatctttgtaggaaagacatccctgcaataggtgatatgtggtccttagaagttttattcctttactacttggaagaaaagttctttggtgattcttctctgcttttgaagatgatcaaaagcatcttcattgattttctgaaacgaaagccttgtctgaaaccaattaatacttgggaaacagctgggcttggaggagtagaatgccagagataaatccatggctcctgctctggctctcttctgcagaaatgagggcaacagtgaggccacttccctggcaaatgtgcagctcaggatagggaagcataagaccctctgtttaaaagagagtcaagtaggtaaccaaagccaagctctgtgcaaggtgctttggagttgtaaattgaggagtgcatccttgctgtcttgaaccattctgtttgcaatggtgagaccttacataacctagccttgcagggccgccacacaaccctggagtcctagagttggaggaacctttgtatccatctgacttctcattttgcagaatatgatgagaaagtagaggatcgctctgttcaccactcttgctattccattagtggggagatgcctgctagcatgtgtgaggggaacactctgatacactgggaagtatcggaaattcccagaaacacaaacataaaataactctcctagacccaggtactggggactgtctcagtccgtgtggcatgataaataaaaggttaggatcaagtctttgtatttttcaagatgtggtagctgattattcctgttttaagtactctgaaattgatctgtgatcaataatactaatatgttatcttttaccgtattctgcctctcactattgattttaattagttaggagtatttgagctgttatttcttgagcttaatatttttttagagttaactctttaaggagataatcatggctgtagacaaggccagggctggctgacgtgccttagaaggtttgaatgcaataaagcggtgtttggcgttctcctgcattgtagtgcgggtacaaaatgctatttgttcgtcatactgttgtcagcagatgagccgcccactacagacggctactgcccagggacctgcccaggccccacccaagggctcccaagggttgagatttctgcagacctatagccagcacacttagtcctgccctatatagagttcctcttcgggaagcttttgataaggaattctcagaccgataggatgtctgtctgggctttgctgcgggacagtctaactgtgggggctaggggaaagcaggagagtatcgatcaaagagtaagccacacacggataatcagttactagggatggaggtgtgagggttcattatattattcattttactgttgtatatgtttgaaaatgtctataataaaaagctttaaaaaaaaaaagaaacaaaaatagttcaggccagcaatgggccctccatgttcagtggattttatccttgtttcaattggggtaggagttccaggaggtgtggattggaggttgtctaaagaattgaactggcctttgtccctgcttcctgggagggagactttcagtccttgacatttccagggtaataggagtgtctttgttatttgtgaggccatgggatcacacctgagcttatgctaaaaggtgggatgactcagagctggggctggtcaccagacagactgaccatgtgattagaggtttgaggctttgagtcagcctgacctatggggcgggggactggaggctgagtttaatcatctggccagtgctttaatcagtacatcatgaaaccctaataaaaactctggacactaaagctcagcatagcttcctgggtggtgaagctgtggctatgccggcagggcagtgtgccctaattccacgaagagggggcatgggagcactgtgctcaagacccttccagacctttccctgtgtcttccttggcttgtggagctgatttgtatcctttataataaaactaatcataagtatagtcctgagttctgtgatttttagtgaatcattgaacctgaggaagatcatggtaccctcctgggattgtaggcagttggtcacaagcgctgatggcctgggatccccacatggggctggtgtctgaggtgagggcagccctgttggggactatgtcccttcgctggtggcatctgatctaactctgctggtcgttgttagaattgtggtgcggtacaccaggtggtgtcagaacagaggcggtgggatctgcacaccttgagtaagcccttctcgaccagcctgttggaacaaaacacactactcttcatgggagcctcccgagtttcttctcacctgtgtgaagtcccctttgtttactgtcctgagttttgttctcgctcatctccaacccctcttgtagttttttcttcctcactgtcactgtaaccataaaaatactcagtatgtcagtgatagacttgtctttctattcagagatgactcttcaactgtccggggacacttttttccaataaaaagttcaggatggt

SEQ ID NO: 452825 - DNA, 6287 bp, Homo sapiens
gctaggtttcgtttcctcggcggcctcggagcgcgggtgcagcagttgtgtcccgacccctgggagcgccatggcagagctgtgccccctggccgaggagctgtcgtgctccatctgcctggagcccttcaaggagccggtcaccactccgtgcggccacaacttctgcgggtcgtgcctgaatgagacgtgggcagtccagggctcgccatacctgtgcccgcagtgccgcgccgtctaccaggcgcgaccgcagctgcacaagaacacggtgctgtgcaacgtggtggagcagttcctgcaggccgacctggcccgggagccacccgccgacgtctggacgccgcccgcccgcgcctctgcacccagcccgaatgcccaggtggcctgcgaccactgcctgaaggaggccgccgtgaagacgtgcttggtgtgcatggcctccttctgtcaggagcacctgcagccgcacttcgacagccccgccttccaggaccacccgctgcagccgcccgttcgcgacctgttgcgccgcaaatgttcccagcacaatcggctgcgggaatttttctgccccgagcacagcgagtgcatctgccacatctgcctggtggagcataagacctgctctcccgcgtccctgagccaggccagcgccgacctggaggccaccctgaggcacaaactaactgtcatgtacagtcagatcaacggggcgtcgagagcactggatgatgtgagaaacaggcagcaggatgtgcggatgactgcaaacagaaaggtggagcagctacaacaagaatacacggaaatgaaggctctcttggacgcctcagagaccacctcgacaaggaagataaaggaagaggagaagagggtcaacagcaagtttgacaccatttatcagattctcctcaagaagaagagtgagatccagaccttgaaggaggagattgaacagagcctgaccaagagggatgagttcgagtttctggagaaagcatcaaaactgcgaggaatctcaacaaagccagtctacatccccgaggtggaactgaaccacaagctgataaaaggcatccaccagagcaccatagacctcaaaaacgagctgaagcagtgcatcgggcggctccaggagctcacccccagttcaggtgaccctggagagcatgacccagcgtccacacacaaatccacacgccctgtgaagaaggtctccaaagaggaaaagaaatccaagaaacctccccctgtccctgccttacccagcaagcttcccacgtttggagccccggaacagttagtggatttaaaacaagctggcttggaggctgcagccaaagccaccagctcacatccgaactcaacatctctcaaggccaaggtgctggagaccttcctggccaagtccagacctgagctcctggagtattacattaaagtcatcctggactacaacaccgcccacaacaaagtggctctgtcagagtgctatacagtagcttctgtggctgagatgcctcagaactaccggccgcatccccagaggttcacatactgctctcaggtgctgggcctgcactgctacaagaaggggatccactactgggaggtggagctgcagaagaacaacttctgtggggtaggcatctgctacggaagcatgaaccggcagggcccagaaagcaggctcggccgcaacagcgcctcctggtgcgtggagtggttcaacaccaagatctctgcctggcacaataacgtggagaaaaccctgccctccaccaaggccacgcgggtgggcgtgcttctcaactgtgaccacggctttgtcatcttcttcgctgttgccgacaaggtccacctgatgtataagttcagggtggactttactgaggctttgtacccggctttctgggtattttctgctggtgccacactctccatctgctcccccaagtaggcaggctgtaggcacttgggctgactgcctgcagaagtcccaagaccctagtgaaaatacagcaggcagaactctccttggataattcccccaagaggtccccaaggattgggagcatgggaggggagctggcgggagggtgggaggtgggatttagccaggaaaggggtgagagtgattgtgttgtgggcgaggaggcgtttccaccccctggtgcctatcagggcagggtgacctactccccattgttctggaaatctccaggctgctgggcagctgggcagagctctgggaagtgaagtcatgagtgcccgattcctcttagagaaaatccatagctactgtaggttctgtcttgggccacttggatctgaaggctgcccctttgctctctggggtagccttcagatcttggtgttttgaattcttactatagatgtttttaaagttccaaagtcattgagtttcaatgttacataaactccattacccgcatgttggggcttgatctcctggttattatctgtgcttgaggaaacacccacagcagtctctacccagaacagtttcctaaagaggcataccctcttcctccactggaaaatagtgcgttcccttcctaccctgcacacccatcgcccccacattgatggttttcaaacagcaaacttttcagctaaagcttcaaaccatgattggaatcagcctgtgttggatttgtgattcagggtcatggtgaccctgatccagtttgggtggaaatccttcctaagtatcataagaagcatcttggcagagatgctttggtggcagccatgagctttgctggaggccttgcttcccatagccttggctgtggggcaaggaactctgccaggcgagggggatgctgccctggatcaacagaagcctggtgggtttgctcgtgttagagtgtcctgccttcttactgacaactcttctcggtgatagcctctcttccctggattgtgacatatggaatgacagtgcaggtaccaccgaggctagcacagtcaagcctccagctaagctggatccctgaagcctgctatcatgcagacaggctatgcggctgcctcggaccatgctaggccacttgctggggtgtcaacctaccaccaaaggggtcttttagcaaacctcatggggaacaggaacattcctgttcatccctggccacaggctgcagacccagcactggcccttgcgtgagtcagagcctggggctggccctagccccttctactgacttcctcatttaagccaattatataagctcacattgatcagggagggagggaaagagctaaagagggtcacacaagtggctattttccctgcagtgtttctgtgtggtgaaaataacccagtccactaaggggcgggagtgaatggatggctggattttccccaagctccttatagcctaatgttgtcaggatgtgagtatgaggaatttagcctcttatagtgaaatgagtccaactctgggctttgcttagaggagagctcccgtcaggcttcctataatatgaaaagaagtcaccattggggaactagagaccccagaccttttcatatggatatttgagaatgtaatgcatctcaggcctcgtgctggaactctagggcactctgggcaggctcagaacacttgatattcctgacagctacacacctgacatgcaggtacatacctgatcggtgtcatctcctaacaaggattttcagttcctcgggagagcaataatctttgtaggaaagacatccctgcaataggtgatatgtggtccttagaagttttattcctttactacttggaagaaaagttctttggtgattcttctctgcttttgaagatgatcaaaagcatcttcattgattttctgaaacgaaagccttgtctgaaaccaattaatacttgggaaacagctgggcttggaggagtagaatgccagagataaatccatggctcctgctctggctctcttctgcagaaatgagggcaacagtgaggccacttccctggcaaatgtgcagctcaggatagggaagcataagaccctctgtttaaaagagagtcaagtaggtaaccaaagccaagctctgtgcaaggtgctttggagttgtaaattgaggagtgcatccttgctgtcttgaaccattctgtttgcaatggtgagaccttacataacctagccttgcagggccgccacacaaccctggagtcctagagttggaggaacctttgtatccatctgacttctcattttgcagaatatgatgagaaagtagaggatcgctctgttcaccactcttgctattccattagtggggagatgcctgctagcatgtgtgaggggaacactctgatacactgggaagtatcggaaattcccagaaacacaaacataaaataactctcctagacccaggtactggggactgtctcagtccgtgtggcatgataaataaaaggttaggatcaagtctttgtatttttcaagatgtggtagctgattattcctgttttaagtactctgaaattgatctgtgatcaataatactaatatgttatcttttaccgtattctgcctctcactattgattttaattagttaggagtatttgagctgttatttcttgagcttaatatttttttagagttaactctttaaggagataatcatggctgtagacaaggccagggctggctgacgtgccttagaaggtttgaatgcaataaagcggtgtttggcgttctcctgcattgtagtgcgggtacaaaatgctatttgttcgtcatactgttgtcagcagatgagccgcccactacagacggctactgcccagggacctgcccaggccccacccaagggctcccaagggttgagatttctgcagacctatagccagcacacttagtcctgccctatatagagttcctcttcgggaagcttttgataaggaattctcagaccgataggatgtctgtctgggctttgctgcgggacagtctaactgtgggggctaggggaaagcaggagagtatcgatcaaagagtaagccacacacggataatcagttactagggatggaggtgtgagggttcattatattattcattttactgttgtatatgtttgaaaatgtctataataaaaagctttaaaaaaaaaaagaaacaaaaatagttcaggccagcaatgggccctccatgttcagtggattttatccttgtttcaattggggtaggagttccaggaggtgtggattggaggttgtctaaagaattgaactggcctttgtccctgcttcctgggagggagactttcagtccttgacatttccagggtaataggagtgtctttgttatttgtgaggccatgggatcacacctgagcttatgctaaaaggtgggatgactcagagctggggctggtcaccagacagactgaccatgtgattagaggtttgaggctttgagtcagcctgacctatggggcgggggactggaggctgagtttaatcatctggccagtgctttaatcagtacatcatgaaaccctaataaaaactctggacactaaagctcagcatagcttcctgggtggtgaagctgtggctatgccggcagggcagtgtgccctaattccacgaagagggggcatgggagcactgtgctcaagacccttccagacctttccctgtgtcttccttggcttgtggagctgatttgtatcctttataataaaactaatcataagtatagtcctgagttctgtgatttttagtgaatcattgaacctgaggaagatcatggtaccctcctgggattgtaggcagttggtcacaagcgctgatggcctgggatccccacatggggctggtgtctgaggtgagggcagccctgttggggactatgtcccttcgctggtggcatctgatctaactctgctggtcgttgttagaattgtggtgcggtacaccaggtggtgtcagaacagaggcggtgggatctgcacaccttgagtaagcccttctcgaccagcctgttggaacaaaacacactactcttcatgggagcctcccgagtttcttctcacctgtgtgaagtcccctttgtttactgtcctgagttttgttctcgctcatctccaacccctcttgtagttttttcttcctcactgtcactgtaaccataaaaatactcagtatgtcagtgatagacttgtctttctattcagagatgactcttcaactgtccggggacacttttttccaataaaaagttcaggatggt

SEQ ID NO: 452826 - DNA, 6608 bp, Homo sapiens
gctaggtttcgtttcctcggcggcctcggagcgcgggtgcagcagttgtgtcccgacccctgggagcgccatggcagagctgtgccccctggccgaggagctgtcgtgctccatctgcctggagcccttcaaggagccggtcaccactccgtgcggccacaacttctgcgggtcgtgcctgaatgagacgtgggcagtccagggctcgccatacctgtgcccgcagtgccgcgccgtctaccaggcgcgaccgcagctgcacaagaacacggtgctgtgcaacgtggtggagcagttcctgcaggccgacctggcccgggagccacccgccgacgtctggacgccgcccgcccgcgcctctgcacccagcccgaatgcccaggtggcctgcgaccactgcctgaaggaggccgccgtgaagacgtgcttggtgtgcatggcctccttctgtcaggagcacctgcagccgcacttcgacagccccgccttccaggaccacccgctgcagccgcccgttcgcgacctgttgcgccgcaaatgttcccagcacaatcggctgcgggaatttttctgccccgagcacagcgagtgcatctgccacatctgcctggtggagcataagacctgctctcccgcgtccctgagccaggccagcgccgacctggaggccaccctgaggcacaaactaactgtcatgtacagtcagatcaacggggcgtcgagagcactggatgatgtgagaaacaggcagcaggatgtgcggatgactgcaaacagaaaggtggagcagctacaacaagaatacacggaaatgaaggctctcttggacgcctcagagaccacctcgacaaggaagataaaggaagaggagaagagggtcaacagcaagtttgacaccatttatcagattctcctcaagaagaagagtgagatccagaccttgaaggaggagattgaacagagcctgaccaagagggatgagttcgagtttctggagaaagcatcaaaactgcgaggaatctcaacaaagccagtctacatccccgaggtggaactgaaccacaagctgataaaaggcatccaccagagcaccatagacctcaaaaacgagctgaagcagtgcatcgggcggctccaggagctcacccccagttcaggtgaccctggagagcatgacccagcgtccacacacaaatccacacgccctgtgaagaaggtctccaaagaggaaaagaaatccaagaaacctcgtaagttatgcatttctgcaactgttcgtttcttgagactgcccgagcacagaactaaatgctggtagtgagagtcgacctctctcatcagggttctgtgatgggttctatatgattccattctgtaatggcagcaggcctgaggctggaggggaggacaagcataagtgagatgaataaggtgactttagccttgtctgttttcccctgtgttgtcctgctgttcaggcgtgtgtttgtagaagtggctcttaatcagtgtggaagggagtagaggccatcccgttgctctgtatcatatttccctttccttacccccagcccctgtccctgccttacccagcaagcttcccacgtttggagccccggaacagttagtggatttaaaacaagctggcttggaggctgcagccaaagccaccagctcacatccgaactcaacatctctcaaggccaaggtgctggagaccttcctggccaagtccagacctgagctcctggagtattacattaaagtcatcctggactacaacaccgcccacaacaaagtggctctgtcagagtgctatacagtagcttctgtggctgagatgcctcagaactaccggccgcatccccagaggttcacatactgctctcaggtgctgggcctgcactgctacaagaaggggatccactactgggaggtggagctgcagaagaacaacttctgtggggtaggcatctgctacggaagcatgaaccggcagggcccagaaagcaggctcggccgcaacagcgcctcctggtgcgtggagtggttcaacaccaagatctctgcctggcacaataacgtggagaaaaccctgccctccaccaaggccacgcgggtgggcgtgcttctcaactgtgaccacggctttgtcatcttcttcgctgttgccgacaaggtccacctgatgtataagttcagggtggactttactgaggctttgtacccggctttctgggtattttctgctggtgccacactctccatctgctcccccaagtaggcaggctgtaggcacttgggctgactgcctgcagaagtcccaagaccctagtgaaaatacagcaggcagaactctccttggataattcccccaagaggtccccaaggattgggagcatgggaggggagctggcgggagggtgggaggtgggatttagccaggaaaggggtgagagtgattgtgttgtgggcgaggaggcgtttccaccccctggtgcctatcagggcagggtgacctactccccattgttctggaaatctccaggctgctgggcagctgggcagagctctgggaagtgaagtcatgagtgcccgattcctcttagagaaaatccatagctactgtaggttctgtcttgggccacttggatctgaaggctgcccctttgctctctggggtagccttcagatcttggtgttttgaattcttactatagatgtttttaaagttccaaagtcattgagtttcaatgttacataaactccattacccgcatgttggggcttgatctcctggttattatctgtgcttgaggaaacacccacagcagtctctacccagaacagtttcctaaagaggcataccctcttcctccactggaaaatagtgcgttcccttcctaccctgcacacccatcgcccccacattgatggttttcaaacagcaaacttttcagctaaagcttcaaaccatgattggaatcagcctgtgttggatttgtgattcagggtcatggtgaccctgatccagtttgggtggaaatccttcctaagtatcataagaagcatcttggcagagatgctttggtggcagccatgagctttgctggaggccttgcttcccatagccttggctgtggggcaaggaactctgccaggcgagggggatgctgccctggatcaacagaagcctggtgggtttgctcgtgttagagtgtcctgccttcttactgacaactcttctcggtgatagcctctcttccctggattgtgacatatggaatgacagtgcaggtaccaccgaggctagcacagtcaagcctccagctaagctggatccctgaagcctgctatcatgcagacaggctatgcggctgcctcggaccatgctaggccacttgctggggtgtcaacctaccaccaaaggggtcttttagcaaacctcatggggaacaggaacattcctgttcatccctggccacaggctgcagacccagcactggcccttgcgtgagtcagagcctggggctggccctagccccttctactgacttcctcatttaagccaattatataagctcacattgatcagggagggagggaaagagctaaagagggtcacacaagtggctattttccctgcagtgtttctgtgtggtgaaaataacccagtccactaaggggcgggagtgaatggatggctggattttccccaagctccttatagcctaatgttgtcaggatgtgagtatgaggaatttagcctcttatagtgaaatgagtccaactctgggctttgcttagaggagagctcccgtcaggcttcctataatatgaaaagaagtcaccattggggaactagagaccccagaccttttcatatggatatttgagaatgtaatgcatctcaggcctcgtgctggaactctagggcactctgggcaggctcagaacacttgatattcctgacagctacacacctgacatgcaggtacatacctgatcggtgtcatctcctaacaaggattttcagttcctcgggagagcaataatctttgtaggaaagacatccctgcaataggtgatatgtggtccttagaagttttattcctttactacttggaagaaaagttctttggtgattcttctctgcttttgaagatgatcaaaagcatcttcattgattttctgaaacgaaagccttgtctgaaaccaattaatacttgggaaacagctgggcttggaggagtagaatgccagagataaatccatggctcctgctctggctctcttctgcagaaatgagggcaacagtgaggccacttccctggcaaatgtgcagctcaggatagggaagcataagaccctctgtttaaaagagagtcaagtaggtaaccaaagccaagctctgtgcaaggtgctttggagttgtaaattgaggagtgcatccttgctgtcttgaaccattctgtttgcaatggtgagaccttacataacctagccttgcagggccgccacacaaccctggagtcctagagttggaggaacctttgtatccatctgacttctcattttgcagaatatgatgagaaagtagaggatcgctctgttcaccactcttgctattccattagtggggagatgcctgctagcatgtgtgaggggaacactctgatacactgggaagtatcggaaattcccagaaacacaaacataaaataactctcctagacccaggtactggggactgtctcagtccgtgtggcatgataaataaaaggttaggatcaagtctttgtatttttcaagatgtggtagctgattattcctgttttaagtactctgaaattgatctgtgatcaataatactaatatgttatcttttaccgtattctgcctctcactattgattttaattagttaggagtatttgagctgttatttcttgagcttaatatttttttagagttaactctttaaggagataatcatggctgtagacaaggccagggctggctgacgtgccttagaaggtttgaatgcaataaagcggtgtttggcgttctcctgcattgtagtgcgggtacaaaatgctatttgttcgtcatactgttgtcagcagatgagccgcccactacagacggctactgcccagggacctgcccaggccccacccaagggctcccaagggttgagatttctgcagacctatagccagcacacttagtcctgccctatatagagttcctcttcgggaagcttttgataaggaattctcagaccgataggatgtctgtctgggctttgctgcgggacagtctaactgtgggggctaggggaaagcaggagagtatcgatcaaagagtaagccacacacggataatcagttactagggatggaggtgtgagggttcattatattattcattttactgttgtatatgtttgaaaatgtctataataaaaagctttaaaaaaaaaaagaaacaaaaatagttcaggccagcaatgggccctccatgttcagtggattttatccttgtttcaattggggtaggagttccaggaggtgtggattggaggttgtctaaagaattgaactggcctttgtccctgcttcctgggagggagactttcagtccttgacatttccagggtaataggagtgtctttgttatttgtgaggccatgggatcacacctgagcttatgctaaaaggtgggatgactcagagctggggctggtcaccagacagactgaccatgtgattagaggtttgaggctttgagtcagcctgacctatggggcgggggactggaggctgagtttaatcatctggccagtgctttaatcagtacatcatgaaaccctaataaaaactctggacactaaagctcagcatagcttcctgggtggtgaagctgtggctatgccggcagggcagtgtgccctaattccacgaagagggggcatgggagcactgtgctcaagacccttccagacctttccctgtgtcttccttggcttgtggagctgatttgtatcctttataataaaactaatcataagtatagtcctgagttctgtgatttttagtgaatcattgaacctgaggaagatcatggtaccctcctgggattgtaggcagttggtcacaagcgctgatggcctgggatccccacatggggctggtgtctgaggtgagggcagccctgttggggactatgtcccttcgctggtggcatctgatctaactctgctggtcgttgttagaattgtggtgcggtacaccaggtggtgtcagaacagaggcggtgggatctgcacaccttgagtaagcccttctcgaccagcctgttggaacaaaacacactactcttcatgggagcctcccgagtttcttctcacctgtgtgaagtcccctttgtttactgtcctgagttttgttctcgctcatctccaacccctcttgtagttttttcttcctcactgtcactgtaaccataaaaatactcagtatgtcagtgatagacttgtctttctattcagagatgactcttcaactgtccggggacacttttttccaataaaaagttcaggatggt

SEQ ID NO: 452827 - DNA, 5979 bp, Homo sapiens
cccaagctggagtgcagtggcggaatcacagctcactgcagcctcgacttcccgggcttaagggatcctcctacctcagcctcaagagtagctgggaccacagcctcccaagtagctgggaccacaggctcgctaattttttgtagagatgaggtttcgccatgttgcccaggctggtctcgaattcctgagctcaagcgatctgcccacctcgacctcctaaagtgctaggaggtctttaaaggcgtgcaccactgcgccccaccatctgatggtgtttagtagagggttttgaatgtcaactatgaacgttggaggttacctctgttccctcacgaagtcctggtggcacccaggaggccaccctgaggcacaaactaactgtcatgtacagtcagatcaacggggcgtcgagagcactggatgatgtgagaaacaggcagcaggatgtgcggatgactgcaaacagaaaggtggagcagctacaacaagaatacacggaaatgaaggctctcttggacgcctcagagaccacctcgacaaggaagataaaggaagaggagaagagggtcaacagcaagtttgacaccatttatcagattctcctcaagaagaagagtgagatccagaccttgaaggaggagattgaacagagcctgaccaagagggatgagttcgagtttctggagaaagcatcaaaactgcgaggaatctcaacaaagccagtctacatccccgaggtggaactgaaccacaagctgataaaaggcatccaccagagcaccatagacctcaaaaacgagctgaagcagtgcatcgggcggctccaggagctcacccccagttcaggtgaccctggagagcatgacccagcgtccacacacaaatccacacgccctgtgaagaaggtctccaaagaggaaaagaaatccaagaaacctccccctgtccctgccttacccagcaagcttcccacgtttggagccccggaacagttagtggatttaaaacaagctggcttggaggctgcagccaaagccaccagctcacatccgaactcaacatctctcaaggccaaggtgctggagaccttcctggccaagtccagacctgagctcctggagtattacattaaagtcatcctggactacaacaccgcccacaacaaagtggctctgtcagagtgctatacagtagcttctgtggctgagatgcctcagaactaccggccgcatccccagaggttcacatactgctctcaggtgctgggcctgcactgctacaagaaggggatccactactgggaggtggagctgcagaagaacaacttctgtggggtaggcatctgctacggaagcatgaaccggcagggcccagaaagcaggctcggccgcaacagcgcctcctggtgcgtggagtggttcaacaccaagatctctgcctggcacaataacgtggagaaaaccctgccctccaccaaggccacgcgggtgggcgtgcttctcaactgtgaccacggctttgtcatcttcttcgctgttgccgacaaggtccacctgatgtataagttcagggtggactttactgaggctttgtacccggctttctgggtattttctgctggtgccacactctccatctgctcccccaagtaggcaggctgtaggcacttgggctgactgcctgcagaagtcccaagaccctagtgaaaatacagcaggcagaactctccttggataattcccccaagaggtccccaaggattgggagcatgggaggggagctggcgggagggtgggaggtgggatttagccaggaaaggggtgagagtgattgtgttgtgggcgaggaggcgtttccaccccctggtgcctatcagggcagggtgacctactccccattgttctggaaatctccaggctgctgggcagctgggcagagctctgggaagtgaagtcatgagtgcccgattcctcttagagaaaatccatagctactgtaggttctgtcttgggccacttggatctgaaggctgcccctttgctctctggggtagccttcagatcttggtgttttgaattcttactatagatgtttttaaagttccaaagtcattgagtttcaatgttacataaactccattacccgcatgttggggcttgatctcctggttattatctgtgcttgaggaaacacccacagcagtctctacccagaacagtttcctaaagaggcataccctcttcctccactggaaaatagtgcgttcccttcctaccctgcacacccatcgcccccacattgatggttttcaaacagcaaacttttcagctaaagcttcaaaccatgattggaatcagcctgtgttggatttgtgattcagggtcatggtgaccctgatccagtttgggtggaaatccttcctaagtatcataagaagcatcttggcagagatgctttggtggcagccatgagctttgctggaggccttgcttcccatagccttggctgtggggcaaggaactctgccaggcgagggggatgctgccctggatcaacagaagcctggtgggtttgctcgtgttagagtgtcctgccttcttactgacaactcttctcggtgatagcctctcttccctggattgtgacatatggaatgacagtgcaggtaccaccgaggctagcacagtcaagcctccagctaagctggatccctgaagcctgctatcatgcagacaggctatgcggctgcctcggaccatgctaggccacttgctggggtgtcaacctaccaccaaaggggtcttttagcaaacctcatggggaacaggaacattcctgttcatccctggccacaggctgcagacccagcactggcccttgcgtgagtcagagcctggggctggccctagccccttctactgacttcctcatttaagccaattatataagctcacattgatcagggagggagggaaagagctaaagagggtcacacaagtggctattttccctgcagtgtttctgtgtggtgaaaataacccagtccactaaggggcgggagtgaatggatggctggattttccccaagctccttatagcctaatgttgtcaggatgtgagtatgaggaatttagcctcttatagtgaaatgagtccaactctgggctttgcttagaggagagctcccgtcaggcttcctataatatgaaaagaagtcaccattggggaactagagaccccagaccttttcatatggatatttgagaatgtaatgcatctcaggcctcgtgctggaactctagggcactctgggcaggctcagaacacttgatattcctgacagctacacacctgacatgcaggtacatacctgatcggtgtcatctcctaacaaggattttcagttcctcgggagagcaataatctttgtaggaaagacatccctgcaataggtgatatgtggtccttagaagttttattcctttactacttggaagaaaagttctttggtgattcttctctgcttttgaagatgatcaaaagcatcttcattgattttctgaaacgaaagccttgtctgaaaccaattaatacttgggaaacagctgggcttggaggagtagaatgccagagataaatccatggctcctgctctggctctcttctgcagaaatgagggcaacagtgaggccacttccctggcaaatgtgcagctcaggatagggaagcataagaccctctgtttaaaagagagtcaagtaggtaaccaaagccaagctctgtgcaaggtgctttggagttgtaaattgaggagtgcatccttgctgtcttgaaccattctgtttgcaatggtgagaccttacataacctagccttgcagggccgccacacaaccctggagtcctagagttggaggaacctttgtatccatctgacttctcattttgcagaatatgatgagaaagtagaggatcgctctgttcaccactcttgctattccattagtggggagatgcctgctagcatgtgtgaggggaacactctgatacactgggaagtatcggaaattcccagaaacacaaacataaaataactctcctagacccaggtactggggactgtctcagtccgtgtggcatgataaataaaaggttaggatcaagtctttgtatttttcaagatgtggtagctgattattcctgttttaagtactctgaaattgatctgtgatcaataatactaatatgttatcttttaccgtattctgcctctcactattgattttaattagttaggagtatttgagctgttatttcttgagcttaatatttttttagagttaactctttaaggagataatcatggctgtagacaaggccagggctggctgacgtgccttagaaggtttgaatgcaataaagcggtgtttggcgttctcctgcattgtagtgcgggtacaaaatgctatttgttcgtcatactgttgtcagcagatgagccgcccactacagacggctactgcccagggacctgcccaggccccacccaagggctcccaagggttgagatttctgcagacctatagccagcacacttagtcctgccctatatagagttcctcttcgggaagcttttgataaggaattctcagaccgataggatgtctgtctgggctttgctgcgggacagtctaactgtgggggctaggggaaagcaggagagtatcgatcaaagagtaagccacacacggataatcagttactagggatggaggtgtgagggttcattatattattcattttactgttgtatatgtttgaaaatgtctataataaaaagctttaaaaaaaaaaagaaacaaaaatagttcaggccagcaatgggccctccatgttcagtggattttatccttgtttcaattggggtaggagttccaggaggtgtggattggaggttgtctaaagaattgaactggcctttgtccctgcttcctgggagggagactttcagtccttgacatttccagggtaataggagtgtctttgttatttgtgaggccatgggatcacacctgagcttatgctaaaaggtgggatgactcagagctggggctggtcaccagacagactgaccatgtgattagaggtttgaggctttgagtcagcctgacctatggggcgggggactggaggctgagtttaatcatctggccagtgctttaatcagtacatcatgaaaccctaataaaaactctggacactaaagctcagcatagcttcctgggtggtgaagctgtggctatgccggcagggcagtgtgccctaattccacgaagagggggcatgggagcactgtgctcaagacccttccagacctttccctgtgtcttccttggcttgtggagctgatttgtatcctttataataaaactaatcataagtatagtcctgagttctgtgatttttagtgaatcattgaacctgaggaagatcatggtaccctcctgggattgtaggcagttggtcacaagcgctgatggcctgggatccccacatggggctggtgtctgaggtgagggcagccctgttggggactatgtcccttcgctggtggcatctgatctaactctgctggtcgttgttagaattgtggtgcggtacaccaggtggtgtcagaacagaggcggtgggatctgcacaccttgagtaagcccttctcgaccagcctgttggaacaaaacacactactcttcatgggagcctcccgagtttcttctcacctgtgtgaagtcccctttgtttactgtcctgagttttgttctcgctcatctccaacccctcttgtagttttttcttcctcactgtcactgtaaccataaaaatactcagtatgtcagtgatagacttgtctttctattcagagatgactcttcaactgtccggggacacttttttccaataaaaagttcaggatggt

SEQ ID NO: 452828 - DNA, 1827 bp, Homo sapiens
gctaggtttcgtttcctcggcggcctcggagcgcgggtgcagcagttgtgtcccgacccctgggagcgccatggcagagctgtgccccctggccgaggagctgtcgtgctccatctgcctggagcccttcaaggagccggtcaccactccgtgcggccacaacttctgcgggtcgtgcctgaatgagacgtgggcagtccagggctcgccatacctgtgcccgcagtgccgcgccgtctaccaggcgcgaccgcagctgcacaagaacacggtgctgtgcaacgtggtggagcagttcctgcaggccgacctggcccgggagccacccgccgacgtctggacgccgcccgcccgcgcctctgcacccagcccgaatgcccaggtggcctgcgaccactgcctgaaggaggccgccgtgaagacgtgcttggtgtgcatggcctccttctgtcaggagcacctgcagccgcacttcgacagccccgccttccaggaccacccgctgcagccgcccgttcgcgacctgttgcgccgcaaatgttcccagcacaatcggctgcgggaatttttctgccccgagcacagcgagtgcatctgccacatctgcctggtggagcataagacctgctctcccgcgtccctgagccaggccagcgccgacctggaggccaccctgaggcacaaactaactgtcatgtacagtcagatcaacggggcgtcgagagcactggatgatgtgagaaacaggcagcaggatgtgcggatgactgcaaacagaaaggtggagcagctacaacaagaatacacggaaatgaaggctctcttggacgcctcagagaccacctcgacaaggaagataaaggaagaggagaagagggtcaacagcaagtttgacaccatttatcagattctcctcaagaagaagagtgagatccagaccttgaaggaggagattgaacagagcctgaccaagagggatgagttcgagtttctggagaaagcatcaaaactgcgaggaatctcaacaaagccagtctacatccccgaggtggaactgaaccacaagctgataaaaggcatccaccagagcaccatagacctcaaaaacgagctgaagcagtgcatcgggcggctccaggagctcacccccagttcaggtgaccctggagagcatgacccagcgtccacacacaaatccacacgccctgtgaagaaggtctccaaagaggaaaagaaatccaagaaacctccccctgtccctgccttacccagcaagcttcccacgtttggagccccggaacagttagtggatttaaaacaagctggcttggaggctgcagccaaagccaccagctcacatccgaactcaacatctctcaaggccaaggtgctggagaccttcctggccaagtccagacctgagctcctggagtgtgagtagcttcggggctggtgcgcggttccactggttctgtctctcctgcgccgctctgtgcagctctctgtggggccagctggccggctatatcagccactccccttcacttgtcctctactttgttgctcccttattttctcccagtcatcagtgcctttctttacttttcctaactagctcagatttcacaatcggtcctttgactctccctcttgccgtctagtctggcccaattgagctcacctttctctgtgggtcggcgcctgcatgtcctctgcagagaaggcagggcgattgcggtcaccggccttcaccgggcgtcccgttgccggcatgcctgccctgcatctcctgtctcctccccacagagagagcgtcgggtaccgagc

SEQ ID NO: 452829 - DNA, 1894 bp, Homo sapiens
gctaggtttcgtttcctcggcggcctcggagcgcgggtgcagcagttgtgtcccgacccctgggagcgccatggcagagctgtgccccctggccgaggagctgtcgtgctccatctgcctggagcccttcaaggagccggtcaccactccgtgcggccacaacttctgcgggtcgtgcctgaatgagacgtgggcagtccagggctcgccatacctgtgcccgcagtgccgcgccgtctaccaggcgcgaccgcagctgcacaagaacacggtgctgtgcaacgtggtggagcagttcctgcaggccgacctggcccgggagccacccgccgacgtctggacgccgcccgcccgcgcctctgcacccagcccgaatgcccaggtggcctgcgaccactgcctgaaggaggccgccgtgaagacgtgcttggtgtgcatggcctccttctgtcaggagcacctgcagccgcacttcgacagccccgccttccaggaccacccgctgcagccgcccgttcgcgacctgttgcgccgcaaatgttcccagcacaatcggctgcgggaatttttctgccccgagcacagcgagtgcatctgccacatctgcctggtggagcataagacctgctctcccgcgtccctgagccaggccagcgccgacctggaggccaccctgaggcacaaactaactgtcatgtacagtcagatcaacggggcgtcgagagcactggatgatgtgagaaacaggcagcaggatgtgcggatgactgcaaacagaaaggtggagcagctacaacaagaatacacggaaatgaaggctctcttggacgcctcagagaccacctcgacaaggaagataaaggaagaggagaagagggtcaacagcaagtttgacaccatttatcagattctcctcaagaagaagagtgagatccagaccttgaaggaggagattgaacagagcctgaccaagagggatgagttcgagtttctggagaaagcatcaaaactgcgaggaatctcaacaaagccagtctacatccccgaggtggaactgaaccacaagctgataaaaggcatccaccagagcaccatagacctcaaaaacgagctgaagcagtgcatcgggcggctccaggagctcacccccagttcaggtgaccctggagagcatgacccagcgtccacacacaaatccacacgccctgtgaagaaggtctccaaagaggaaaagaaatccaagaaacctccccctgtccctgccttacccagcaagcttcccacgtttggagccccggaacagttagtggatttaaaacaagctggcttggaggctgcagccaaagccaccagctcacatccgaactcaacatctctcaaggccaaggtgctggagaccttcctggccaagtccagacctgagctcctggagtgtgagtagcttcggggctggtgcgcggttccactggttctgtctctcctgcgccgctctgtgcagctctctgtggggccagctggccggctatatcagccactccccttcacttgtcctctactttgttgctcccttattttctcccagtcatcagtgcctttctttacttttcctaactagctcagatttcacaatcggtcctttgactctccctcttgccgtctagtctggcccaattgagctcacctttctctgtgggtcggcgcctgcatgtcctctgcagagaaggcagggcgattgcggtcaccggccttcaccgggcgtcccgttgccggcatgcctgccctgcatctcctgtctcctccccacttggcatctggtgtggtaccgcctccaaacaggctggaaatggtgttgccaagtttggtgagagtagattcctcttctgcgctgtcctct

SEQ ID NO: 452830 - DNA, 1510 bp, Homo sapiens
gctaggtttcgtttcctcggcggcctcggagcgcgggtgcagcagttgtgtcccgacccctgggagcgccatggcagagctgtgccccctggccgaggagctgtcgtgctccatctgcctggagcccttcaaggagccggtcaccactccgtgcggccacaacttctgcgggtcgtgcctgaatgagacgtgggcagtccagggctcgccatacctgtgcccgcagtgccgcgccgtctaccaggcgcgaccgcagctgcacaagaacacggtgctgtgcaacgtggtggagcagttcctgcaggccgacctggcccgggagccacccgccgacgtctggacgccgcccgcccgcgcctctgcacccagcccgaatgcccaggtggcctgcgaccactgcctgaaggaggccgccgtgaagacgtgcttggtgtgcatggcctccttctgtcaggagcacctgcagccgcacttcgacagccccgccttccaggaccacccgctgcagccgcccgttcgcgacctgttgcgccgcaaatgttcccagcacaatcggctgcgggaatttttctgccccgagcacagcgagtgcatctgccacatctgcctggtggagcataagacctgctctcccgcgtccctgagccaggccagcgccgacctggaggccaccctgaggcacaaactaactgtcatgtacagtcagatcaacggggcgtcgagagcactggatgatgtgagaaacaggcagcaggatgtgcggatgactgcaaacagaaaggtggagcagctacaacaagaatacacggaaatgaaggctctcttggacgcctcagagaccacctcgacaaggaagataaaggaagaggagaagagggtcaacagcaagtttgacaccatttatcagattctcctcaagaagaagagtgagatccagaccttgaaggaggagattgaacagagcctgaccaagagggatgagttcgagtttctggagaaagcatcaaaactgcgaggaatctcaacaaagccagtctacatccccgaggtggaactgaaccacaagctgataaaaggcatccaccagagcaccatagacctcaaaaacgagctgaagcagtgcatcgggcggctccaggagctcacccccagttcaggtgaccctggagagcatgacccagcgtccacacacaaatccacacgccctgtgaagaaggtctccagtaagtagccccacccctgtctccatggcaacagcatggctgtggcctccccaggctctggccaagtcacttccggcccatcccgagtcactgtggggcctggacctcagtgggaaagaagttggtggcagtccccaccgcggggggctgtagggctgtggcagaagctcccctgtccatcagcattgcacgtttgggctgcctggaacagcaagatgcctgaggctggcttgttttgagaaatatttactatacccaagtccttgggcagagccttgggcaaggag

SEQ ID NO: 452831 - DNA, 291 bp, Homo sapiens
gtaagttatcatgggcaaggagctttggggtgtccactctgagtttgttctgcaaatcactctctgtttcctctcccagctgcagccaaagccaccagctcacatccgaactcaacatctctcaaggccaaggtgctggagaccttcctggccaagtccagacctgagctcctggagtgtgagtagcttcggggctggtgcgcggttccactggttctgtctctcctgcgccgctctgtgcagctctctgtggggccagctggccggctatatcagccactccccttcact

SEQ ID NO: 452832 - DNA, 120 bp, Homo sapiens
actgatggcggtccaggaagggtggaggctaaacctccttggcatctcagcagtgttaagtctctgggttgtaatgggcttctgctattaccatgtttctcaactgtttttttttttttg

SEQ ID NO: 452833 - DNA, 6169 bp, Homo sapiens
gctaggtttcgtttcctcggcggcctcggagcgcgggtgcagcagttgtgtcccgacccctgggagcgccatggcagagctgtgccccctggccgaggagctgtcgtgctccatctgcctggagcccttcaaggagccggtcaccactccgtgcggccacaacttctgcgggtcgtgcctgaatgagacgtgggcagtccagggctcgccatacctgtgcccgcagtgccgcgccgtctaccaggcgcgaccgcagctgcacaagaacacggtgctgtgcaacgtggtggagcagttcctgcaggccgacctggcccgggagccacccgccgacgtctggacgccgcccgcccgcgcctctgcacccagcccgaatgcccaggtggcctgcgaccactgcctgaaggaggccgccgtgaagacgtgcttggtgtgcatggcctccttctgtcaggagcacctgcagccgcacttcgacagccccgccttccaggaccacccgctgcagccgcccgttcgcgacctgttgcgccgcaaatgttcccagcacaatcggctgcgggaatttttctgccccgagcacagcgagtgcatctgccacatctgcctggtggagcataagacctgctctcccgcgtccctgagccaggccagcgccgacctggaggccaccctgaggcacaaactaactgtcatgtacagtcagatcaacggggcgtcgagagcactggatgatgtgagaaacaggcagcaggatgtgcggatgactgcaaacagaaaggtggagcagctacaacaagaatacacggaaatgaaggctctcttggacgcctcagagaccacctcgacaaggaagataaaggaagaggagaagagggtcaacagcaagtttgacaccatttatcagattctcctcaagaagaagagtgagatccagaccttgaaggaggagattgaacagagcctgaccaagagggatgagttcgagtttctggagaaagcatcaaaactgcgaggaatctcaacaaagccagtctacatccccgaggtggaactgaaccacaagctgataaaaggcatccaccagagcaccatagacctcaaaaacgagctgaagcagtgcatcgggcggctccaggagctcacccccagttcaggtgaccctggagagcatgacccagcgtccacacacaaatccacacgccctgtgaagaaggtctccaaagaggaaaagaaatccaagaaacctccccctgtccctgccttacccagcaagcttcccacgtttggagccccggaacagttagtggatttaaaacaagctggcttggaggctgcagccaaagccaccagctcacatccgaactcaacatctctcaaggccaaggtgctggagaccttcctggccaagtccagacctgagctcctggagtattacattaaagtcatcctggactacaacaccgcccacaacaaagtggctctgtcagagtgctatacagtagcttctgtggctgagatgcctcagaactaccggccgcatccccagaggttcacatactgctctcaggtgctgggcctgcactgctacaagaaggggatccactactgggaggtggagctgcagaagaacaacttctgtggggtaggcatctgctacggaagcatgaaccggcagggcccagaaagcaggctcggccgcaacagcgcctcctggtgcgtggagtggttcaacaccaagatctctgcctggcacaataacgtggagaaaaccctgccctccaccaaggccacgcgggtgggcgtgcttctcaactgtgaccacggctttgtcatcttcttcgctgttgccgacaaggtccacctgatgtataagttcagggtggactttactgaggctttgtacccggctttctgggtattttctgctggtgccacactctccatctgctcccccaagtaggcaggctgtaggcacttgggctgactgcctgcagaagtcccaagaccctagtgaaaatacagcaggcagaactctccttggataattcccccaagaggtccccaaggattgggagcatgggaggggagctggcgggagggtgggaggtgggatttagccaggaaaggggtgagagtgattgtgttgtgggcgaggaggcgtttccaccccctggtgcctatcagggcagggtgacctactccccattgttctggaaatctccaggctgctgggcagctgggcagagctctgggaagtgaagtcatgagtgcccgattcctcttagagaaaatccataccttcagatcttggtgttttgaattcttactatagatgtttttaaagttccaaagtcattgagtttcaatgttacataaactccattacccgcatgttggggcttgatctcctggttattatctgtgcttgaggaaacacccacagcagtctctacccagaacagtttcctaaagaggcataccctcttcctccactggtttcaaacagcaaacttttcagctaaagcttcaaaccatgattggaatcagcctgtgttggatttgtgattcagggtcatggtgaccctgatccagtttgggtggaaatccttcctaagtatcataagaagcatcttggcagagatgctttggtggcagccatgagctttgctggaggccttgcttcccatagccttggctgtggggcaaggaactctgccaggcgagggggatgctgccctggatcaacagaagcctggtgggtttgctcgtgttagagtgtcctgccttcttactgacaactcttctcggtgatagcctctcttccctggattgtgacatatggaatgacagtgcaggtaccaccgaggctagcacagtcaagcctccagctaagctggatccctgaagcctgctatcatgcagacaggctatgcggctgcctcggaccatgctaggccacttgctggggtgtcaacctaccaccaaaggggtcttttagcaaacctcatggggaacaggaacattcctgttcatccctggccacaggctgcagacccagcactggcccttgcgtgagtcagagcctggggctggccctagccccttctactgacttcctcatttaagccaattatataagctcacattgatcagggagggagggaaagagctaaagagggtcacacaagtggctattttccctgcagtgtttctgtgtggtgaaaataacccagtccactaaggggcgggagtgaatggatggctggattttccccaagctccttatagcctaatgttgtcaggatgtgagtatgaggaatttagcctcttatagtgaaatgagtccaactctgggctttgcttagaggagagctcccgtcaggcttcctataatatgaaaagaagtcaccattggggaactagagaccccagaccttttcatatggatatttgagaatgtaatgcatctcaggcctcgtgctggaactctagggcactctgggcaggctcagaacacttgatattcctgacagctacacacctgacatgcaggtacatacctgatcggtgtcatctcctaacaaggattttcagttcctcgggagagcaataatctttgtaggaaagacatccctgcaataggtgatatgtggtccttagaagttttattcctttactacttggaagaaaagttctttggtgattcttctctgcttttgaagatgatcaaaagcatcttcattgattttctgaaacgaaagccttgtctgaaaccaattaatacttgggaaacagctgggcttggaggagtagaatgccagagataaatccatggctcctgctctggctctcttctgcagaaatgagggcaacagtgaggccacttccctggcaaatgtgcagctcaggatagggaagcataagaccctctgtttaaaagagagtcaagtaggtaaccaaagccaagctctgtgcaaggtgctttggagttgtaaattgaggagtgcatccttgctgtcttgaaccattctgtttgcaatggtgagaccttacataacctagccttgcagggccgccacacaaccctggagtcctagagttggaggaacctttgtatccatctgacttctcattttgcagaatatgatgagaaagtagaggatcgctctgttcaccactcttgctattccattagtggggagatgcctgctagcatgtgtgaggggaacactctgatacactgggaagtatcggaaattcccagaaacacaaacataaaataactctcctagacccaggtactggggactgtctcagtccgtgtggcatgataaataaaaggttaggatcaagtctttgtatttttcaagatgtggtagctgattattcctgttttaagtactctgaaattgatctgtgatcaataatactaatatgttatcttttaccgtattctgcctctcactattgattttaattagttaggagtatttgagctgttatttcttgagcttaatatttttttagagttaactctttaaggagataatcatggctgtagacaaggccagggctggctgacgtgccttagaaggtttgaatgcaataaagcggtgtttggcgttctcctgcattgtagtgcgggtacaaaatgctatttgttcgtcatactgttgtcagcagatgagccgcccactacagacggctactgcccagggacctgcccaggccccacccaagggctcccaagggttgagatttctgcagacctatagccagcacacttagtcctgccctatatagagttcctcttcgggaagcttttgataaggaattctcagaccgataggatgtctgtctgggctttgctgcgggacagtctaactgtgggggctaggggaaagcaggagagtatcgatcaaagagtaagccacacacggataatcagttactagggatggaggtgtgagggttcattatattattcattttactgttgtatatgtttgaaaatgtctataataaaaagctttaaaaaaaaaaagaaacaaaaatagttcaggccagcaatgggccctccatgttcagtggattttatccttgtttcaattggggtaggagttccaggaggtgtggattggaggttgtctaaagaattgaactggcctttgtccctgcttcctgggagggagactttcagtccttgacatttccagggtaataggagtgtctttgttatttgtgaggccatgggatcacacctgagcttatgctaaaaggtgggatgactcagagctggggctggtcaccagacagactgaccatgtgattagaggtttgaggctttgagtcagcctgacctatggggcgggggactggaggctgagtttaatcatctggccagtgctttaatcagtacatcatgaaaccctaataaaaactctggacactaaagctcagcatagcttcctgggtggtgaagctgtggctatgccggcagggcagtgtgccctaattccacgaagagggggcatgggagcactgtgctcaagacccttccagacctttccctgtgtcttccttggcttgtggagctgatttgtatcctttataataaaactaatcataagtatagtcctgagttctgtgatttttagtgaatcattgaacctgaggaagatcatggtaccctcctgggattgtaggcagttggtcacaagcgctgatggcctgggatccccacatggggctggtgtctgaggtgagggcagccctgttggggactatgtcccttcgctggtggcatctgatctaactctgctggtcgttgttagaattgtggtgcggtacaccaggtggtgtcagaacagaggcggtgggatctgcacaccttgagtaagcccttctcgaccagcctgttggaacaaaacacactactcttcatgggagcctcccgagtttcttctcacctgtgtgaagtcccctttgtttactgtcctgagttttgttctcgctcatctccaacccctcttgtagttttttcttcctcactgtcactgtaaccataaaaatactcagtatgtcagtgatagacttgtctttctattcagagatgactcttcaactgtccggggacacttttttccaataaaaagttcaggatggt

SEQ ID NO: 452834 - DNA, 5679 bp, Homo sapiens
gtatctagaggatcccaggcgcggtctgaactgtcctctgaaaaggatgaagggaagtagccaccctgaggcacaaactaactgtcatgtacagtcagatcaacggggcgtcgagagcactggatgatgtgagaaacaggcagcaggatgtgcggatgactgcaaacagaaaggtggagcagctacaacaagaatacacggaaatgaaggctctcttggacgcctcagagaccacctcgacaaggaagataaaggaagaggagaagagggtcaacagcaagtttgacaccatttatcagattctcctcaagaagaagagtgagatccagaccttgaaggaggagattgaacagagcctgaccaagagggatgagttcgagtttctggagaaagcatcaaaactgcgaggaatctcaacaaagccagtctacatccccgaggtggaactgaaccacaagctgataaaaggcatccaccagagcaccatagacctcaaaaacgagctgaagcagtgcatcgggcggctccaggagctcacccccagttcaggtgaccctggagagcatgacccagcgtccacacacaaatccacacgccctgtgaagaaggtctccaaagaggaaaagaaatccaagaaacctccccctgtccctgccttacccagcaagcttcccacgtttggagccccggaacagttagtggatttaaaacaagctggcttggaggctgcagccaaagccaccagctcacatccgaactcaacatctctcaaggccaaggtgctggagaccttcctggccaagtccagacctgagctcctggagtattacattaaagtcatcctggactacaacaccgcccacaacaaagtggctctgtcagagtgctatacagtagcttctgtggctgagatgcctcagaactaccggccgcatccccagaggttcacatactgctctcaggtgctgggcctgcactgctacaagaaggggatccactactgggaggtggagctgcagaagaacaacttctgtggggtaggcatctgctacggaagcatgaaccggcagggcccagaaagcaggctcggccgcaacagcgcctcctggtgcgtggagtggttcaacaccaagatctctgcctggcacaataacgtggagaaaaccctgccctccaccaaggccacgcgggtgggcgtgcttctcaactgtgaccacggctttgtcatcttcttcgctgttgccgacaaggtccacctgatgtataagttcagggtggactttactgaggctttgtacccggctttctgggtattttctgctggtgccacactctccatctgctcccccaagtaggcaggctgtaggcacttgggctgactgcctgcagaagtcccaagaccctagtgaaaatacagcaggcagaactctccttggataattcccccaagaggtccccaaggattgggagcatgggaggggagctggcgggagggtgggaggtgggatttagccaggaaaggggtgagagtgattgtgttgtgggcgaggaggcgtttccaccccctggtgcctatcagggcagggtgacctactccccattgttctggaaatctccaggctgctgggcagctgggcagagctctgggaagtgaagtcatgagtgcccgattcctcttagagaaaatccatagctactgtaggttctgtcttgggccacttggatctgaaggctgcccctttgctctctggggtagccttcagatcttggtgttttgaattcttactatagatgtttttaaagttccaaagtcattgagtttcaatgttacataaactccattacccgcatgttggggcttgatctcctggttattatctgtgcttgaggaaacacccacagcagtctctacccagaacagtttcctaaagaggcataccctcttcctccactggaaaatagtgcgttcccttcctaccctgcacacccatcgcccccacattgatggttttcaaacagcaaacttttcagctaaagcttcaaaccatgattggaatcagcctgtgttggatttgtgattcagggtcatggtgaccctgatccagtttgggtggaaatccttcctaagtatcataagaagcatcttggcagagatgctttggtggcagccatgagctttgctggaggccttgcttcccatagccttggctgtggggcaaggaactctgccaggcgagggggatgctgccctggatcaacagaagcctggtgggtttgctcgtgttagagtgtcctgccttcttactgacaactcttctcggtgatagcctctcttccctggattgtgacatatggaatgacagtgcaggtaccaccgaggctagcacagtcaagcctccagctaagctggatccctgaagcctgctatcatgcagacaggctatgcggctgcctcggaccatgctaggccacttgctggggtgtcaacctaccaccaaaggggtcttttagcaaacctcatggggaacaggaacattcctgttcatccctggccacaggctgcagacccagcactggcccttgcgtgagtcagagcctggggctggccctagccccttctactgacttcctcatttaagccaattatataagctcacattgatcagggagggagggaaagagctaaagagggtcacacaagtggctattttccctgcagtgtttctgtgtggtgaaaataacccagtccactaaggggcgggagtgaatggatggctggattttccccaagctccttatagcctaatgttgtcaggatgtgagtatgaggaatttagcctcttatagtgaaatgagtccaactctgggctttgcttagaggagagctcccgtcaggcttcctataatatgaaaagaagtcaccattggggaactagagaccccagaccttttcatatggatatttgagaatgtaatgcatctcaggcctcgtgctggaactctagggcactctgggcaggctcagaacacttgatattcctgacagctacacacctgacatgcaggtacatacctgatcggtgtcatctcctaacaaggattttcagttcctcgggagagcaataatctttgtaggaaagacatccctgcaataggtgatatgtggtccttagaagttttattcctttactacttggaagaaaagttctttggtgattcttctctgcttttgaagatgatcaaaagcatcttcattgattttctgaaacgaaagccttgtctgaaaccaattaatacttgggaaacagctgggcttggaggagtagaatgccagagataaatccatggctcctgctctggctctcttctgcagaaatgagggcaacagtgaggccacttccctggcaaatgtgcagctcaggatagggaagcataagaccctctgtttaaaagagagtcaagtaggtaaccaaagccaagctctgtgcaaggtgctttggagttgtaaattgaggagtgcatccttgctgtcttgaaccattctgtttgcaatggtgagaccttacataacctagccttgcagggccgccacacaaccctggagtcctagagttggaggaacctttgtatccatctgacttctcattttgcagaatatgatgagaaagtagaggatcgctctgttcaccactcttgctattccattagtggggagatgcctgctagcatgtgtgaggggaacactctgatacactgggaagtatcggaaattcccagaaacacaaacataaaataactctcctagacccaggtactggggactgtctcagtccgtgtggcatgataaataaaaggttaggatcaagtctttgtatttttcaagatgtggtagctgattattcctgttttaagtactctgaaattgatctgtgatcaataatactaatatgttatcttttaccgtattctgcctctcactattgattttaattagttaggagtatttgagctgttatttcttgagcttaatatttttttagagttaactctttaaggagataatcatggctgtagacaaggccagggctggctgacgtgccttagaaggtttgaatgcaataaagcggtgtttggcgttctcctgcattgtagtgcgggtacaaaatgctatttgttcgtcatactgttgtcagcagatgagccgcccactacagacggctactgcccagggacctgcccaggccccacccaagggctcccaagggttgagatttctgcagacctatagccagcacacttagtcctgccctatatagagttcctcttcgggaagcttttgataaggaattctcagaccgataggatgtctgtctgggctttgctgcgggacagtctaactgtgggggctaggggaaagcaggagagtatcgatcaaagagtaagccacacacggataatcagttactagggatggaggtgtgagggttcattatattattcattttactgttgtatatgtttgaaaatgtctataataaaaagctttaaaaaaaaaaagaaacaaaaatagttcaggccagcaatgggccctccatgttcagtggattttatccttgtttcaattggggtaggagttccaggaggtgtggattggaggttgtctaaagaattgaactggcctttgtccctgcttcctgggagggagactttcagtccttgacatttccagggtaataggagtgtctttgttatttgtgaggccatgggatcacacctgagcttatgctaaaaggtgggatgactcagagctggggctggtcaccagacagactgaccatgtgattagaggtttgaggctttgagtcagcctgacctatggggcgggggactggaggctgagtttaatcatctggccagtgctttaatcagtacatcatgaaaccctaataaaaactctggacactaaagctcagcatagcttcctgggtggtgaagctgtggctatgccggcagggcagtgtgccctaattccacgaagagggggcatgggagcactgtgctcaagacccttccagacctttccctgtgtcttccttggcttgtggagctgatttgtatcctttataataaaactaatcataagtatagtcctgagttctgtgatttttagtgaatcattgaacctgaggaagatcatggtaccctcctgggattgtaggcagttggtcacaagcgctgatggcctgggatccccacatggggctggtgtctgaggtgagggcagccctgttggggactatgtcccttcgctggtggcatctgatctaactctgctggtcgttgttagaattgtggtgcggtacaccaggtggtgtcagaacagaggcggtgggatctgcacaccttgagtaagcccttctcgaccagcctgttggaacaaaacacactactcttcatgggagcctcccgagtttcttctcacctgtgtgaagtcccctttgtttactgtcctgagttttgttctcgctcatctccaacccctcttgtagttttttcttcctcactgtcactgtaaccataaaaatactcagtatgtcagtgatagacttgtctttctattcagagatgactcttcaactgtccggggacacttttttccaataaaaagttcaggatggt

SEQ ID NO: 452835 - DNA, 5798 bp, Homo sapiens
agttcgacggagactctcattctttaatgccatcctggcagacatataactttctggttacttataataattaaaaagttcgacggagactctcactattctcctcaagaagaagagtgagatccagaccttgaaggaggagattgaacagagcctgaccaagagggatgagttcgagtttctggagaaagcatcaaaactgcgaggaatctcaacaaagccagtctacatccccgaggtggaactgaaccacaagctgataaaaggcatccaccagagcaccatagacctcaaaaacgagctgaagcagtgcatcgggcggctccaggagctcacccccagttcaggtgaccctggagagcatgacccagcgtccacacacaaatccacacgccctgtgaagaaggtctccaaagaggaaaagaaatccaagaaacctcgtaagttatgcatttctgcaactgttcgtttcttgagactgcccgagcacagaactaaatgctggtagtgagagtcgacctctctcatcagggttctgtgatgggttctatatgattccattctgtaatggcagcaggcctgaggctggaggggaggacaagcataagtgagatgaataaggtgactttagccttgtctgttttcccctgtgttgtcctgctgttcaggcgtgtgtttgtagaagtggctcttaatcagtgtggaagggagtagaggccatcccgttgctctgtatcatatttccctttccttacccccagcccctgtccctgccttacccagcaagcttcccacgtttggagccccggaacagttagtggatttaaaacaagctggcttggaggctgcagccaaagccaccagctcacatccgaactcaacatctctcaaggccaaggtgctggagaccttcctggccaagtccagacctgagctcctggagtattacattaaagtcatcctggactacaacaccgcccacaacaaagtggctctgtcagagtgctatacagtagcttctgtggctgagatgcctcagaactaccggccgcatccccagaggttcacatactgctctcaggtgctgggcctgcactgctacaagaaggggatccactactgggaggtggagctgcagaagaacaacttctgtggggtaggcatctgctacggaagcatgaaccggcagggcccagaaagcaggctcggccgcaacagcgcctcctggtgcgtggagtggttcaacaccaagatctctgcctggcacaataacgtggagaaaaccctgccctccaccaaggccacgcgggtgggcgtgcttctcaactgtgaccacggctttgtcatcttcttcgctgttgccgacaaggtccacctgatgtataagttcagggtggactttactgaggctttgtacccggctttctgggtattttctgctggtgccacactctccatctgctcccccaagtaggcaggctgtaggcacttgggctgactgcctgcagaagtcccaagaccctagtgaaaatacagcaggcagaactctccttggataattcccccaagaggtccccaaggattgggagcatgggaggggagctggcgggagggtgggaggtgggatttagccaggaaaggggtgagagtgattgtgttgtgggcgaggaggcgtttccaccccctggtgcctatcagggcagggtgacctactccccattgttctggaaatctccaggctgctgggcagctgggcagagctctgggaagtgaagtcatgagtgcccgattcctcttagagaaaatccatagctactgtaggttctgtcttgggccacttggatctgaaggctgcccctttgctctctggggtagccttcagatcttggtgttttgaattcttactatagatgtttttaaagttccaaagtcattgagtttcaatgttacataaactccattacccgcatgttggggcttgatctcctggttattatctgtgcttgaggaaacacccacagcagtctctacccagaacagtttcctaaagaggcataccctcttcctccactggaaaatagtgcgttcccttcctaccctgcacacccatcgcccccacattgatggttttcaaacagcaaacttttcagctaaagcttcaaaccatgattggaatcagcctgtgttggatttgtgattcagggtcatggtgaccctgatccagtttgggtggaaatccttcctaagtatcataagaagcatcttggcagagatgctttggtggcagccatgagctttgctggaggccttgcttcccatagccttggctgtggggcaaggaactctgccaggcgagggggatgctgccctggatcaacagaagcctggtgggtttgctcgtgttagagtgtcctgccttcttactgacaactcttctcggtgatagcctctcttccctggattgtgacatatggaatgacagtgcaggtaccaccgaggctagcacagtcaagcctccagctaagctggatccctgaagcctgctatcatgcagacaggctatgcggctgcctcggaccatgctaggccacttgctggggtgtcaacctaccaccaaaggggtcttttagcaaacctcatggggaacaggaacattcctgttcatccctggccacaggctgcagacccagcactggcccttgcgtgagtcagagcctggggctggccctagccccttctactgacttcctcatttaagccaattatataagctcacattgatcagggagggagggaaagagctaaagagggtcacacaagtggctattttccctgcagtgtttctgtgtggtgaaaataacccagtccactaaggggcgggagtgaatggatggctggattttccccaagctccttatagcctaatgttgtcaggatgtgagtatgaggaatttagcctcttatagtgaaatgagtccaactctgggctttgcttagaggagagctcccgtcaggcttcctataatatgaaaagaagtcaccattggggaactagagaccccagaccttttcatatggatatttgagaatgtaatgcatctcaggcctcgtgctggaactctagggcactctgggcaggctcagaacacttgatattcctgacagctacacacctgacatgcaggtacatacctgatcggtgtcatctcctaacaaggattttcagttcctcgggagagcaataatctttgtaggaaagacatccctgcaataggtgatatgtggtccttagaagttttattcctttactacttggaagaaaagttctttggtgattcttctctgcttttgaagatgatcaaaagcatcttcattgattttctgaaacgaaagccttgtctgaaaccaattaatacttgggaaacagctgggcttggaggagtagaatgccagagataaatccatggctcctgctctggctctcttctgcagaaatgagggcaacagtgaggccacttccctggcaaatgtgcagctcaggatagggaagcataagaccctctgtttaaaagagagtcaagtaggtaaccaaagccaagctctgtgcaaggtgctttggagttgtaaattgaggagtgcatccttgctgtcttgaaccattctgtttgcaatggtgagaccttacataacctagccttgcagggccgccacacaaccctggagtcctagagttggaggaacctttgtatccatctgacttctcattttgcagaatatgatgagaaagtagaggatcgctctgttcaccactcttgctattccattagtggggagatgcctgctagcatgtgtgaggggaacactctgatacactgggaagtatcggaaattcccagaaacacaaacataaaataactctcctagacccaggtactggggactgtctcagtccgtgtggcatgataaataaaaggttaggatcaagtctttgtatttttcaagatgtggtagctgattattcctgttttaagtactctgaaattgatctgtgatcaataatactaatatgttatcttttaccgtattctgcctctcactattgattttaattagttaggagtatttgagctgttatttcttgagcttaatatttttttagagttaactctttaaggagataatcatggctgtagacaaggccagggctggctgacgtgccttagaaggtttgaatgcaataaagcggtgtttggcgttctcctgcattgtagtgcgggtacaaaatgctatttgttcgtcatactgttgtcagcagatgagccgcccactacagacggctactgcccagggacctgcccaggccccacccaagggctcccaagggttgagatttctgcagacctatagccagcacacttagtcctgccctatatagagttcctcttcgggaagcttttgataaggaattctcagaccgataggatgtctgtctgggctttgctgcgggacagtctaactgtgggggctaggggaaagcaggagagtatcgatcaaagagtaagccacacacggataatcagttactagggatggaggtgtgagggttcattatattattcattttactgttgtatatgtttgaaaatgtctataataaaaagctttaaaaaaaaaaagaaacaaaaatagttcaggccagcaatgggccctccatgttcagtggattttatccttgtttcaattggggtaggagttccaggaggtgtggattggaggttgtctaaagaattgaactggcctttgtccctgcttcctgggagggagactttcagtccttgacatttccagggtaataggagtgtctttgttatttgtgaggccatgggatcacacctgagcttatgctaaaaggtgggatgactcagagctggggctggtcaccagacagactgaccatgtgattagaggtttgaggctttgagtcagcctgacctatggggcgggggactggaggctgagtttaatcatctggccagtgctttaatcagtacatcatgaaaccctaataaaaactctggacactaaagctcagcatagcttcctgggtggtgaagctgtggctatgccggcagggcagtgtgccctaattccacgaagagggggcatgggagcactgtgctcaagacccttccagacctttccctgtgtcttccttggcttgtggagctgatttgtatcctttataataaaactaatcataagtatagtcctgagttctgtgatttttagtgaatcattgaacctgaggaagatcatggtaccctcctgggattgtaggcagttggtcacaagcgctgatggcctgggatccccacatggggctggtgtctgaggtgagggcagccctgttggggactatgtcccttcgctggtggcatctgatctaactctgctggtcgttgttagaattgtggtgcggtacaccaggtggtgtcagaacagaggcggtgggatctgcacaccttgagtaagcccttctcgaccagcctgttggaacaaaacacactactcttcatgggagcctcccgagtttcttctcacctgtgtgaagtcccctttgtttactgtcctgagttttgttctcgctcatctccaacccctcttgtagttttttcttcctcactgtcactgtaaccataaaaatactcagtatgtcagtgatagacttgtctttctattcagagatgactcttcaactgtccggggacacttttttccaataaaaagttcaggatggt

SEQ ID NO: 452836 - DNA, 1906 bp, Homo sapiens
gctaggtttcgtttcctcggcggcctcggagcgcgggtgcagcagttgtgtcccgacccctgggagcgccatggcagagctgtgccccctggccgaggagctgtcgtgctccatctgcctggagcccttcaaggagccggtcaccactccgtgcggccacaacttctgcgggtcgtgcctgaatgagacgtgggcagtccagggctcgccatacctgtgcccgcagtgccgcgccgtctaccaggcgcgaccgcagctgcacaagaacacggtgctgtgcaacgtggtggagcagttcctgcaggccgacctggcccgggagccacccgccgacgtctggacgccgcccgcccgcgcctctgcacccagcccgaatgcccaggtggcctgcgaccactgcctgaaggaggccgccgtgaagacgtgcttggtgtgcatggcctccttctgtcaggagcacctgcagccgcacttcgacagccccgccttccaggaccacccgctgcagccgcccgttcgcgacctgttgcgccgcaaatgttcccagcacaatcggctgcgggaatttttctgccccgagcacagcgagtgcatctgccacatctgcctggtggagcataagacctgctctcccgcgtccctgagccaggccagcgccgacctggaggccaccctgaggcacaaactaactgtcatgtacagtcagatcaacggggcgtcgagagcactggatgatgtgagaaacaggcagcaggatgtgcggatgactgcaaacagaaaggtggagcagctacaacaagaatacacggaaatgaaggctctcttggacgcctcagagaccacctcgacaaggaagataaaggaagaggagaagagggtcaacagcaagtttgacaccatttatcagattctcctcaagaagaagagtgagatccagaccttgaaggaggagattgaacagagcctgaccaagagggatgagttcgagtttctggagaaagcatcaaaactgcgaggaatctcaacaaagccagtctacatccccgaggtggaactgaaccacaagctgataaaaggcatccaccagagcaccatagacctcaaaaacgagctgaagcagtgcatcgggcggctccaggagctcacccccagttcaggtgaccctggagagcatgacccagcgtccacacacaaatccacacgccctgtgaagaaggtctccaaagaggaaaagaaatccaagaaacctcgtaagttatgcatttctgcaactgttcgtttcttgagactgcccgagcacagaactaaatgctggtagtgagagtcgacctctctcatcagggttctgtgatgggttctatatgattccattctgtaatggcagcaggcctgaggctggaggggaggacaagcataagtgagatgaataaggtgactttagccttgtctgttttcccctgtgttgtcctgctgttcaggcgtgtgtttgtagaagtggctcttaatcagtgtggaagggagtagaggccatcccgttgctctgtatcatatttccctttccttacccccagcccctgtccctgccttacccagcaagcttcccacgtttggagccccggaacagttagtggatttaaaacaagctggcttggaggctgcagccaaagccaccagctcacatccgaactcaacatctctcaaggccaaggtgctggagaccttcctggccaagtccagacctgagctcctggagtattacattaaagtcatcctggactacaacaccgcccacaacaaagtggctctgtcagagtgctatacagtagcttctgtggctgagatgcctcagaactaccggcgcgcccccggagcaggaggcagcccccgcggaggagcccgcggccgc

SEQ ID NO: 452837 - DNA, 604 bp, Homo sapiens
tctccagcaccttggccttgagagatgttgagttcggatgtgagctggtggctttggctgcagctgggagaggaaacagagagtgatttgcagaacaaactcagagtggacaccccaaagctccttgcccatgataacttaccctccaagccagcttgttttaaatccactaactcttcctggccaagtccagacctgagctcctggagtgtgagtagcttcggggctggtgcgcggttccactggttctgtctctcctgcgccgctctgtgcagctctctgtggggccagctggccggctatatcagccactccccttcacttgtcctctactttgttgctcccttattttctcccagtcatcagtgcctttctttacttttcctaactagctcagatttcacaatcggtcctttgactctccctcttgccgtctagtctggcccaattgagctcacctttctctgtgggtcggcgcctgcatgtcctctgcagagaaggcagggcgattgcggtcaccggccttcaccgggcgtcccgttgccggcatgcctgccctgcatctcctgtctcctccccacagagagagcgtcgggtaccgagc

SEQ ID NO: 452838 - DNA, 534 bp, Homo sapiens
  misc_feature (29)..(30): n is a, c, g, or t
gcctcaacacgcgcgtttttggaaggggnngaacccaggtaaacaaaaagggctgccccttttaatggtactttggggtacacaaaaggcaacataagaatgtaatgtatgttctgtaaagactaaagtgattgttataccagggcttcctgaccttcgggagagactcaaaaaagcagagaggagcacaaagtgaagttaatttggttggcttgctttatctggtttctcattttctttcaatttaaacctgaacataacacccttctccgatacctatccagcagactcctggttgggaagccctgtattaaattttgagaatgtacacagttttcttttgtacagtgctttacaactgctaaaagttaacttgtttaaagcaaaacaagaccttgaaaggtcaatcatattaaagctggtttgattattaatagttatcttttaggaagaagcttttttccctatgtaagatgtcatactgcagatttaaaatatagactatcaataaaatgcatgaagtgatcatttgtg

SEQ ID NO: 452839 - DNA, 3930 bp, Homo sapiens
atctttttaaaaatttgtccgtgtaaaagtcaggattcctttatatttgtgagcctccttttctcctttcctaaggatgtaatctacagttttcagatctgcagggtagtcttgattggctaaaaacaaatcaattttcttcttggcataaagtgtttcattattataggggtgttcattttaaatagtttaaaaacaattgcagcacattctaagcataagagaaagttattgacaacaggtaccttcctaatctcccaagacgtacttactcatttgtgaagtattaaagtaagaggtaactcaagcagaatgctggctatgaatgtagatattgaagctattcataaacactggaaatagaattttaagcttttagccttcagtggaatgcacatattggacatgtgcatgtgaacacctttttcagtagcactcacggatttccattcgattgtatagaatgaatacaagtgttttagtggaatttgctacttaatttttaatcttgcgatgtccgtgattattacatgcttactagtgttgtggacattgaagacaaggtcattcgtaggtgtcagattacaatggagaacaaaaatcgttttccccccacccacatccaaacaccattctcgagggagcatttcttgcaaaacaccttacatttcattttctatctttgcactttttcttaagtacagaaaagttgtctttaagacctagtttgaacttcatgcagtaagaggaacaaggataaacaatgttgggagttcacattgttcagagcataaggaaaagtaccaaaacccaaattttcttgaatatttcagatgtttttaaaaactcacttctagtctgaaacatttgaattgttttaactctgagcagctgacaaagttgaggtttttttgttttgttttgttttgttttgtttttttgagacagagtcttacttggttgcccaggatgaagtgcaatggagcgatctcggctcactgcaacctctgcctcctgggttcaagcaattctcctgtctcagcctctcgagtagctgggattacaggcgcatgccaccacacctggctagtttttatatttttagtagagatggggacttcaccgtgttggccaggctggtcttgaactcctgacctcaagtgatgtgcctgcctcggcctccgaaaatgctgggattacaggcgtgagccaccatgtccagccaaagttgaggtttattagtactattagaaacaaaattgagcaagttaagttaaaagtttgctgactttgtatcaacactatagaagatgagccaccttgttaatttggaatatttgctctgaaaagaacatgttagttacaccttaatggtgttaatggaggtggggattgagaaaagtgttcacattagtgttggaatgtaggtaattgtacagtttataagacctttagcaccaggaaataaaatatgtgtgtgtacacacacagtttttaaaaacgattggaattcatccaaaccttaagattaggaaactgattggctgtaagtgttgcctcaagtaatgtgtcccccgccccataacatgtcttttctgtgccaagtatcctctcctagtgtcagtgtctcaaattatatttatgaagggttatcacataatatgctttgtatttaactacctgcttcccaggcgtccatgacatgaaatgggtgaagcatcagccatgactttcggtcagttcccaaaatacccaaatgatagggaggtaaagattgcaaaattcctcttaaaaggccatttttacagcttgctaaaatacagtggcaccttatggttgttaatattttttcttttaaagatggagaatgtttttattcttccccttttctcctttgttcttttgcgaacaaaaaaaattataatctgccttatttgattttttttttaagttttaccttacaggcttccctgtcacatgttttaccatattaagtacatagaagccatgtttgcagggcacttttattctcctagtcttataagactatgctaattgttactttctgaagtattctgtaccttagtatgcaagattgttaaggcacatgttaaagtgtcaggtgtgtttttttccctttaattcttcagtatgtttatattcaataacagtattgtaattcattgagttaactagtaaattgtgtgcttttgaaaaaacatgaaaaatgtaaattgacagcatacttcatttggaaaaaagtaaaagatccgaggaactagtatgtcacttatttatttttattttattttattttttactttttgagacagggtcttgctctgtcacccaggctggagtgcagtggcatggtcacagctcactgcagccttgacttcctgggctcaggtgattctcccacctcagccttccaagtagctgggactacaggcatgcaccacattgcctggctaattttttgtggagatggggtttcgccatgttgtccaggctgttcttgaactcctgggctcaggcaatttgcctgcctcattctcccaaagtgctgggattataggcgtgagccactgcgcccagccttacttatttttaaatcagattttttaatcaactaaaacagctatgagttaagtacctgccctgcaaaaatttttagaaaaagttttaggattatgaaattaagaattattttccttaactggaacagttctaaaatttatctgatacttctctaacaagtgagtgatctcatgtaaccccagtttgtatcttaaaggctgcagcatagaattgagctgtataacagtgttagaactgtcaagtgataatcacagaacagtttgtatcggttttataattctcatgtcttgatcagatctgaaggaaataggcataccctccaacattctaaaaattatttatttttattaggatttgtttattaaagttccacgagctgctttatggtcagttgggctgagtagtagatatcttaaagacatgcagtgaaagtgaaccctgtcatatcatggtgcctctttcaaggttcctctgtaagttcctcatcttgcagaattatttcaataccaaggtatggttgaaccagctgtccagccttaactctatttagtgccccattactaatgttcttttaactggtttgtatgtgttttaactgtccagtgtttggattttacctcttgatagctccatttgtccctggtgctgcttttaaggatgtagggccatgtgatcaggtatcaagttgagtaggtacgcagttggcctggtgatgtatctgtgcctgttttatcttctcccaggaagagctgctttggtatagttgtttacttggattcatacaaagaacagggcagcaatcttggaaagctttctgaagcttataagaacctgaaggggtttggagggggaacagtaacaaaaggctgcctttatgtctttggtcacaaagcacatagatgtatgttctgtaaagactaaagtgattgttataccagggcttcctgaccttcgggagagactcaaaaaagcagagaggagcacaaagtgaagttaatttggttggcttgctttatctggtttctcattttctttcaatttaaacctgaacataacacccttctccgatacctatccagcagactcctggttgggaagccctgtattaaattttgagaatgtacacagttttcttttgtacagtgctttacaactgctaaaagttaacttgtttaaagcaaaacaagaccttgaaaggtcaatcatattaaagctggtttgattattaatagttatcttttaggaagaagcttttttccctatgtaagatgtcatactgcagatttaaaatatagactatcaataaaatgcatgaagtgatcatttgtg

SEQ ID NO: 452840 - DNA, 2791 bp, Homo sapiens
cttccatgaggacgcgctccccattttcctccagcatggccacacgaatggatctgatgacaagggccactgagaattttcaacccaagaagagaaaaatatgtactatatcaaacaaccactagcgagctgagagaaacgtttgctgactttgtatcaacactatagaagatgagccaccttgttaatttggaatatttgctctgaaaagaacatgttagttacaccttaatggtgttaatggaggtggggattgagaaaagtgttcacattagtgttggaatgtaggtaattgtacagtttataagacctttagcaccaggaaataaaatatgtgtgtgtacacacacagtttttaaaaacgattggaattcatccaaaccttaagattaggaaactgattggctgtaagtgttgcctcaagtaatgtgtcccccgccccataacatgtcttttctgtgccaagtatcctctcctagtgtcagtgtctcaaattatatttatgaagggttatcacataatatgctttgtatttaactacctgcttcccaggcgtccatgacatgaaatgggtgaagcatcagccatgactttcggtcagttcccaaaatacccaaatgatagggaggtaaagattgcaaaattcctcttaaaaggccatttttacagcttgctaaaatacagtggcaccttatggttgttaatattttttcttttaaagatggagaatgtttttattcttccccttttctcctttgttcttttgcgaacaaaaaaaattataatctgccttatttgattttttttttaagttttaccttacaggcttccctgtcacatgttttaccatattaagtacatagaagccatgtttgcagggcacttttattctcctagtcttataagactatgctaattgttactttctgaagtattctgtaccttagtatgcaagattgttaaggcacatgttaaagtgtcaggtgtgtttttttccctttaattcttcagtatgtttatattcaataacagtattgtaattcattgagttaactagtaaattgtgtgcttttgaaaaaacatgaaaaatgtaaattgacagcatacttcatttggaaaaaagtaaaagatccgaggaactagtatgtcacttatttatttttattttattttattttttactttttgagacagggtcttgctctgtcacccaggctggagtgcagtggcatggtcacagctcactgcagccttgacttcctgggctcaggtgattctcccacctcagccttccaagtagctgggactacaggcatgcaccacattgcctggctaattttttgtggagatggggtttcgccatgttgtccaggctgttcttgaactcctgggctcaggcaatttgcctgcctcattctcccaaagtgctgggattataggcgtgagccactgcgcccagccttacttatttttaaatcagattttttaatcaactaaaacagctatgagttaagtacctgccctgcaaaaatttttagaaaaagttttaggattatgaaattaagaattattttccttaactggaacagttctaaaatttatctgatacttctctaacaagtgagtgatctcatgtaaccccagtttgtatcttaaaggctgcagcatagaattgagctgtataacagtgttagaactgtcaagtgataatcacagaacagtttgtatcggttttataattctcatgtcttgatcagatctgaaggaaataggcataccctccaacattctaaaaattatttatttttattaggatttgtttattaaagttccacgagctgctttatggtcagttgggctgagtagtagatatcttaaagacatgcagtgaaagtgaaccctgtcatatcatggtgcctctttcaaggttcctctgtaagttcctcatcttgcagaattatttcaataccaaggtatggttgaaccagctgtccagccttaactctatttagtgccccattactaatgttcttttaactggtttgtatgtgttttaactgtccagtgtttggattttacctcttgatagctccatttgtccctggtgctgcttttaaggatgtagggccatgtgatcaggtatcaagttgagtaggtacgcagttggcctggtgatgtatctgtgcctgttttatcttctcccaggaagagctgctttggtatagttgtttacttggattcatacaaagaacagggcagcaatcttggaaagctttctgaagcttataagaacctgaaggggtttggagggggaacagtaacaaaaggctgcctttatgtctttggtcacaaagcacatagatgtatgttctgtaaagactaaagtgattgttataccagggcttcctgaccttcgggagagactcaaaaaagcagagaggagcacaaagtgaagttaatttggttggcttgctttatctggtttctcattttctttcaatttaaacctgaacataacacccttctccgatacctatccagcagactcctggttgggaagccctgtattaaattttgagaatgtacacagttttcttttgtacagtgctttacaactgctaaaagttaacttgtttaaagcaaaacaagaccttgaaaggtcaatcatattaaagctggtttgattattaatagttatcttttaggaagaagcttttttccctatgtaagatgtcatactgcagatttaaaatatagactatcaataaaatgcatgaagtgatcatttgtg

SEQ ID NO: 452841 - DNA, 4424 bp, Homo sapiens
atctttttaaaaatttgtccgtgtaaaagtcaggattcctttatatttgtgagcctccttttctcctttcctaaggatgtaatctacagttttcagatctgcagggtagtcttgattggctaaaaacaaatcaattttcttcttggcataaagtgtttcattattataggggtgttcattttaaatagtttaaaaacaattgcagcacattctaagcataagagaaagttattgacaacaggtaccttcctaatctcccaagacgtacttactcatttgtgaagtattaaagtaagaggtaactcaagcagaatgctggctatgaatgtagatattgaagctattcataaacactggaaatagaattttaagcttttagccttcagtggaatgcacatattggacatgtgcatgtgaacacctttttcagtagcactcacggatttccattcgattgtatagaatgaatacaagtgttttagtggaatttgctacttaatttttaatcttgcgatgtccgtgattattacatgcttactagtgttgtggacattgaagacaaggtcattcgtaggtgtcagattacaatggagaacaaaaatcgttttccccccacccacatccaaacaccattctcgagggagcatttcttgcaaaacaccttacatttcattttctatctttgcactttttcttaagtacagaaaagttgtctttaagacctagtttgaacttcatgcagtaagaggaacaaggataaacaatgttgggagttcacattgttcagagcataaggaaaagtaccaaaacccaaattttcttgaatatttcagatgtttttaaaaactcacttctagtctgaaacatttgaattgttttaactctgagcagctgacaaagttgaggtttttttgttttgttttgttttgttttgtttttttgagacagagtcttacttggttgcccaggatgaagtgcaatggagcgatctcggctcactgcaacctctgcctcctgggttcaagcaattctcctgtctcagcctctcgagtagctgggattacaggcgcatgccaccacacctggctagtttttatatttttagtagagatggggacttcaccgtgttggccaggctggtcttgaactcctgacctcaagtgatgtgcctgcctcggcctccgaaaatgctgggattacaggcgtgagccaccatgtccagccaaagttgaggtttattagtactattagaaacaaaattgagcaagttaagttaaaagtttgctgactttgtatcaacactatagaagatgagccaccttgttaatttggaatatttgctctgaaaagaacatgttagttacaccttaatggtgttaatggaggtggggattgagaaaagtgttcacattagtgttggaatgtaggtaattgtacagtttataagacctttagcaccaggaaataaaatatgtgtgtgtacacacacagtttttaaaaacgattggaattcatccaaaccttaagattaggaaactgattggctgtaagtgttgcctcaagtaatgtgtcccccgccccataacatgtcttttctgtgccaagtatcctctcctagtgtcagtgtctcaaattatatttatgaagggttatcacataatatgctttgtatttaactacctgcttcccaggcgtccatgacatgaaatgggtgaagcatcagccatgactttcggtcagttcccaaaatacccaaatgatagggaggtaaagattgcaaaattcctcttaaaaggccatttttacagcttgctaaaatacagtggcaccttatggttgttaatattttttcttttaaagatggagaatgtttttattcttccccttttctcctttgttcttttgcgaacaaaaaaaattataatctgccttatttgattttttttttaagttttaccttacaggcttccctgtcacatgttttaccatattaagtacatagaagccatgtttgcagggcacttttattctcctagtcttataagactatgctaattgttactttctgaagtattctgtaccttagtatgcaagattgttaaggcacatgttaaagtgtcaggtgtgtttttttccctttaattcttcagtatgtttatattcaataacagtattgtaattcattgagttaactagtaaattgtgtgcttttgaaaaaacatgaaaaatgtaaattgacagcatacttcatttggaaaaaagtaaaagatccgaggaactagtatgtcacttatttatttttattttattttattttttactttttgagacagggtcttgctctgtcacccaggctggagtgcagtggcatggtcacagctcactgcagccttgacttcctgggctcaggtgattctcccacctcagccttccaagtagctgggactacaggcatgcaccacattgcctggctaattttttgtggagatggggtttcgccatgttgtccaggctgttcttgaactcctgggctcaggcaatttgcctgcctcattctcccaaagtgctgggattataggcgtgagccactgcgcccagccttacttatttttaaatcagattttttaatcaactaaaacagctatgagttaagtacctgccctgcaaaaatttttagaaaaagttttaggattatgaaattaagaattattttccttaactggaacagttctaaaatttatctgatacttctctaacaagtgagtgatctcatgtaaccccagtttgtatcttaaaggctgcagcatagaattgagctgtataacagtgttagaactgtcaagtgataatcacagaacagtttgtatcggttttataattctcatgtcttgatcagatctgaaggaaataggcataccctccaacattctaaaaattatttatttttattaggatttgtttattaaagttccacgagctgctttatggtcagttgggctgagtagtagatatcttaaagacatgcagtgaaagtgaaccctgtcatatcatggtgcctctttcaaggttcctctgtaagttcctcatcttgcagaattatttcaataccaaggtatggttgaaccagctgtccagccttaactctatttagtgccccattactaatgttcttttaactggtttgtatgtgttttaactgtccagtgtttggattttacctcttgatagctccatttgtccctggtgctgcttttaaggatgtagggccatgtgatcaggtatcaagttgagtaggtacgcagttggcctggtgatgtatctgtgcctgttttatcttctcccaggaagagctgctttggtatagttgtttacttggattcatacaaagaacagggcagcaatcttggaaagctttctgaagcttataagaacctgaaggggtttggagggggaacagtaacaaaaggctgcctttatgtctttggtcacaaagcacatagatgtatgttctgtaaagactaaagtgattgttataccagggcttcctgaccttcgggagagactcaaaaaagcagagaggagcacaaagtgaagttaatttggttggcttgctttatctggtttctcattttctttcaatttaaacctgaacataacacccttctccgatacctatccagcagactcctggttgggaagccctgtattaaattttgagaatgtacacagttttcttttgtacagtgctttacaactgctaaaagttaacttgtttaaagcaaaacaagaccttgaaaggtcaatcatattaaagctggtttgattattaatagttatcttttaggaagaagcttttttccctatgtaagatgtcatactgcagatttaaaatatagactatcaataaaatgcatgaagtgatcatttgtgcttgatcatctctccttgggtttttctttaaaaaggggaatctgctataaaggttctgttgcttcaaaccaatgtcaaatagacttgatttttagagtcatggaattacagtgcaaccttgatttttattcccctcactgctatgagtgtgggcaggtactggtttatatgttataacttccgttttatctgtgttgtgtagttgaatggcttaatcgttgagtggtaaaataaaagattatattccaatacaagaatcctggaaagatttatgtgaatgacattttaagtaggcgcatctttgctgtttcttgtattctcgccattgctctgaccactcccttgcttgccctgtatatatacaaaaacttgtaggtgtgcacgtgtgcttgtacttctgtcttccatttctatcttaatctcttaaacatattgcttaagccactaagatgtccttgtttcaagtaaatcgtcacattgtgacacctggtgta

SEQ ID NO: 452842 - DNA, 4589 bp, Homo sapiens
atctttttaaaaatttgtccgtgtaaaagtcaggattcctttatatttgtgagcctccttttctcctttcctaaggatgtaatctacagttttcagatctgcagggtagtcttgattggctaaaaacaaatcaattttcttcttggcataaagtgtttcattattataggggtgttcattttaaatagtttaaaaacaattgcagcacattctaagcataagagaaagttattgacaacaggtaccttcctaatctcccaagacgtacttactcatttgtgaagtattaaagtaagaggtaactcaagcagaatgctggctatgaatgtagatattgaagctattcataaacactggaaatagaattttaagcttttagccttcagtggaatgcacatattggacatgtgcatgtgaacacctttttcagtagcactcacggatttccattcgattgtatagaatgaatacaagtgttttagtggaatttgctacttaatttttaatcttgcgatgtccgtgattattacatgcttactagtgttgtggacattgaagacaaggtcattcgtaggtgtcagattacaatggagaacaaaaatcgttttccccccacccacatccaaacaccattctcgagggagcatttcttgcaaaacaccttacatttcattttctatctttgcactttttcttaagtacagaaaagttgtctttaagacctagtttgaacttcatgcagtaagaggaacaaggataaacaatgttgggagttcacattgttcagagcataaggaaaagtaccaaaacccaaattttcttgaatatttcagatgtttttaaaaactcacttctagtctgaaacatttgaattgttttaactctgagcagctgacaaagttgaggtttttttgttttgttttgttttgttttgtttttttgagacagagtcttacttggttgcccaggatgaagtgcaatggagcgatctcggctcactgcaacctctgcctcctgggttcaagcaattctcctgtctcagcctctcgagtagctgggattacaggcgcatgccaccacacctggctagtttttatatttttagtagagatggggacttcaccgtgttggccaggctggtcttgaactcctgacctcaagtgatgtgcctgcctcggcctccgaaaatgctgggattacaggcgtgagccaccatgtccagccaaagttgaggtttattagtactattagaaacaaaattgagcaagttaagttaaaagtttgctgactttgtatcaacactatagaagatgagccaccttgttaatttggaatatttgctctgaaaagaacatgttagttacaccttaatggtgttaatggaggtggggattgagaaaagtgttcacattagtgttggaatgtaggtaattgtacagtttataagacctttagcaccaggaaataaaatatgtgtgtgtacacacacagtttttaaaaacgattggaattcatccaaaccttaagattaggaaactgattggctgtaagtgttgcctcaagtaatgtgtcccccgccccataacatgtcttttctgtgccaagtatcctctcctagtgtcagtgtctcaaattatatttatgaagggttatcacataatatgctttgtatttaactacctgcttcccaggcgtccatgacatgaaatgggtgaagcatcagccatgactttcggtcagttcccaaaatacccaaatgatagggaggtaaagattgcaaaattcctcttaaaaggccatttttacagcttgctaaaatacagtggcaccttatggttgttaatattttttcttttaaagatggagaatgtttttattcttccccttttctcctttgttcttttgcgaacaaaaaaaattataatctgccttatttgattttttttttaagttttaccttacaggcttccctgtcacatgttttaccatattaagtacatagaagccatgtttgcagggcacttttattctcctagtcttataagactatgctaattgttactttctgaagtattctgtaccttagtatgcaagattgttaaggcacatgttaaagtgtcaggtgtgtttttttccctttaattcttcagtatgtttatattcaataacagtattgtaattcattgagttaactagtaaattgtgtgcttttgaaaaaacatgaaaaatgtaaattgacagcatacttcatttggaaaaaagtaaaagatccgaggaactagtatgtcacttatttatttttattttattttattttttactttttgagacagggtcttgctctgtcacccaggctggagtgcagtggcatggtcacagctcactgcagccttgacttcctgggctcaggtgattctcccacctcagccttccaagtagctgggactacaggcatgcaccacattgcctggctaattttttgtggagatggggtttcgccatgttgtccaggctgttcttgaactcctgggctcaggcaatttgcctgcctcattctcccaaagtgctgggattataggcgtgagccactgcgcccagccttacttatttttaaatcagattttttaatcaactaaaacagctatgagttaagtacctgccctgcaaaaatttttagaaaaagttttaggattatgaaattaagaattattttccttaactggaacagttctaaaatttatctgatacttctctaacaagtgagtgatctcatgtaaccccagtttgtatcttaaaggctgcagcatagaattgagctgtataacagtgttagaactgtcaagtgataatcacagaacagtttgtatcggttttataattctcatgtcttgatcagatctgaaggaaataggcataccctccaacattctaaaaattatttatttttattaggatttgtttattaaagttccacgagctgctttatggtcagttgggctgagtagtagatatcttaaagacatgcagtgaaagtgaaccctgtcatatcatggtgcctctttcaaggttcctctgtaagttcctcatcttgcagaattatttcaataccaaggtatggttgaaccagctgtccagccttaactctatttagtgccccattactaatgttcttttaactggtttgtatgtgttttaactgtccagtgtttggattttacctcttgatagctccatttgtccctggtgctgcttttaaggatgtagggccatgtgatcaggtatcaagttgagtaggtacgcagttggcctggtgatgtatctgtgcctgttttatcttctcccaggaagagctgctttggtatagttgtttacttggattcatacaaagaacagggcagcaatcttggaaagctttctgaagcttataagaacctgaaggggtttggagggggaacagtaacaaaaggctgcctttatgtctttggtcacaaagcacatagatgtatgttctgtaaagactaaagtgattgttataccagggcttcctgaccttcgggagagactcaaaaaagcagagaggagcacaaagtgaagttaatttggttggcttgctttatctggtttctcattttctttcaatttaaacctgaacataacacccttctccgatacctatccagcagactcctggttgggaagccctgtattaaattttgagaatgtacacagttttcttttgtacagtgctttacaactgctaaaagttaacttgtttaaagcaaaacaagaccttgaaaggtcaatcatattaaagctggtttgattattaatagttatcttttaggaagaagcttttttccctatgtaagatgtcatactgcagatttaaaatatagactatcaataaaatgcatgaagtgatcatttgtgcttgatcatctctccttgggtttttctttaaaaaggggaatctgctataaaggttctgttgcttcaaaccaatgtcaaatagacttgatttttagagtcatggaattacagtgcaaccttgatttttattcccctcactgctatgagtgtgggcaggtactggtttatatgttataacttccgttttatctgtgttgtgtagttgaatggcttaatcgttgagtggtaaaataaaagattatattccaatacaagaaaaaaaaaaaaaaaaaaaaaaaaaaaaaaaaaaaaaaaaaaaaaaaaaaaaaaaaaaaacaaaaaacaaaagaaaaaaaaacaaaaaaaaaaaaaaaaaaagcacatgggggggccgccgccaggacacaagaaactcacagcaacaacagaggggggcggcgcgccacaaaaagaagagaaacaaagagagaagaaaaaaggccgagaccaaaaaacacacagctgttgtggcgaaaaaagggggggaggagagaccccaccaagaaaaaaaaaaccggcggcggggagaaaaagaagagaggtagaaaaaaaacaacacagagagagtacgcgagggaacaaaacagggagggaataaagaggggagcaaacacagagaaacagaaaaaaaaaaacacccg

SEQ ID NO: 452843 - DNA, 3891 bp, Homo sapiens
atctttttaaaaatttgtccgtgtaaaagtcaggattcctttatatttgtgagcctccttttctcctttcctaaggatgtaatctacagttttcagatctgcagggtagtcttgattggctaaaaacaaatcaattttcttcttggcataaagtgtttcattattataggggtgttcattttaaatagtttaaaaacaattgcagcacattctaagcataagagaaagttattgacaacaggtaccttcctaatctcccaagacgtacttactcatttgtgaagtattaaagtaagaggtaactcaagcagaatgctggctatgaatgtagatattgaagctattcataaacactggaaatagaattttaagcttttagccttcagtggaatgcacatattggacatgtgcatgtgaacacctttttcagtagcactcacggatttccattcgattgtatagaatgaatacaagtgttttagtggaatttgctacttaatttttaatcttgcgatgtccgtgattattacatgcttactagtgttgtggacattgaagacaaggtcattcgtaggtgtcagattacaatggagaacaaaaatcgttttccccccacccacatccaaacaccattctcgagggagcatttcttgcaaaacaccttacatttcattttctatctttgcactttttcttaagtacagaaaagttgtctttaagacctagtttgaacttcatgcagtaagaggaacaaggataaacaatgttgggagttcacattgttcagagcataaggaaaagtaccaaaacccaaattttcttgaatatttcagatgtttttaaaaactcacttctagtctgaaacatttgaattgttttaactctgagcagctgacaaagttgaggtttttttgttttgttttgttttgttttgtttttttgagacagagtcttacttggttgcccaggatgaagtgcaatggagcgatctcggctcactgcaacctctgcctcctgggttcaagcaattctcctgtctcagcctctcgagtagctgggattacaggcgcatgccaccacacctggctagtttttatatttttagtagagatggggacttcaccgtgttggccaggctggtcttgaactcctgacctcaagtgatgtgcctgcctcggcctccgaaaatgctgggattacaggcgtgagccaccatgtccagccaaagttgaggtttattagtactattagaaacaaaattgagcaagttaagttaaaagtttgctgactttgtatcaacactatagaagatgagccaccttgttaatttggaatatttgctctgaaaagaacatgttagttacaccttaatggtgttaatggaggtggggattgagaaaagtgttcacattagtgttggaatgtaggtaattgtacagtttataagacctttagcaccaggaaataaaatatgtgtgtgtacacacacagtttttaaaaacgattggaattcatccaaaccttaagattaggaaactgattggctgtaagtgttgcctcaagtaatgtgtcccccgccccataacatgtcttttctgtgccaagtatcctctcctagtgtcagtgtctcaaattatatttatgaagggttatcacataatatgctttgtatttaactacctgcttcccaggcgtccatgacatgaaatgggtgaagcatcagccatgactttcggtcagttcccaaaatacccaaatgatagggaggtaaagattgcaaaattcctcttaaaaggccatttttacagcttgctaaaatacagtggcaccttatggttgttaatattttttcttttaaagatggagaatgtttttattcttccccttttctcctttgttcttttgcgaacaaaattaccttacaggcttccctgtcacatgttttaccatattaagtacatagaagccatgtttgcagggcacttttattctcctagtcttataagactatgctaattgttactttctgaagtattctgtaccttagtatgcaagattgttaaggcacatgttaaagtgtcaggtgtgtttttttccctttaattcttcagtatgtttatattcaataacagtattgtaattcattgagttaactagtaaattgtgtgcttttgaaaaaacatgaaaaatgtaaattgacagcatacttcatttggaaaaaagtaaaagatccgaggaactagtatgtcacttatttatttttattttattttattttttactttttgagacagggtcttgctctgtcacccaggctggagtgcagtggcatggtcacagctcactgcagccttgacttcctgggctcaggtgattctcccacctcagccttccaagtagctgggactacaggcatgcaccacattgcctggctaattttttgtggagatggggtttcgccatgttgtccaggctgttcttgaactcctgggctcaggcaatttgcctgcctcattctcccaaagtgctgggattataggcgtgagccactgcgcccagccttacttatttttaaatcagattttttaatcaactaaaacagctatgagttaagtacctgccctgcaaaaatttttagaaaaagttttaggattatgaaattaagaattattttccttaactggaacagttctaaaatttatctgatacttctctaacaagtgagtgatctcatgtaaccccagtttgtatcttaaaggctgcagcatagaattgagctgtataacagtgttagaactgtcaagtgataatcacagaacagtttgtatcggttttataattctcatgtcttgatcagatctgaaggaaataggcataccctccaacattctaaaaattatttatttttattaggatttgtttattaaagttccacgagctgctttatggtcagttgggctgagtagtagatatcttaaagacatgcagtgaaagtgaaccctgtcatatcatggtgcctctttcaaggttcctctgtaagttcctcatcttgcagaattatttcaataccaaggtatggttgaaccagctgtccagccttaactctatttagtgccccattactaatgttcttttaactggtttgtatgtgttttaactgtccagtgtttggattttacctcttgatagctccatttgtccctggtgctgcttttaaggatgtagggccatgtgatcaggtatcaagttgagtaggtacgcagttggcctggtgatgtatctgtgcctgttttatcttctcccaggaagagctgctttggtatagttgtttacttggattcatacaaagaacagggcagcaatcttggaaagctttctgaagcttataagaacctgaaggggtttggagggggaacagtaacaaaaggctgcctttatgtctttggtcacaaagcacatagatgtatgttctgtaaagactaaagtgattgttataccagggcttcctgaccttcgggagagactcaaaaaagcagagaggagcacaaagtgaagttaatttggttggcttgctttatctggtttctcattttctttcaatttaaacctgaacataacacccttctccgatacctatccagcagactcctggttgggaagccctgtattaaattttgagaatgtacacagttttcttttgtacagtgctttacaactgctaaaagttaacttgtttaaagcaaaacaagaccttgaaaggtcaatcatattaaagctggtttgattattaatagttatcttttaggaagaagcttttttccctatgtaagatgtcatactgcagatttaaaatatagactatcaataaaatgcatgaagtgatcatttgtg

SEQ ID NO: 452844 - DNA, 1072 bp, Homo sapiens
cgattaagccattctactacactacacagataaaacggaagttataacatataaaccagtacctgcccacacccatagcagtgaggggaataaaaatcaaggttgcactgtaattccatgactctaaaaatcaagtctatttgacattggtttgaagcaacagaacctttatagcagattcccctttttaaagaaaaacccaaggagagactcaaaaaagcagagaggagcacaaagtgaagttaatttggttggcttgctttatctggtttctcattttctttcaatttaaacctgaacataacacccttctccgatacctatccagcagactcctggttgggaagccctgtattaaattttgagaatgtacacagttttcttttgtacagtgctttacaactgctaaaagttaacttgtttaaagcaaaacaagaccttgaaaggtcaatcatattaaagctggtttgattattaatagttatcttttaggaagaagcttttttccctatgtaagatgtcatactgcagatttaaaatatagactatcaataaaatgcatgaagtgatcatttgtgcttgatcatctctccttgggtttttctttaaaaaggggaatctgctataaaggttctgttgcttcaaaccaatgtcaaatagacttgatttttagagtcatggaattacagtgcaaccttgatttttattcccctcactgctatgagtgtgggcaggtactggtttatatgttataacttccgttttatctgtgttgtgtagttgaatggcttaatcgttgagtggtaaaataaaagattatattccaatacaagaatcctggaaagatttatgtgaatgacattttaagtaggcgcatctttgctgtttcttgtattctcgccattgctctgaccactcccttgcttgccctgtatatatacaaaaacttgtaggtgtgcacgtgtgcttgtacttctgtcttccatttctatcttaatctcttaaacatattgcttaagccactaagatgtccttgtttcaagtaaatcgtcacattgtgacacctggtgta

SEQ ID NO: 452845 - DNA, 786 bp, Homo sapiens
aggagtctgctggataggtatcggagaagggtgttatgttcaggtttaaattgaaagaaaatgagaaaccagataaagcaagccaaccaaattaacttcactttgtgctcctctctgcttttttgagcttgatcatctctccttgggtttttctttaaaaaggggaatctgctataaaggttctgttgcttcaaaccaatgtcaaatagacttgatttttagagtcatggaattacagtgcaaccttgatttttattcccctcactgctatgagtgtgggcaggtactggtttatatgttataacttccgttttatctgtgttgtgtagttgaatggcttaatcgttgagtggtaaaataaaagattatattccaatacaagaaaaaaaaaaaaaaaaaaaaaaaaaaaaaaaaaaaaaaaaaaaaaaaaaaaaaaaaaaaacaaaaaacaaaagaaaaaaaaacaaaaaaaaaaaaaaaaaaagcacatgggggggccgccgccaggacacaagaaactcacagcaacaacagaggggggcggcgcgccacaaaaagaagagaaacaaagagagaagaaaaaaggccgagaccaaaaaacacacagctgttgtggcgaaaaaagggggggaggagagaccccaccaagaaaaaaaaaaccggcggcggggagaaaaagaagagaggtagaaaaaaaacaacacagagagagtacgcgagggaacaaaacagggagggaataaagaggggagcaaacacagagaaacagaaaaaaaaaaacacccg

SEQ ID NO: 452846 - DNA, 651 bp, Homo sapiens
cttgaaaacacttaaatgtgtgtttccttgcaatataactttttctttttttatttaaataagtcttataaatgtgggaaaaaattatcttgtgttcctttaatttcatttttatttaatactattttcagaatgaacaaaagattgaaaaattatttagaatttttttctgtgctttttcctgtttcagataaaggagatgggtgagatgcatagggaactcaatgcataactatataatttgaagattatagaagaagggaaatagcaaatggacacaaattacaaatgtgtgtgcgtgggacgaagacatctttgaaggtcatgagtttgttagtttaacatcatatatttgtaatagtgaaacctgtactcaaaatataagcagcttgaaactggctttaccaatcttgaaatttgaccacaagtgtcttatatatgcagatctaatgtaaaatccagaacttggactccatcgttaaaattatttatgtgtaacattcaaatgtgtgcattaaatatgcttccacagtaaaatctgaaaaactgatttgtgattgaaagctgcctttctatttacttgagtcttgtacatacatacttttttatgagctatgaaataaaacattttaaactgaaatttcttaactt

SEQ ID NO: 452847 - DNA, 530 bp, Homo sapiens
cttgaaaacacttaaatgtgtgtttccttgcaatataactttttctttttttatttaaataagtcttataaatgtgggaaaaaattatcttgtgttcctttaatttcatttttatttaatactattttcagaatgaacaaaagattgaaaaattatttagaatttttttctgtgctttttcctgtttcagataaaggagatgggtgagatgcatagggaactcaatgcataactatataatttgaagattatagaagaagggaaatagcaaatggacacaaattacaaatgtgtgtgcgtgggacgaagacatctttgaaggtcatgagtttgttagtttaacatcatatatttgtaatagtgaaacctgtactcaaaatataagcagcttgaaactggctttaccaatcttgaaatttgaccacaagtgtcttatatatgcagatctaatgtaaaatccagaacttggactccatcgttaaaattatttatgtgtaacattcaaatgtgtgcattaaatatgcttccac

SEQ ID NO: 452848 - DNA, 175 bp, Homo sapiens
tcaatataagaaaatcctcttaggaaaaattgtacattgtaattatgtttggttgcatggctgtcttatttccctttgatagatttagagacctcccaaagatttcttgattagtgataaacttagttatccactaatggaaaggaacagtgatgcatgtagattatagaaaatc

SEQ ID NO: 452849 - DNA, 1981 bp, Homo sapiens
caaagagcaagagctgtagagtctagccctggggtgaggatgccacggctacccggctcctccacgttcctctatccagttcccgcacccttccccccaggccccattcttcaaggcttcagagcagcgctcctccggttaaaaggaagtctcagcacagaatcttcaaacctcctcggaggccaccaaagatccctaacgccgccatggagacgaagcacctggggcggggcggagcggggcgcgcgggcccacacctgtggagagggccgcgccccaactgcagcgccggggctgggggaggggagcctactcactcccccaactcccgggcggtgactcatcaacgagcaccagcggccagagcgtgagcagtcccgggaaggggccgagaggcggggccgccaggtcgggcaggtgtgcgctccgccccgccgcgcgcacagagcgctagtccttcggcgagcgagcaccttcgacgcggtccggggaccccctcgtcgctgtcctcccgacgcggacccgcgtgccccaggcctcgcgctgcccggccggctcctcgtgtcccactcccggcgcacgccctcccgcgcccctcttctcggcgcgcgcgcagcatggcgcccccgcaggtcctcgcgttcgggcttctgcttgccgcggcgacggcgacttttgccgcagctcaggaagaatgtgtctgtgaaaactacaagctggccgtaaactgctttgtgaataataatcgtcaatgccagtgtacttcagttggtgcacaaaatactgtcatttgctcaaagctggctgccaaatgtttggtgatgaaggcagaaatgaatggctcaaaacttgggagaagagcaaaacctgaaggggccctccagaacaatgatgggctttatgatcctgactgcgatgagagcgggctctttaaggccaagcagtgcaacggcacctccacgtgctggtgtgtgaacactgctggggtcagaagaacagacaaggacactgaaataacctgctctgagcgagtgagaacctactggatcatcattgaactaaaacacaaagcaagagaaaaaccttatgatagtaaaagtttgcggactgcacttcagaaggagatcacaacgcgttatcaactggatccaaaatttatcacgagtattttgtatgagaataatgttatcactattgatctggttcaaaattcttctcaaaaaactcagaatgatgtggacatagctgatgtggcttattattttgaaaaagatgttaaaggtgaatccttgtttcattctaagaaaatggacctgacagtaaatggggaacaactggatctggatcctggtcaaactttaatttattatgttgatgaaaaagcacctgaattctcaatgcagggtctaaaagctggtgttattgctgttattgtggttgtggtgatagcagttgttgctggaattgttgtgctggttatttccagaaagaagagaatggcaaagtatgagaaggctgagataaaggagatgggtgagatgcatagggaactcaatgcataactatataatttgaagattatagaagaagggaaatagcaaatggacacaaattacaaatgtgtgtgcgtgggacgaagacatctttgaaggtcatgagtttgttagtttaacatcatatatttgtaatagtgaaacctgtactcaaaatataagcagcttgaaactggctttaccaatcttgaaatttgaccacaagtgtcttatatatgcagatctaatgtaaaatccagaacttggactccatcgttaaaattatttatgtgtaacattcaaatgtgtgcattaaatatgcttccacagtaaaatctgaaaaactgatttgtgattgaaagctgcctttctatttacttgagtcttgtacatacatacttttttatgagctatgaaataaaacattttaaactgaaatttcttaactt

SEQ ID NO: 452850 - DNA, 2229 bp, Homo sapiens
caaagagcaagagctgtagagtctagccctggggtgaggatgccacggctacccggctcctccacgttcctctatccagttcccgcacccttccccccaggccccattcttcaaggcttcagagcagcgctcctccggttaaaaggaagtctcagcacagaatcttcaaacctcctcggaggccaccaaagatccctaacgccgccatggagacgaagcacctggggcggggcggagcggggcgcgcgggcccacacctgtggagagggccgcgccccaactgcagcgccggggctgggggaggggagcctactcactcccccaactcccgggcggtgactcatcaacgagcaccagcggccagagcgtgagcagtcccgggaaggggccgagaggcggggccgccaggtcgggcaggtgtgcgctccgccccgccgcgcgcacagagcgctagtccttcggcgagcgagcaccttcgacgcggtccggggaccccctcgtcgctgtcctcccgacgcggacccgcgtgccccaggcctcgcgctgcccggccggctcctcgtgtcccactcccggcgcacgccctcccgcgagtcccgggcccctcccgcgcccctcttctcggcgcgcgcgcagcatggcgcccccgcaggtcctcgcgttcgggcttctgcttgccgcggcgacggcgacttttgccgcagctcaggaaggtgaggcgcggattggagcaaagttgtggagctgggctgggctggggggcaacggcccccggccctcggcccccgaaacgggcataatagggaggggaccaagaggccgcgctttccagcgtggagaccggacggtgcggccgtgctccggctcaggccctccgcgcggtaggaaacggcgagggccgtcccggggagcagcctcacttcgcagctttgctcgccttgaatgtgtctgtgaaaactacaagctggccgtaaactgctttgtgaataataatcgtcaatgccagtgtacttcagttggtgcacaaaatactgtcatttgctcaaagctggctgccaaatgtttggtgatgaaggcagaaatgaatggctcaaaacttgggagaagagcaaaacctgaaggggccctccagaacaatgatgggctttatgatcctgactgcgatgagagcgggctctttaaggccaagcagtgcaacggcacctccacgtgctggtgtgtgaacactgctggggtcagaagaacagacaaggacactgaaataacctgctctgagcgagtgagaacctactggatcatcattgaactaaaacacaaagcaagagaaaaaccttatgatagtaaaagtttgcggactgcacttcagaaggagatcacaacgcgttatcaactggatccaaaatttatcacgagtattttgtatgagaataatgttatcactattgatctggttcaaaattcttctcaaaaaactcagaatgatgtggacatagctgatgtggcttattattttgaaaaagatgttaaaggtgaatccttgtttcattctaagaaaatggacctgacagtaaatggggaacaactggatctggatcctggtcaaactttaatttattatgttgatgaaaaagcacctgaattctcaatgcagggtctaaaagctggtgttattgctgttattgtggttgtggtgatagcagttgttgctggaattgttgtgctggttatttccagaaagaagagaatggcaaagtatgagaaggctgagataaaggagatgggtgagatgcatagggaactcaatgcataactatataatttgaagattatagaagaagggaaatagcaaatggacacaaattacaaatgtgtgtgcgtgggacgaagacatctttgaaggtcatgagtttgttagtttaacatcatatatttgtaatagtgaaacctgtactcaaaatataagcagcttgaaactggctttaccaatcttgaaatttgaccacaagtgtcttatatatgcagatctaatgtaaaatccagaacttggactccatcgttaaaattatttatgtgtaacattcaaatgtgtgcattaaatatgcttccacagtaaaatctgaaaaactgatttgtgattgaaagctgcctttctatttacttgagtcttgtacatacatacttttttatgagctatgaaataaaacattttaaactgaaatttcttaactt

SEQ ID NO: 452851 - DNA, 1654 bp, Homo sapiens
caaagagcaagagctgtagagtctagccctggggtgaggatgccacggctacccggctcctccacgttcctctatccagttcccgcacccttccccccaggccccattcttcaaggcttcagagcagcgctcctccggttaaaaggaagtctcagcacagaatcttcaaacctcctcggaggccaccaaagatccctaacgccgccatggagacgaagcacctggggcggggcggagcggggcgcgcgggcccacacctgtggagagggccgcgccccaactgcagcgccggggctgggggaggggagcctactcactcccccaactcccgggcggtgactcatcaacgagcaccagcggccagagaatgtgtctgtgaaaactacaagctggccgtaaactgctttgtgaataataatcgtcaatgccagtgtacttcagttggtgcacaaaatactgtcatttgctcaaagctggctgccaaatgtttggtgatgaaggcagaaatgaatggctcaaaacttgggagaagagcaaaacctgaaggggccctccagaacaatgatgggctttatgatcctgactgcgatgagagcgggctctttaaggccaagcagtgcaacggcacctccacgtgctggtgtgtgaacactgctggggtcagaagaacagacaaggacactgaaataacctgctctgagcgagtgagaacctactggatcatcattgaactaaaacacaaagcaagagaaaaaccttatgatagtaaaagtttgcggactgcacttcagaaggagatcacaacgcgttatcaactggatccaaaatttatcacgagtattttgtatgagaataatgttatcactattgatctggttcaaaattcttctcaaaaaactcagaatgatgtggacatagctgatgtggcttattattttgaaaaagatgttaaaggtgaatccttgtttcattctaagaaaatggacctgacagtaaatggggaacaactggatctggatcctggtcaaactttaatttattatgttgatgaaaaagcacctgaattctcaatgcagggtctaaaagctggtgttattgctgttattgtggttgtggtgatagcagttgttgctggaattgttgtgctggttatttccagaaagaagagaatggcaaagtatgagaaggctgagataaaggagatgggtgagatgcatagggaactcaatgcataactatataatttgaagattatagaagaagggaaatagcaaatggacacaaattacaaatgtgtgtgcgtgggacgaagacatctttgaaggtcatgagtttgttagtttaacatcatatatttgtaatagtgaaacctgtactcaaaatataagcagcttgaaactggctttaccaatcttgaaatttgaccacaagtgtcttatatatgcagatctaatgtaaaatccagaacttggactccatcgttaaaattatttatgtgtaacattcaaatgtgtgcattaaatatgcttccacagtaaaatctgaaaaactgatttgtgattgaaagctgcctttctatttacttgagtcttgtacatacatacttttttatgagctatgaaataaaacattttaaactgaaatttcttaactt

SEQ ID NO: 452852 - DNA, 1076 bp, Homo sapiens
ttgtcttttgtgtgatattatctaactgaaactgtgaattaactggttagggtctatgcattgctgttggacagtgaccattctcatatgggctttgcatagctcatccttttctcagggtgtgggtgatgaagtagctggatcatcattgaactaaaacacaaagcaagagaaaaaccttatgatagtaaaagtttgcggactgcacttcagaaggagatcacaacgcgttatcaactggatccaaaatttatcacgagtattttgtatgagaataatgttatcactattgatctggttcaaaattcttctcaaaaaactcagaatgatgtggacatagctgatgtggcttattattttgaaaaagatgttaaaggtgaatccttgtttcattctaagaaaatggacctgacagtaaatggggaacaactggatctggatcctggtcaaactttaatttattatgttgatgaaaaagcacctgaattctcaatgcagggtctaaaagctggtgttattgctgttattgtggttgtggtgatagcagttgttgctggaattgttgtgctggttatttccagaaagaagagaatggcaaagtatgagaaggctgagataaaggagatgggtgagatgcatagggaactcaatgcataactatataatttgaagattatagaagaagggaaatagcaaatggacacaaattacaaatgtgtgtgcgtgggacgaagacatctttgaaggtcatgagtttgttagtttaacatcatatatttgtaatagtgaaacctgtactcaaaatataagcagcttgaaactggctttaccaatcttgaaatttgaccacaagtgtcttatatatgcagatctaatgtaaaatccagaacttggactccatcgttaaaattatttatgtgtaacattcaaatgtgtgcattaaatatgcttccacagtaaaatctgaaaaactgatttgtgattgaaagctgcctttctatttacttgagtcttgtacatacatacttttttatgagctatgaaataaaacattttaaactgaaatttcttaactt

SEQ ID NO: 452853 - DNA, 980 bp, Homo sapiens
tgatatgtgaattccggatactagagtgtagtgagaacctactggatcatcattgaactaaaacacaaagcaagagaaaaaccttatgatagtaaaagtttgcggactgcacttcagaaggagatcacaacgcgttatcaactggatccaaaatttatcacgagtattttgtatgagaataatgttatcactattgatctggttcaaaattcttctcaaaaaactcagaatgatgtggacatagctgatgtggcttattattttgaaaaagatgttaaaggtgaatccttgtttcattctaagaaaatggacctgacagtaaatggggaacaactggatctggatcctggtcaaactttaatttattatgttgatgaaaaagcacctgaattctcaatgcagggtctaaaagctggtgttattgctgttattgtggttgtggtgatagcagttgttgctggaattgttgtgctggttatttccagaaagaagagaatggcaaagtatgagaaggctgagataaaggagatgggtgagatgcatagggaactcaatgcataactatataatttgaagattatagaagaagggaaatagcaaatggacacaaattacaaatgtgtgtgcgtgggacgaagacatctttgaaggtcatgagtttgttagtttaacatcatatatttgtaatagtgaaacctgtactcaaaatataagcagcttgaaactggctttaccaatcttgaaatttgaccacaagtgtcttatatatgcagatctaatgtaaaatccagaacttggactccatcgttaaaattatttatgtgtaacattcaaatgtgtgcattaaatatgcttccacagtaaaatctgaaaaactgatttgtgattgaaagctgcctttctatttacttgagtcttgtacatacatacttttttatgagctatgaaataaaacattttaaactgaaatttcttaactt

SEQ ID NO: 452854 - DNA, 807 bp, Homo sapiens
ccgggttgtactgcgattattgatcaaggcacaaatccgtctcagagacgcagagaatgatgtggacatagctgatgtggcttattattttgaaaaagatgttaaaggtgaatccttgtttcattctaagaaaatggacctgacagtaaatggggaacaactggatctggatcctggtcaaactttaatttattatgttgatgaaaaagcacctgaattctcaatgcagggtctaaaagctggtgttattgctgttattgtggttgtggtgatagcagttgttgctggaattgttgtgctggttatttccagaaagaagagaatggcaaagtatgagaaggctgagataaaggagatgggtgagatgcatagggaactcaatgcataactatataatttgaagattatagaagaagggaaatagcaaatggacacaaattacaaatgtgtgtgcgtgggacgaagacatctttgaaggtcatgagtttgttagtttaacatcatatatttgtaatagtgaaacctgtactcaaaatataagcagcttgaaactggctttaccaatcttgaaatttgaccacaagtgtcttatatatgcagatctaatgtaaaatccagaacttggactccatcgttaaaattatttatgtgtaacattcaaatgtgtgcattaaatatgcttccacagtaaaatctgaaaaactgatttgtgattgaaagctgcctttctatttacttgagtcttgtacatacatacttttttatgagctatgaaataaaacattttaaactgaaatttcttaactt

SEQ ID NO: 452855 - DNA, 885 bp, Homo sapiens
aacttcaatccgctataaagaactttaaaagagaaaatttcatctaaatatttcacacttaaaggaaagccttaccaactatggcaacaggtttggaccatgaaatagtactttcctagatgacatatcgagtcaacatgaagccttagctgatgtggcttattattttgaaaaagatgttaaaggtgaatccttgtttcattctaagaaaatggacctgacagtaaatggggaacaactggatctggatcctggtcaaactttaatttattatgttgatgaaaaagcacctgaattctcaatgcagggtctaaaagctggtgttattgctgttattgtggttgtggtgatagcagttgttgctggaattgttgtgctggttatttccagaaagaagagaatggcaaagtatgagaaggctgagataaaggagatgggtgagatgcatagggaactcaatgcataactatataatttgaagattatagaagaagggaaatagcaaatggacacaaattacaaatgtgtgtgcgtgggacgaagacatctttgaaggtcatgagtttgttagtttaacatcatatatttgtaatagtgaaacctgtactcaaaatataagcagcttgaaactggctttaccaatcttgaaatttgaccacaagtgtcttatatatgcagatctaatgtaaaatccagaacttggactccatcgttaaaattatttatgtgtaacattcaaatgtgtgcattaaatatgcttccacagtaaaatctgaaaaactgatttgtgattgaaagctgcctttctatttacttgagtcttgtacatacatacttttttatgagctatgaaataaaacattttaaactgaaatttcttaactt

SEQ ID NO: 452856 - DNA, 1964 bp, Homo sapiens
caaagagcaagagctgtagagtctagccctggggtgaggatgccacggctacccggctcctccacgttcctctatccagttcccgcacccttccccccaggccccattcttcaaggcttcagagcagcgctcctccggttaaaaggaagtctcagcacagaatcttcaaacctcctcggaggccaccaaagatccctaacgccgccatggagacgaagcacctggggcggggcggagcggggcgcgcgggcccacacctgtggagagggccgcgccccaactgcagcgccggggctgggggaggggagcctactcactcccccaactcccgggcggtgactcatcaacgagcaccagcggccagagcgtgagcagtcccgggaaggggccgagaggcggggccgccaggtcgggcaggtgtgcgctccgccccgccgcgcgcacagagcgctagtccttcggcgagcgagcaccttcgacgcggtccggggaccccctcgtcgctgtcctcccgacgcggacccgcgtgccccaggcctcgcgctgcccggccggctcctcgtgtcccactcccggcgcacgccctcccgcgagtcccgggcccctcccgcgcccctcttctcggcgcgcgcgcagcatggcgcccccgcaggtcctcgcgttcgggcttctgcttgccgcggcgacggcgacttttgccgcagctcaggaagaatgtgtctgtgaaaactacaagctggccgtaaactgctttgtgaataataatcgtcaatgccagtgtacttcagttggtgcacaaaatactgtcatttgctcaaagctggctgccaaatgtttggtgatgaaggcagaaatgaatggctcaaaacttgggagaagagcaaaacctgaaggggccctccagaacaatgatgggctttatgatcctgactgcgatgagagcgggctctttaaggccaagcagtgcaacggcacctccacgtgctggtgtgtgaacactgctggggtcagaagaacagacaaggacactgaaataacctgctctgagcgagtgagaacctactggatcatcattgaactaaaacacaaagcaagagaaaaaccttatgatagtaaaagtttgcggactgcacttcagaaggagatcacaacgcgttatcaactggatccaaaatttatcacgagtattttgtatgagaataatgttatcactattgatctggttcaaaattcttctcaaaaaactcagaatgatgtggacatagctgatgtggcttattattttgaaaaagatgttaaaggtgaatccttgtttcattctaagaaaatggacctgacagtaaatggggaacaactggatctggatcctggtcaaactttaatttattatgttgatgaaaaagcacctgaattctcaatgcagggtctaaaagctggtgttattgctgttattgtggttgtggtgatagcagttgttgctggaattgttgtgctggttatttccagaaagaagagaatggcaaagtatgagaaggctgagataaaggagatgggtgagatgcatagggaactcaatgcataactatataatttgaagattatagaagaagggaaatagcaaatggacacaaattacaaatgtgtgtgcgtgggacgaagacatctttgaaggtcatgagtttgttagtttaacatcatatatttgtaatagtgaaacctgtactcaaaatataagcagcttgaaactggctttaccaatcttgaaatttgaccacaagtgtcttatatatgcagatctaatgtaaaatccagaacttggactccatcgttaaaattatttatgtgtaacattcaaatgtgtgcattaaatatgcttccacggggaaaatttgggaaacctgagtatttttaaaataggattataaattttgtgccgggccggcaatttattatgttgttatgct

SEQ ID NO: 452857 - DNA, 2113 bp, Homo sapiens
  misc_feature (2111)..(2111): n is a, c, g, or t
caaagagcaagagctgtagagtctagccctggggtgaggatgccacggctacccggctcctccacgttcctctatccagttcccgcacccttccccccaggccccattcttcaaggcttcagagcagcgctcctccggttaaaaggaagtctcagcacagaatcttcaaacctcctcggaggccaccaaagatccctaacgccgccatggagacgaagcacctggggcggggcggagcggggcgcgcgggcccacacctgtggagagggccgcgccccaactgcagcgccggggctgggggaggggagcctactcactcccccaactcccgggcggtgactcatcaacgagcaccagcggccagagcgtgagcagtcccgggaaggggccgagaggcggggccgccaggtcgggcaggtgtgcgctccgccccgccgcgcgcacagagcgctagtccttcggcgagcgagcaccttcgacgcggtccggggaccccctcgtcgctgtcctcccgacgcggacccgcgtgccccaggcctcgcgctgcccggccggctcctcgtgtcccactcccggcgcacgccctcccgcgagtcccgggcccctcccgcgcccctcttctcggcgcgcgcgcagcatggcgcccccgcaggtcctcgcgttcgggcttctgcttgccgcggcgacggcgacttttgccgcagctcaggaagaatgtgtctgtgaaaactacaagctggccgtaaactgctttgtgaataataatcgtcaatgccagtgtacttcagttggtgcacaaaatactgtcatttgctcaaagctggctgccaaatgtttggtgatgaaggcagaaatgaatggctcaaaacttgggagaagagcaaaacctgaaggggccctccagaacaatgatgggctttatgatcctgactgcgatgagagcgggctctttaaggccaagcagtgcaacggcacctccacgtgctggtgtgtgaacactgctggggtcagaagaacagacaaggacactgaaataacctgctctgagcgagtgagaacctactggatcatcattgaactaaaacacaaagcaagagaaaaaccttatgatagtaaaagtttgcggactgcacttcagaaggagatcacaacgcgttatcaactggatccaaaatttatcacgagtattttgtatgagaataatgttatcactattgatctggttcaaaattcttctcaaaaaactcagaatgatgtggacatagctgatgtggcttattattttgaaaaagatgttaaaggtgaatccttgtttcattctaagaaaatggacctgacagtaaatggggaacaactggatctggatcctggtcaaactttaatttattatgttgatgaaaaagcacctgaattctcaatgcagggtctaaaagctggtgttattgctgttattgtggttgtggtgatagcagttgttgctggaattgttgtgctggttatttccagaaagaagagaatggcaaagtatgagaaggctgagataaaggagatgggtgagatgcatagggaactcaatgcataactatataatttgaagattatagaagaagggaaatagcaaatggacacaaattacaaatgtgtgtgcgtgggacgaagacatctttgaaggtcatgagtttgttagtttaacatcatatatttgtaatagtgaaacctgtactcaaaatataagcagcttgaaactggctttaccaatcttgaaatttgaccacaagtgtcttatatatgcagatctaatgtaaaatccagaacttggactccatcgttaaaattatttatgtttatggtaatgtaagtattgtgttactaaaccttactggaagaaaagaaaatgttatcacccccagacatgttataatgtagggcagaactcaaagggaatgggacattccctttgatgaatggttcttttaatgagatttttcatgatttaagtcattttaggatgattttaacgtcttccttctagtagtgtagaatcttcatatgagtagaccccaggagagcctgattctaatcagtcttatggaaaggctgagaatcctgtngt

SEQ ID NO: 452858 - DNA, 1640 bp, Homo sapiens
caaagagcaagagctgtagagtctagccctggggtgaggatgccacggctacccggctcctccacgttcctctatccagttcccgcacccttccccccaggccccattcttcaaggcttcagagcagcgctcctccggttaaaaggaagtctcagcacagaatcttcaaacctcctcggaggccaccaaagatccctaacgccgccatggagacgaagcacctggggcggggcggagcggggcgcgcgggcccacacctgtggagagggccgcgccccaactgcagcgccggggctgggggaggggagcctactcactcccccaactcccgggcggtgactcatcaacgagcaccagcggccagagcgtgagcagtcccgggaaggggccgagaggcggggccgccaggtcgggcaggtgtgcgctccgccccgccgcgcgcacagagcgctagtccttcggcgagcgagcaccttcgacgcggtccggggaccccctcgtcgctgtcctcccgacgcggacccgcgtgccccaggcctcgcgctgcccggccggctcctcgtgtcccactcccggcgcacgccctcccgcgagtcccgggcccctcccgcgcccctcttctcggcgcgcgcgcagcatggcgcccccgcaggtcctcgcgttcgggcttctgcttgccgcggcgacggcgacttttgccgcagctcaggaagaatgtgtctgtgaaaactacaagctggccgtaaactgctttgtgaataataatcgtcaatgccagtgtacttcagttggtgcacaaaatactgtcatttgctcaaagctggctgccaaatgtttggtgatgaaggcagaaatgaatggctcaaaacttgggagaagagcaaaacctgaaggggccctccagaacaatgatgggctttatgatcctgactgcgatgagagcgggctctttaaggccaagcagtgcaacggcacctccacgtgctggtgtgtgaacactgctggggtcagaagaacagacaaggacactgaaataacctgctctgagcgagtgagaacctactggatcatcattgaactaaaacacaaagcaagagaaaaaccttatgatagtaaaagtttgcggactgcacttcagaaggagatcacaacgcgttatcaactggatccaaaatttatcacgagtattttgtatgagaataatgttatcactattgatctggttcaaaattcttctcaaaaaactcagaatgatgtggacatagctgatgtggcttattattttgaaaaagatgttaaaggtgaatccttgtttcattctaagaaaatggacctgacagtaaatggggaacaactggatctggatcctggtcaaactttaatttattatgttgatgaaaaagcacctgaattctcaatgcagggtctaaaagctggtgttattgctgttattgtggttgtggtgatagcagttgttgctggaattgttgtgctggttatttccagaaagaagagaatggcaaagtatgagaaggctgagataaaggagatgggtgagatgcatagggaactcaatgcataactatataatttgaagattatagaagtgcagaaaccagaccgggtcctctagatcagcc

SEQ ID NO: 452859 - DNA, 1341 bp, Homo sapiens
  misc_feature (1326)..(1326): n is a, c, g, or t
caaagagcaagagctgtagagtctagccctggggtgaggatgccacggctacccggctcctccacgttcctctatccagttcccgcacccttccccccaggccccattcttcaaggcttcagagcagcgctcctccggttaaaaggaagtctcagcacagaatcttcaaacctcctcggaggccaccaaagatccctaacgccgccatggagacgaagcacctggggcggggcggagcggggcgcgcgggcccacacctgtggagagggccgcgccccaactgcagcgccggggctgggggaggggagcctactcactcccccaactcccgggcggtgactcatcaacgagcaccagcggccagagcgtgagcagtcccgggaaggggccgagaggcggggccgccaggtcgggcaggtgtgcgctccgccccgccgcgcgcacagagcgctagtccttcggcgagcgagcaccttcgacgcggtccggggaccccctcgtcgctgtcctcccgacgcggacccgcgtgccccaggcctcgcgctgcccggccggctcctcgtgtcccactcccggcgcacgccctcccgcgagtcccgggcccctcccgcgcccctcttctcggcgcgcgcgcagcatggcgcccccgcaggtcctcgcgttcgggcttctgcttgccgcggcgacggcgacttttgccgcagctcaggaagaatgtgtctgtgaaaactacaagctggccgtaaactgctttgtgaataataatcgtcaatgccagtgtacttcagttggtgcacaaaatactgtcatttgctcaaagctggctgccaaatgtttggtgatgaaggcagaaatgaatggctcaaaacttgggagaagagcaaaacctgaaggggccctccagaacaatgatgggctttatgatcctgactgcgatgagagcgggctctttaaggccaagcagtgcaacggcacctccacgtgctggtgtgtgaacactgctggggtcagaagaacagacaaggacactgaaataacctgctctgagcgagtgagaacctactggatcatcattgaactaaaacacaaagcaagagaaaaaccttatgatagtaaaagtttgcggactgcacttcagaaggagatcacaacgcgttatcaactggatccaaaatttatcacgagtattttgtatgagaataatgttatcactattgatctggttcaaaattcttctcaaaaaactcagaatgatgtggacatagctgatgtggcttattattttgaaaaagataactggagctgttgtaactagagctgttgtanctggagctgttgtaa

SEQ ID NO: 452860 - DNA, 1315 bp, Homo sapiens
caaagagcaagagctgtagagtctagccctggggtgaggatgccacggctacccggctcctccacgttcctctatccagttcccgcacccttccccccaggccccattcttcaaggcttcagagcagcgctcctccggttaaaaggaagtctcagcacagaatcttcaaacctcctcggaggccaccaaagatccctaacgccgccatggagacgaagcacctggggcggggcggagcggggcgcgcgggcccacacctgtggagagggccgcgccccaactgcagcgccggggctgggggaggggagcctactcactcccccaactcccgggcggtgactcatcaacgagcaccagcggccagagcgtgagcagtcccgggaaggggccgagaggcggggccgccaggtcgggcaggtgtgcgctccgccccgccgcgcgcacagagcgctagtccttcggcgagcgagcaccttcgacgcggtccggggaccccctcgtcgctgtcctcccgacgcggacccgcgtgccccaggcctcgcgctgcccggccggctcctcgtgtcccactcccggcgcacgccctcccgcgagtcccgggcccctcccgcgcccctcttctcggcgcgcgcgcagcatggcgcccccgcaggtcctcgcgttcgggcttctgcttgccgcggcgacggcgacttttgccgcagctcaggaagaatgtgtctgtgaaaactacaagctggccgtaaactgctttgtgaataataatcgtcaatgccagtgtacttcagttggtgcacaaaatactgtcatttgctcaaagctggctgccaaatgtttggtgatgaaggcagaaatgaatggctcaaaacttgggagaagagcaaaacctgaaggggccctccagaacaatgatgggctttatgatcctgactgcgatgagagcgggctctttaaggccaagcagtgcaacggcacctccacgtgctggtgtgtgaacactgctggggtcagaagaacagacaaggacactgaaataacctgctctgagcgagtgagaacctactggatcatcattgaactaaaacacaaagcaagagaaaaaccttatgatagtaaaagtttgcggactgcacttcagcttgagacacggatgtccaccacctcacagctggaggaagctgagcataaggttcagagcctacaaacagccctggaaaaaaactcgaccagaattctttgacctgaaaaccaaatacgatgaagaaactactgcaaaggccgacgagattgaaatgatcatgacggaccttgacag

SEQ ID NO: 452861 - DNA, 420 bp, Homo sapiens
tgatagatttagagacctcccaaagatttcttgattagtgataaacttagttatccactaatggaaaggaacagtgatgcatgtagattatagaaaatcaaacactgaatattctgattctcaattaatgttattttcaaatgattttgattatattagtattaatttgtattattcaatttttttccccagtatgagaataatgttatcactattgatctggttcaaaattcttctcaaaaaactcagaatgatgtggacatagctgatgtggcttattattttgaaaaagataagatgtgagtatcatcttctttattcctgtgttcaggaatgtagtctatcatgcctcaatgaattaaatatatttcatcacctttttatccacttacagatcaaccaaatggttcgctgctgccg

SEQ ID NO: 452862 - DNA, 2001 bp, Homo sapiens
caaagagcaagagctgtagagtctagccctggggtgaggatgccacggctacccggctcctccacgttcctctatccagttcccgcacccttccccccaggccccattcttcaaggcttcagagcagcgctcctccggttaaaaggaagtctcagcacagaatcttcaaacctcctcggaggccaccaaagatccctaacgccgccatggagacgaagcacctggggcggggcggagcggggcgcgcgggcccacacctgtggagagggccgcgccccaactgcagcgccggggctgggggaggggagcctactcactcccccaactcccgggcggtgactcatcaacgagcaccagcggccagagcgtgagcagtcccgggaaggggccgagaggcggggccgccaggtcgggcaggtgtgcgctccgccccgccgcgcgcacagagcgctagtccttcggcgagcgagcaccttcgacgcggtccggggaccccctcgtcgctgtcctcccgacgcggacccgcgtgccccaggcctcgcgctgcccggccggctcctcgtgtcccactcccggcgcacgccctcccgcgagtcccgggcccctcccgcgcccctcttctcggcgcgcgcgcagcatggcgcccccgcaggtcctcgcgttcgggcttctgcttgccgcggcgacggcgacttttgccgcagctcaggaagaatgtgtctgtgaaaactacaagctggccgtaaactgctttgtgaataataatcgtcaatgccagtgtacttcagttggtgcacaaaatactgtcatttgctcaaagctggctgccaaatgtttggtgatgaaggcagaaatgaatggctcaaaacttgggagaagagcaaaacctgaaggggccctccagaacaatgatgggctttatgatcctgactgcgatgagagcgggctctttaaggccaagcagtgcaacggcacctccacgtgctggtgtgtgaacactgctggggtcagaagaacagacaaggacactgaaataacctgctctgagcgagtgagaacctactggatcatcattgaactaaaacacaaagcaagagaaaaaccttatgatagtaaaagtttgcggactgcacttcagaaggagatcacaacgcgttatcaactggatccaaaatttatcacgagtattttgtatgagaataatgttatcactattgatctggttcaaaattcttctcaaaaaactcagaatgatgtggacatagctgatgtggcttattattttgaaaaagatgttaaaggtgaatccttgtttcattctaagaaaatggacctgacagtaaatggggaacaactggatctggatcctggtcaaactttaatttattatgttgatgaaaaagcacctgaattctcaatgcagggtctaaaagctggtgttattgctgttattgtggttgtggtgatagcagttgttgctggaattgttgtgctggttatttccagaaagaagagaatggcaaagtatgagaaggctgagataaaggagatgggtgagatgcatagggaactcaatgcataactatataatttgaagattatagaagaagggaaatagcaaatggacacaaattacaaatgtgtgtgcgtgggacgaagacatctttgaaggtcatgagtttgttagtttaacatcatatatttgtaatagtgaaacctgtactcaaaatataagcagcttgaaactggctttaccaatcttgaaatttgaccacaagtgtcttatatatgcagatctaatgtaaaatccagaacttggactccatcgttaaaattatttatgtgtaacattcaaatgtgtgcattaaatatgcttccacagtaaaatctgaaaaactgatttgtgattgaaagctgcctttctatttacttgagtcttgtacatacatacttttttatgagctatgaaataaaacattttaaactgaaatttcttaactt

SEQ ID NO: 452863 - DNA, 1880 bp, Homo sapiens
caaagagcaagagctgtagagtctagccctggggtgaggatgccacggctacccggctcctccacgttcctctatccagttcccgcacccttccccccaggccccattcttcaaggcttcagagcagcgctcctccggttaaaaggaagtctcagcacagaatcttcaaacctcctcggaggccaccaaagatccctaacgccgccatggagacgaagcacctggggcggggcggagcggggcgcgcgggcccacacctgtggagagggccgcgccccaactgcagcgccggggctgggggaggggagcctactcactcccccaactcccgggcggtgactcatcaacgagcaccagcggccagagcgtgagcagtcccgggaaggggccgagaggcggggccgccaggtcgggcaggtgtgcgctccgccccgccgcgcgcacagagcgctagtccttcggcgagcgagcaccttcgacgcggtccggggaccccctcgtcgctgtcctcccgacgcggacccgcgtgccccaggcctcgcgctgcccggccggctcctcgtgtcccactcccggcgcacgccctcccgcgagtcccgggcccctcccgcgcccctcttctcggcgcgcgcgcagcatggcgcccccgcaggtcctcgcgttcgggcttctgcttgccgcggcgacggcgacttttgccgcagctcaggaagaatgtgtctgtgaaaactacaagctggccgtaaactgctttgtgaataataatcgtcaatgccagtgtacttcagttggtgcacaaaatactgtcatttgctcaaagctggctgccaaatgtttggtgatgaaggcagaaatgaatggctcaaaacttgggagaagagcaaaacctgaaggggccctccagaacaatgatgggctttatgatcctgactgcgatgagagcgggctctttaaggccaagcagtgcaacggcacctccacgtgctggtgtgtgaacactgctggggtcagaagaacagacaaggacactgaaataacctgctctgagcgagtgagaacctactggatcatcattgaactaaaacacaaagcaagagaaaaaccttatgatagtaaaagtttgcggactgcacttcagaaggagatcacaacgcgttatcaactggatccaaaatttatcacgagtattttgtatgagaataatgttatcactattgatctggttcaaaattcttctcaaaaaactcagaatgatgtggacatagctgatgtggcttattattttgaaaaagatgttaaaggtgaatccttgtttcattctaagaaaatggacctgacagtaaatggggaacaactggatctggatcctggtcaaactttaatttattatgttgatgaaaaagcacctgaattctcaatgcagggtctaaaagctggtgttattgctgttattgtggttgtggtgatagcagttgttgctggaattgttgtgctggttatttccagaaagaagagaatggcaaagtatgagaaggctgagataaaggagatgggtgagatgcatagggaactcaatgcataactatataatttgaagattatagaagaagggaaatagcaaatggacacaaattacaaatgtgtgtgcgtgggacgaagacatctttgaaggtcatgagtttgttagtttaacatcatatatttgtaatagtgaaacctgtactcaaaatataagcagcttgaaactggctttaccaatcttgaaatttgaccacaagtgtcttatatatgcagatctaatgtaaaatccagaacttggactccatcgttaaaattatttatgtgtaacattcaaatgtgtgcattaaatatgcttccac

SEQ ID NO: 452864 - DNA, 1239 bp, Homo sapiens
gaatcgagctcggtaccgaatctcatagttgtgccaaaatactgtcatttggtcaaagctggctgccaaatgtttggtgatgaaggcagaaatgaatggctcaaaacttgggagaagagcaaaacctgaaggggccctccagaacaatgatgggctttatgatcctgactgcgatgagagcgggctctttaaggccaagcagtgcaacggcacctccacgtgctggtgtgtgaacactgctggggtcagaagaacagacaaggacactgaaataacctgctctgagcgagtgagaacctactggatcatcattgaactaaaacacaaagcaagagaaaaaccttatgatagtaaaagtttgcggactgcacttcagaaggagatcacaacgcgttatcaactggatccaaaatttatcacgagtattttgtatgagaataatgttatcactattgatctggttcaaaattcttctcaaaaaactcagaatgatgtggacatagctgatgtggcttattattttgaaaaagatgttaaaggtgaatccttgtttcattctaagaaaatggacctgacagtaaatggggaacaactggatctggatcctggtcaaactttaatttattatgttgatgaaaaagcacctgaattctcaatgcagggtctaaaagctggtgttattgctgttattgtggttgtggtgatagcagttgttgctggaattgttgtgctggttatttccagaaagaagagaatggcaaagtatgagaaggctgagataaaggagatgggtgagatgcatagggaactcaatgcataactatataatttgaagattatagaagaagggaaatagcaaatggacacaaattacaaatgtgtgtgcgtgggacgaagacatctttgaaggtcatgagtttgttagtttaacatcatatatttgtaatagtgaaacctgtactcaaaatataagcagcttgaaactggctttaccaatcttgaaatttgaccacaagtgtcttatatatgcagatctaatgtaaaatccagaacttggactccatcgttaaaattatttatgtgtaacattcaaatgtgtgcattaaatatgcttccacagtaaaatctgaaaaactgatttgtgattgaaagctgcctttctatttacttgagtcttgtacatacatacttttttatgagctatgaaataaaacattttaaactgaaatttcttaactt

SEQ ID NO: 452865 - DNA, 2299 bp, Homo sapiens
caaagagcaagagctgtagagtctagccctggggtgaggatgccacggctacccggctcctccacgttcctctatccagttcccgcacccttccccccaggccccattcttcaaggcttcagagcagcgctcctccggttaaaaggaagtctcagcacagaatcttcaaacctcctcggaggccaccaaagatccctaacgccgccatggagacgaagcacctggggcggggcggagcggggcgcgcgggcccacacctgtggagagggccgcgccccaactgcagcgccggggctgggggaggggagcctactcactcccccaactcccgggcggtgactcatcaacgagcaccagcggccagagcgtgagcagtcccgggaaggggccgagaggcggggccgccaggtcgggcaggtgtgcgctccgccccgccgcgcgcacagagcgctagtccttcggcgagcgagcaccttcgacgcggtccggggaccccctcgtcgctgtcctcccgacgcggacccgcgtgccccaggcctcgcgctgcccggccggctcctcgtgtcccactcccggcgcacgccctcccgcgagtcccgggcccctcccgcgcccctcttctcggcgcgcgcgcagcatggcgcccccgcaggtcctcgcgttcgggcttctgcttgccgcggcgacggcgacttttgccgcagctcaggaagaatgtgtctgtgaaaactacaagctggccgtaaactgctttgtgaataataatcgtcaatgccagtgtacttcagttggtgcacaaaatactgtcatttgctcaaagctggctgccaaatgtttggtgatgaaggcagaaatgaatggctcaaaacttgggagaagagcaaaacctgaaggggccctccagaacaatgatgggctttatgatcctgactgcgatgagagcgggctctttaaggccaagcagtgcaacggcacctccacgtgctggtgtgtgaacactgctggggtcagaagaacagacaaggacactgaaataacctgctctgagcgagtgagaacctactggatcatcattgaactaaaacacaaagcaagagaaaaaccttatgatagtaaaagtttgcggactgcacttcagaaggagatcacaacgcgttatcaactggatccaaaatttatcacgagtattttgtatgagaataatgttatcactattgatctggttcaaaattcttctcaaaaaactcagaatgatgtggacatagctgatgtggcttattattttgaaaaagatgttaaaggtgaatccttgtttcattctaagaaaatggacctgacagtaaatggggaacaactggatctggatcctggtcaaactttaatttattatgttgatgaaaaagcacctgaattctcaatgcagggtctaaaagctggtgttattgctgttattgtggttgtggtgatagcagttgttgctggaattgttgtgctggttatttccagaaagaagagaatggcaaagtatgagaaggctgagataaaggagatgggtgagatgcatagggaactcaatgcataactatataatttgaagattatagaagaagggaaatagcaaatggacacaaattacaaatgtgtgtgcgtgggacgaagacatctttgaaggtcatgagtttgttagtttaacatcatatatttgtaatagtgaaacctgtactcaaaatataagcagcttgaaactggctttaccaatcttgaaatttgaccacaagtgtcttatatatgcagatctaatgtaaaatccagaacttggactccatcgttaaaattatttatgtgtaacattcaaatgtgtgcattaaatatgcttccacagtaaaatctgaaaaactgatttgtgattgaaagctgcctttctatttacttgagtcttgtacatacatacttttttatgagctatgaaataaaacattttaaactgaaatttcttaacttggaaaaaaaaaaaaaagaaccatcaacgcgccccttactcaacagagacgacaccacacaggaaaaaccacagaggggcgcacccaatcccccgagaaaagctgtcgacaaccacaatgtgggggcagcgcccccaacaagtgacgaacagtggcacgaagacaccgaaaaagagggcggcgcgacgcggggtcaccccataaaaaacgccgggcgccgcgtcgaaaaaaccagggattcggaccgagcacacggggcagactaaagcccgacggggagaaaagagagggccgcacac

SEQ ID NO: 452866 - DNA, 856 bp, Homo sapiens
gtcggagtcacgccatgtcacaacacgctcctgcatgtgcaggcttcttcatgtactcctccttctggttttctccgcagctagcctgggggccggggtcttctcctccgaggttgctggctgcagtggcttattattttgaaaaagatgttaaaggtgaatccttgtttcattctaagaaaatggacctgacagtaaatggggaacaactggatctggatcctggtcaaactttaatttattatgttgatgaaaaagcacctgaattctcaatgcagggtctaaaagctggtgttattgctgttattgtggttgtggtgatagcagttgttgctggaattgttgtgctggttatttccagaaagaagagaatggcaaagtatgagaaggctgagataaaggagatgggtgagatgcatagggaactcaatgcataactatataatttgaagattatagaagaagggaaatagcaaatggacacaaattacaaatgtgtgtgcgtgggacgaagacatctttgaaggtcatgagtttgttagtttaacatcatatatttgtaatagtgaaacctgtactcaaaatataagcagcttgaaactggctttaccaatcttgaaatttgaccacaagtgtcttatatatgcagatctaatgtaaaatccagaacttggactccatcgttaaaattatttatgtgtaacattcaaatgtgtgcattaaatatgcttccacagtaaaatctgaaaaactgatttgtgattgaaagctgcctttctatttacttgagtcttgtacatacatacttttttatgagctatgaaataaaacattttaaactgaaatttcttaactt

SEQ ID NO: 452867 - DNA, 1530 bp, Homo sapiens
caaagagcaagagctgtagagtctagccctggggtgaggatgccacggctacccggctcctccacgttcctctatccagttcccgcacccttccccccaggccccattcttcaaggcttcagagcagcgctcctccggttaaaaggaagtctcagcacagaatcttcaaacctcctcggaggccaccaaagatccctaacgccgccatggagacgaagcacctggggcggggcggagcggggcgcgcgggcccacacctgtggagagggccgcgccccaactgcagcgccggggctgggggaggggagcctactcactcccccaactcccgggcggtgactcatcaacgagcaccagcggccagagcgtgagcagtcccgggaaggggccgagaggcggggccgccaggtcgggcaggtgtgcgctccgccccgccgcgcgcacagagcgctagtccttcggcgagcgagcaccttcgacgcggtccggggaccccctcgtcgctgtcctcccgacgcggacccgcgtgccccaggcctcgcgctgcccggccggctcctcgtgtcccactcccggcgcacgccctcccgcgagtcccgggcccctcccgcgcccctcttctcggcgcgcgcgcagcatggcgcccccgcaggtcctcgcgttcgggcttctgcttgccgcggcgacggcgacttttgccgcagctcaggaagaatgtgtctgtgaaaactacaagctggccgtaaactgctttgtgaataataatcgtcaatgccagtgtacttcagttggtgcacaaaatactgtcatttgctcaaagctggctgccaaatgtttggtgatgaaggcagaaatgaatggctcaaaacttgggagaagagcaaaacctgaaggggccctccagaacaatgatgggctttatgatcctgactgcgatgagagcgggctctttaaggccaagcagtgcaacggcacctccacgtgctggtgtgtgaacactgctggggtcagaagaacagacaaggacactgaaataacctgctctgagcgagtgagaacctactggatcatcattgaactaaaacacaaagcaagagaaaaaccttatgatagtaaaagtttgcggactgcacttcagaaggagatcacaacgcgttatcaactggatccaaaatttatcacgagtattttgtatgagaataatgttatcactattgatctggttcaaaattcttctcaaaaaactcagaatgatgtggacatagctgatgtggcttattattttgaaaaagatgttaaaggtgaatccttgtttcattctaagaaaatggacctgacagtaaatggggaacaactggatctggatcctggtcaaactagacacaggctcaagaaggaagaagcccaattgtgcttaagaagttggggacagaggacgaaaatgggaactggtcaagcccagaggcggcactgtcagcccaggtgaaggacactagggagagacagtcatgctgactcacagaccatctg

SEQ ID NO: 452868 - DNA, 1385 bp, Homo sapiens
caaagagcaagagctgtagagtctagccctggggtgaggatgccacggctacccggctcctccacgttcctctatccagttcccgcacccttccccccaggccccattcttcaaggcttcagagcagcgctcctccggttaaaaggaagtctcagcacagaatcttcaaacctcctcggaggccaccaaagatccctaacgccgccatggagacgaagcacctggggcggggcggagcggggcgcgcgggcccacacctgtggagagggccgcgccccaactgcagcgccggggctgggggaggggagcctactcactcccccaactcccgggcggtgactcatcaacgagcaccagcggccagagcgtgagcagtcccgggaaggggccgagaggcggggccgccaggtcgggcaggtgtgcgctccgccccgccgcgcgcacagagcgctagtccttcggcgagcgagcaccttcgacgcggtccggggaccccctcgtcgctgtcctcccgacgcggacccgcgtgccccaggcctcgcgctgcccggccggctcctcgtgtcccactcccggcgcacgccctcccgcgagtcccgggcccctcccgcgcccctcttctcggcgcgcgcgcagcatggcgcccccgcaggtcctcgcgttcgggcttctgcttgccgcggcgacggcgacttttgccgcagctcaggaagaatgtgtctgtgaaaactacaagctggccgtaaactgctttgtgaataataatcgtcaatgccagtgtacttcagttggtgcacaaaatactgtcatttgctcaaagctggctgccaaatgtttggtgatgaaggcagaaatgaatggctcaaaacttgggagaagagcaaaacctgaaggggccctccagaacaatgatgggctttatgatcctgactgcgatgagagcgggctctttaaggccaagcagtgcaacggcacctccacgtgctggtgtgtgaacactgctggggtcagaagaacagacaaggacactgaaataacctgctctgagcgagtgagaacctactggatcatcattgaactaaaacacaaagcaagagaaaaaccttatgatagtaaaagtttgcggactgcacttcagaaggagatcacaacgcgttatcaactggatccaaaatttatcacgagtattttgtatgagaataatgttatcactattgatctggttcaaaattcttctcaaaaaactcagaatgatgtggacatagctgatgtggcttattattttgaaaaagatatcactaagactagtgtacagatgcatccttcctgtctgtctaacgacatcgcaccggaccgtaattcgagggtacatactcggtctccgt

SEQ ID NO: 452869 - DNA, 1060 bp, Homo sapiens
  misc_feature (1038)..(1038): n is a, c, g, or t
caaagagcaagagctgtagagtctagccctggggtgaggatgccacggctacccggctcctccacgttcctctatccagttcccgcacccttccccccaggccccattcttcaaggcttcagagcagcgctcctccggttaaaaggaagtctcagcacagaatcttcaaacctcctcggaggccaccaaagatccctaacgccgccatggagacgaagcacctggggcggggcggagcggggcgcgcgggcccacacctgtggagagggccgcgccccaactgcagcgccggggctgggggaggggagcctactcactcccccaactcccgggcggtgactcatcaacgagcaccagcggccagagcgtgagcagtcccgggaaggggccgagaggcggggccgccaggtcgggcaggtgtgcgctccgccccgccgcgcgcacagagcgctagtccttcggcgagcgagcaccttcgacgcggtccggggaccccctcgtcgctgtcctcccgacgcggacccgcgtgccccaggcctcgcgctgcccggccggctcctcgtgtcccactcccggcgcacgccctcccgcgagtcccgggcccctcccgcgcccctcttctcggcgcgcgcgcagcatggcgcccccgcaggtcctcgcgttcgggcttctgcttgccgcggcgacggcgacttttgccgcagctcaggaagaatgtgtctgtgaaaactacaagctggccgtaaactgctttgtgaataataatcgtcaatgccagtgtacttcagttggtgcacaaaatactgtcatttgctcaaagctggctgccaaatgtttggtgatgaaggcagaaatgaatggctcaaaacttgggagaagagcaaaacctgaaggggccctccagaacaatgatgggctttatgatcctgactgcgatgagagcgggctctttaaggccaagcagtgcaacggcacctccacgtgctggtgtgtgaacactgctggggtcagaagaacagacaaggacactttgcatcnagaggacactttgcatccagag

SEQ ID NO: 452870 - DNA, 2657 bp, Homo sapiens
tgctcatgctgcctgccacagtgctgctctatcgcaagctgggcatcatcctcatgatggtcaaatgcgtcagttgtggctttgccagcttcttcttccaatctctctgctgtttcttcgggccagagaagaactgtgggcagatcctctggccctgtgcccacctgccatgggatgctggtactggggaccctggtggggagaaggcaggccgcccacgaccagggtcagtgggagggatgcccgggtcctgctcagagcaatatgagctacagcccctggcacggcgtcggagccccagctttgacaccagcacagccaccagcaagctgtcccaccggccctcagcactctctgaggatctgcagctccatgatggtccgtgctgttcccggcccccaccagcccctgcctccccaagggagctgctgctggaccaccaggcagtcttcagccagtgccctgccctgcagacctcctccccctataagcaggctggccccagccccaaaacccgggccaggcaggactcccaaggggaggaggctgagcccctgccagcctcaccagaagccccagcccactctcctaaggccaaggctgcagatcctcctgatggcttctgttcctcagccagcaccctggaggggctcagcgtctctgatgagacctgcctaagcacctctgagcccagtgcccgtgtaccagattccgtgggtgtgtccccagatgacctggatgacactgggcagccagtccttgagcgaggccagctcaatgggaagcgggacaccctgtggctggcgctgagggagacagtgtatgacccatcattgcccgcttcccatcacagcagcttgtcctggaagggccgaggggggccaggggatggcagccctgtggtgctgcccaatagccagccagacctgccagatgtttggctgcgcaggcccagcactcacacatcaggctatagcagctgagggggacccggggaggctggacagggcgcggaaccctgtcatggatgacaaggcaagggcagcaataggctggagcccgaaggtatttctccagatccacagggagaggtctcaccctccagctgtggatgttaaaccctgccagatgtcccagccttgatctgtctgctcctactcctcacatctggaggattccagcaggaggggttttggaggggacctgcttgcgacctgctgagggcttgtctgctcccacagcaccatctaagacccctcctctagaagtggggaaggccagatgtgtagcttcgggtatcagaggaggctgacctggcccccatcccaagttacaagaacttcagtgagactaagggacccccatcctagggatcttgtcagggttccttactgaccagaggagcccgcagcaatctccacagcctcctgggtctcacccctttcatgggctcttcatcaggacacttccctctcttttgggagcttctctgggcagaattgggctgggacctctctccccaactgccctgctctcctcatactcaccggtttgaccagaaattgtccaaatccagccatagatggctgctgggtgtgcagcaggagaaggaggatggtcagccttggagcatctctcaattacgggacagtccctctttggaagcaggctcctgtgctttcctgtgttaataaacagtaataatcctttccatctctgcacattttagtctccttggaatctatctcactacttcactacagggtagcctgacattggtcaggttcttttgacacccaatttataggtaaagacattgagactaagtaagatgaactgacctcagggtcacttagccactaaatggcagagcggtttcattccaccactacaacctccagtttccctttggctacctgccttctttcaccgctagcaccctcctccaatctgctttctctggtgtctctgactgaatccagaaagtgctgggattacacgcgtgagccaccacacccagcctccatctttaaacttttaaatgtgaaatttctatcatgtaccgttagcctaacaagattttctttcctatttctgactggtgcctttcccctttttaggagcaacgaaagctactctcttagttatgttcttgtgatgtgacaaaatgtcaagaagataggagaagagaatattttatttcgttgatgcttttgttcccaagtgtgaccctaaacttaagctttgtaggagttgacattctttcatgtcccttccctttactcatgccgaaactatcaactgggacattttgtgcttttggtttaaaagttaattgatattatactttggttttatctaaaaagtaaatgtatttgcctttgacaaaagactgacacaagagcaaataagctttaaaatcgggtgttatgtgctttcctccatttttgagcatattatccaaaatggtctgtataatataaatgagaatgatgcagtttaagtaagccttgttataccattgtcatggacccctgtcataaagccatttcttggtttgtttgggaaagaggcatatgggatttatacagattcacttgtaaatgttggattggggatttttgtgtaaattttctcaaataaaggctagcagaaac

SEQ ID NO: 452871 - DNA, 717 bp, Homo sapiens
tgaggcacggggtccccccggttccggcgcggttgaggccttcggtggtgaacgagtctccagcaccatgtctggtttgtctggcccaccagcccggcgcggcccttttccgttagcgttgctgcttttgttcctgctcggccccagattggtccttgccatctccttccatctgcccattaactctcgcaagtgcctccgtgaggagattcacaaggacctgctagtgactggcgcgtacgagatctccgaccagtctgggggcgctggcggcctgcgcagccacctcaagatcacagattctgctggccatattctctactccaaagaggatgcaaccaaggggaaatttgcctttaccactgaagattatgacatgtttgaagtgtgttttgagagcaagggaacagggcggatacctgaccaactcgtgatcctagacatgaagcatggagtggaggcgaaaaattacgaagagattgcaaaagttgagaagctcaaaccattagaggtagagctgcgacgcctagaagacctttcagaatctattgttaatgattttgcctacatgaagaagagagaagaggagatgcgtgataccaacgagtaacccactccgggtcctattctttacaaccttctcaatgttctggctccattggactagcctacctggcaagcttttcacactggggcccgttcttgggccacgtggtc

SEQ ID NO: 452872 - DNA, 453 bp, Homo sapiens
  misc_feature (25)..(25): n is a, c, g, or t
gcggccgcctactactactaaattngcggccggtcgacctttgtaggagttgacattctttcatgtcccttccctttactcatgccgaaactatcaactgggacattttgtgcttttggtttaaaagttaattgatattatactttggttttatctaaaaagtaaatgtatttgcctttgacaaaagactgacacaagagcaaataagctttaaaatcgggtgttatgtgctttcctccatttttgagcatattatccaaaatggtctgtataatataaatgagaatgatgcagtttaagtaagccttgttataccattgtcatggacccctgtcataaagccatttcttggtttgtttgggaaagaggcatatgggatttatacagattcacttgtaaatgttggattggggatttttgtgtaaattttctcaaataaaggctagcagaaac

SEQ ID NO: 452873 - DNA, 237 bp, Homo sapiens
  misc_feature (25)..(25): n is a, c, g, or t
gcggccgcctactactactaaattngcggccggtcgacatccaaaatggtctgtataatataaatgagaatgatgcagtttaagtaagccttgttataccattgtcatggacccctgtcataaagccatttcttggtttgtttgggaaagaggcatatgggatttatacagattcacttgtaaatgttggattggggatttttgtgtaaattttctcaaataaaggctagcagaaac

SEQ ID NO: 452874 - DNA, 4576 bp, Homo sapiens
tgaggcacggggtccccccggttccggcgcggttgaggccttcggtggtgaacgagtctccagcaccatgtctggtttgtctggcccaccagcccggcgcggcccttttccgttagcgttgctgcttttgttcctgctcggccccagattggtccttgccatctccttccatctgcccattaactctcgcaagtgcctccgtgaggagattcacaaggacctgctagtgactggcgcgtacgagatctccgaccagtctgggggcgctggcggcctgcgcagccacctcaagatcacagattctgctggccatattctctactccaaagaggatgcaaccaaggggaaatttgcctttaccactgaagattatgacatgtttgaagtgtgttttgagagcaagggaacagggcggatacctgaccaactcgtgatcctagacatgaagcatggagtggaggcgaaaaattacgaagagattgcaaaagttgagaagctcaaaccattagaggtagagctgcgacgcctagaagacctttcagaatctattgttaatgattttgcctacatgaagaagagagaagaggagatgcgtgataccaacgagtcaacaaacactcgggtcctatacttcagcatcttttcaatgttctgtctcattggactagctacctggcaggtcttctacctgcgacgcttcttcaaggccaagaaattgattgagtaatgaatgaggcatattctcctcccaccttgtacctcagccagcagaacatcgctgggacgtgcctggcctaaggcatcctaccaacagcaccatcaaggcacgttggagctttcttgccagaactgatctcttttggtgtgggaggacatggggtaccacctacacccaacaagtcaatgagggacttctttttaatttggtaggattttgactggttttgcaacaataggtctattattagagtcacctatgacaaaaaataggggttacctagataatgccaaagtcagcatttgtcctgggttcccttgtgtgatctgtttggactatgttttcttttcttctcccacttgctcagcagcttgggcttccattctagttcttttaccaagatttttgtgtgaccatgttgacttcatttggattgccctctttcaatttccttgtgaaaacacccttaactttctctttacccttagctgaaatgtttacatagcttctggtgatatcttttcatgattttatatctcttaaaatggtgatggatgtgacacctcataaaagtgagctttgaactgtagataactcttaaagaaaatgtcattttagacaattaaaatatttgtgctcaactgcttgaacttttttcgtgtatgtgtatttaattctatgcaatattatcacatgtgtagattcatgtgaccaccatcacaagagacagaacagttctgtcacatggatcccttgcactgcccttttacagccgcagccacatccctttcttataccctcaccccaacctgtggctaccactgttctgtcctccatctctgtaattttgtcatttcaagaatgttgtatgaatggaatcatacagaatgtaatcttacaaggctgatcttttttcattcagcataattcccttgaaatccatccaagttgttgcatgtatgaatagtttcttcctttttttcttttaaaaatgttttatatatttagggggtataagtacagatttcttacatgcatatattgcatcgtggtgaagtgggggcagttccttttgattgctgagtagtattccatggtatggatgtaccacagtttgcttaaccattcacccactaaaggacataagagttgttttcagttttttgccctaataaagctgctgtgaacattcatgtacaggtttttatgtgaacatacattttcattttctgggataaatgctcaaaagggcaactgttgggttgtatggtaaacacatatatttttgtaagaaactaccctactctttttccagagtggctctactttttacatacagccactcatacaattcagacagcaatgtatgattgatccagtttcttcacatcctcaccagcatttggtattactactattttttatcttaaccattcacatagatgtgtgtaatgataccacatgtggttttaatttgcatttccaatggctaatgatgttgagtatctttttgtgtgctaatttgccatctatgtatcctcttcggtgaaatgtcttcatgtcttttgtctattttctatttaggtcatttgttctttttactattgagttttgagaggttttttatatatcctagataaaattcctctgttagatatgtggttgcttgaatttttaacataacttctaccaaggaaaaataagtaaaatttccaacccttgcatggccagtcacttacttaattcctgtccttcagtgttccatctagagaattaagagatatgatgtataaaatagacatcgagggccattaagagagtaaatacttaaaaatacatgttatgaaagcaaagccaataatcactgtaggagtatgagttgcctaagggccaaaactaatgtaaataagagaaagtgtggatataaatgaccattgtttataaacagttatgaaaaatgctgtgacttgaaatctttcccacatctcccaagaaagtaggtaggagtttatcctttccgtaatctctttttaaccctgctgactattacagggcttgtttaatcacagtggcaagaattacatgtatcttacagtaaagaaacagaatactggaatcgttagagaaccctgatgtgttgacctggataaagtacaaaggtggaagagggaatgagttatgctgttaaaatctcaggctattctgttaatgttcctgctactatgaacccaaactttttttttcccccttttgactccttgtgtcttcctctcctgtggcataaaagtagttctgtcgttaacttgtacaacattgccatctgctgttgagaattggtaggtactgcttctgagaacctggctgcagatccttagcataggcagcaaatgttgagaaagtctatctgtagtattacatatactaagttacagaggatgcattcaagtagagaaaataatatgtgggttaagatacatccttaaactttttttttttgggggggggggggacggagtcttgctgcaacgcccaggctggagtgcaatggcactatctcagctcgctgcaaccttcacctcctgggttcaagcaattctcctgcctcagcctcctgagtagctgggaatataggtgcacaccaccatgcctggctaatttttgtattttcagtagaagcagagtttcaccatattggccaggttggtctcgaactcctgacctcaagtgatctgcctgcctcagcctcccaaagtgctgggattacacgcgtgagccaccacacccagcctccatctttaaacttttaaatgtgaaatttctatcatgtaccgttagcctaacaagattttctttcctatttctgactggtgcctttcccctttttaggagcaacgaaagctactctcttagttatgttcttgtgatgtgacaaaatgtcaagaagataggagaagagaatattttatttcgttgatgcttttgttcccaagtgtgaccctaaacttaagctttgtaggagttgacattctttcatgtcccttccctttactcatgccgaaactatcaactgggacattttgtgcttttggtttaaaagttaattgatattatactttggttttatctaaaaagtaaatgtatttgcctttgacaaaagactgacacaagagcaaataagctttaaaatcgggtgttatgtgctttcctccatttttgagcatattatccaaaatggtctgtataatataaatgagaatgatgcagtttaagtaagccttgttataccattgtcatggacccctgtcataaagccatttcttggtttgtttgggaaagaggcatatgggatttatacagattcacttgtaaatgttggattggggatttttgtgtaaattttctcaaataaaggctagcagaaacaccaaaaaaaaaaaaaaaaaaaaaaaaaaaaaaaaaaaaaaaaaaaaaagaaaaaacaaaagaaaacaaagagaagaggagggcgcgcgcgccgccacaaaagaatcatccatccccgagagcggcccacacatcacaacgacccaccaccagttgcctcgcacacaagggggccccacacatgcggacgtcataatacaaccgccagcgagacggcgcggcccataaaacaacaccgccgccgcatgagcggggaacaacacgggaccaacgagcgacaacccttgacgacagaaaggaccacccacatacatcgcgaggggggaacaacaaacaggcggcgacccacaccgacccacgaaaaagaaattaacacagccgcccaagggcgcaccacaccaaaagagctccacccggccggctatacaagggcca

SEQ ID NO: 452875 - DNA, 3381 bp, Homo sapiens
  misc_feature (3219)..(3220): n is a, c, g, or t
tgaggcacggggtccccccggttccggcgcggttgaggccttcggtggtgaacgagtctccagcaccatgtctggtttgtctggcccaccagcccggcgcggcccttttccgttagcgttgctgcttttgttcctgctcggccccagattggtccttgccatctccttccatctgcccattaactctcgcaagtgcctccgtgaggagattcacaaggacctgctagtgactggcgcgtacgagatctccgaccagtctgggggcgctggcggcctgcgcagccacctcaagatcacagattctgctggccatattctctactccaaagaggatgcaaccaaggggaaatttgcctttaccactgaagattatgacatgtttgaagtgtgttttgagagcaagggaacagggcggatacctgaccaactcgtgatcctagacatgaagcatggagtggaggcgaaaaattacgaagagattgcaaaagttgagaagctcaaaccattagaggtagagctgcgacgcctagaagacctttcagaatctattgttaatgattttgcctacatgaagaagagagaagaggagatgcgtgataccaacgagtcaacaaacactcgggtcctatacttcagcatcttttcaatgttctgtctcattggactagctacctggcaggtcttctacctgcgacgcttcttcaaggccaagaaattgattgagtaatgaatgaggcatattctcctcccaccttgtacctcagccagcagaacatcgctgggacgtgcctggcctaaggcatcctaccaacagcaccatcaaggcacgttggagctttcttgccagaactgatctcttttggtgtgggaggacatggggtaccacctacacccaacaagtcaatgagggacttctttttaatttggtaggattttgactggttttgcaacaataggtctattattagagtcacctatgacaaaaaataggggttacctagataatgccaaagtcagcatttgtcctgggttcccttgtgtgatctgtttggactatgttttcttttcttctcccacttgctcagcagcttgggcttccattctagttcttttaccaagatttttgtgtgaccatgttgacttcatttggattgccctctttcaatttccttgtgaaaacacccttaactttctctttacccttagctgaaatgtttacatagcttctggtgatatcttttcatgattttatatctcttaaaatggtgatggatgtgacacctcataaaagtgagctttgaactgtagataactcttaaagaaaatgtcattttagacaattaaaatatttgtgctcaactgcttgaacttttttcgtgtatgtgtatttaattctatgcaatattatcacatgtgtagattcatgtgaccaccatcacaagagacagaacagttctgtcacatggatcccttgcactgcccttttacagccgcagccacatccctttcttataccctcaccccaacctgtggctaccactgttctgtcctccatctctgtaattttgtcatttcaagaatgttgtatgaatggaatcatacagaatgtaatcttacaaggctgatcttttttcattcagcataattcccttgaaatccatccaagttgttgcatgtatgaatagtttcttcctttttttcttttaaaaatgttttatatatttagggggtataagtacagatttcttacatgcatatattgcatcgtggtgaagtgggggcagttccttttgattgctgagtagtattccatggtatggatgtaccacagtttgcttaaccattcacccactaaaggacataagagttgttttcagttttttgccctaataaagctgctgtgaacattcatgtacaggtttttatgtgaacatacattttcattttctgggataaatgctcaaaagggcaactgttgggttgtatggtaaacacatatatttttgtaagaaactaccctactctttttccagagtggctctactttttacatacagccactcatacaattcagacagcaatgtatgattgatccagtttcttcacatcctcaccagcatttggtattactactattttttatcttaaccattcacatagatgtgtgtaatgataccacatgtggttttaatttgcatttccaatggctaatgatgttgagtatctttttgtgtgctaatttgccatctatgtatcctcttcggtgaaatgtcttcatgtcttttgtctattttctatttaggtcatttgttctttttactattgagttttgagaggttttttatatatcctagataaaattcctctgttagatatgtggttgcttgaatttttaacataacttctaccaaggaaaaataagtaaaatttccaacccttgcatggccagtcacttacttaattcctgtccttcagtgttccatctagagaattaagagatatgatgtataaaatagacatcgagggccattaagagagtaaatacttaaaaatacatgttatgaaagcaaagccaataatcactgtaggagtatgagttgcctaagggccaaaactaatgtaaataagagaaagtgtggatataaatgaccattgtttataaacagttatgaaaaatgctgtgacttgaaatctttcccacatctcccaagaaagtaggtaggagtttatcctttccgtaatctctttttaaccctgctgactattacagggcttgtttaatcacagtggcaagaattacatgtatcttacagtaaagaaacagaatactggaatcgttagagaaccctgatgtgttgacctggataaagtacaaaggtggaagagggaatgagttatgctgttaaaatctcaggctattctgttaatgttcctgctactatgaacccaaactttttttttcccccttttgactccttgtgtcttcctctcctgtggcataaaagtagttctgtcgttaacttgtacaacattgccatctgctgttgagaattggtaggtactgcttctgagaacctggctgcagatccttagcataggcagcaaatgttgagaaagtctatctgtagtattacatatactaagttacagaggatgcattcaagtagagaaaataatatgtgggttaagatacatccttaaactttttttttttgaggnnaagagggactggtttatctaccattagctccctcaatttgctgtccgaactatgatactaactatttgtcgaccattaagcgcacctgtggaacacccctattatcccctttccttattccagctcccctttcttttctcctccccccccacgagattata

SEQ ID NO: 452876 - DNA, 1423 bp, Homo sapiens
tgaggcacggggtccccccggttccggcgcggttgaggccttcggtggtgaacgagtctccagcaccatgtctggtttgtctggcccaccagcccggcgcggcccttttccgttagcgttgctgcttttgttcctgctcggccccagattggtccttgccatctccttccatctgcccattaactctcgcaagtgcctccgtgaggagattcacaaggacctgctagtgactggcgcgtacgagatctccgaccagtctgggggcgctggcggcctgcgcagccacctcaagatcacagattctgctggccatattctctactccaaagaggatgcaaccaaggggaaatttgcctttaccactgaagattatgacatgtttgaagtgtgttttgagagcaagggaacagggcggatacctgaccaactcgtgatcctagacatgaagcatggagtggaggcgaaaaattacgaagagattgcaaaagttgagaagctcaaaccattagaggtagagctgcgacgcctagaagacctttcagaatctattgttaatgattttgcctacatgaagaagagagaagaggagatgcgtgataccaacgagtcaacaaacactcgggtcctatacttcagcatcttttcaatgttctgtctcattggactagctacctggcaggtcttctacctgcgacgcttcttcaaggccaagaaattgattgagtaatgaatgaggcatattctcctcccaccttgtacctcagccagcagaacatcgctgggacgtgcctggcctaaggcatcctaccaacagcaccatcaaggcacgttggagctttcttgccagaactgatctcttttggtgtgggaggacatggggtaccacctacacccaacaagtcaatgagggacttctttttaatttggtaggattttgactggttttgcaacaataggtctattattagagtcacctatgacaaaaaataggggttacctagataatgccaaagtcagcatttgtcctgggttcccttgtgtgatctgtttggactatgttttcttttcttctcccacttgctcagcagcttgggcttccattctagttcttttaccaagatttttgtgtgaccatgttgacttcatttggattgccctctttcaatttccttgtgaaaacacccttaactttctctttacccttagctgaaatgtttacatagcttctggtgatatcttttcatgattttatatctcttaaaatggtgatggatgtgacacctcataaaagtgagctttgaactgtagataactcttaaagaaaatcggcccctcgccctttaacattggggcaccggcgcgaacacccacttaaaccagaccagcaaaagaacctccccacgactcgcgggggcggccccct

SEQ ID NO: 452877 - DNA, 3904 bp, Homo sapiens
gtaatattgagagaggttcggtaagatatttttttggtgggagaaaaatttcattatcacagattctgctggccatattctctactccaaagaggatgcaaccaaggggaaatttgcctttaccactgaagattatgacatgtttgaagtgtgttttgagagcaagggaacagggcggatacctgaccaactcgtgatcctagacatgaagcatggagtggaggcgaaaaattacgaagagattgcaaaagttgagaagctcaaaccattagaggtagagctgcgacgcctagaagacctttcagaatctattgttaatgattttgcctacatgaagaagagagaagaggagatgcgtgataccaacgagtcaacaaacactcgggtcctatacttcagcatcttttcaatgttctgtctcattggactagctacctggcaggtcttctacctgcgacgcttcttcaaggccaagaaattgattgagtaatgaatgaggcatattctcctcccaccttgtacctcagccagcagaacatcgctgggacgtgcctggcctaaggcatcctaccaacagcaccatcaaggcacgttggagctttcttgccagaactgatctcttttggtgtgggaggacatggggtaccacctacacccaacaagtcaatgagggacttctttttaatttggtaggattttgactggttttgcaacaataggtctattattagagtcacctatgacaaaaaataggggttacctagataatgccaaagtcagcatttgtcctgggttcccttgtgtgatctgtttggactatgttttcttttcttctcccacttgctcagcagcttgggcttccattctagttcttttaccaagatttttgtgtgaccatgttgacttcatttggattgccctctttcaatttccttgtgaaaacacccttaactttctctttacccttagctgaaatgtttacatagcttctggtgatatcttttcatgattttatatctcttaaaatggtgatggatgtgacacctcataaaagtgagctttgaactgtagataactcttaaagaaaatgtcattttagacaattaaaatatttgtgctcaactgcttgaacttttttcgtgtatgtgtatttaattctatgcaatattatcacatgtgtagattcatgtgaccaccatcacaagagacagaacagttctgtcacatggatcccttgcactgcccttttacagccgcagccacatccctttcttataccctcaccccaacctgtggctaccactgttctgtcctccatctctgtaattttgtcatttcaagaatgttgtatgaatggaatcatacagaatgtaatcttacaaggctgatcttttttcattcagcataattcccttgaaatccatccaagttgttgcatgtatgaatagtttcttcctttttttcttttaaaaatgttttatatatttagggggtataagtacagatttcttacatgcatatattgcatcgtggtgaagtgggggcagttccttttgattgctgagtagtattccatggtatggatgtaccacagtttgcttaaccattcacccactaaaggacataagagttgttttcagttttttgccctaataaagctgctgtgaacattcatgtacaggtttttatgtgaacatacattttcattttctgggataaatgctcaaaagggcaactgttgggttgtatggtaaacacatatatttttgtaagaaactaccctactctttttccagagtggctctactttttacatacagccactcatacaattcagacagcaatgtatgattgatccagtttcttcacatcctcaccagcatttggtattactactattttttatcttaaccattcacatagatgtgtgtaatgataccacatgtggttttaatttgcatttccaatggctaatgatgttgagtatctttttgtgtgctaatttgccatctatgtatcctcttcggtgaaatgtcttcatgtcttttgtctattttctatttaggtcatttgttctttttactattgagttttgagaggttttttatatatcctagataaaattcctctgttagatatgtggttgcttgaatttttaacataacttctaccaaggaaaaataagtaaaatttccaacccttgcatggccagtcacttacttaattcctgtccttcagtgttccatctagagaattaagagatatgatgtataaaatagacatcgagggccattaagagagtaaatacttaaaaatacatgttatgaaagcaaagccaataatcactgtaggagtatgagttgcctaagggccaaaactaatgtaaataagagaaagtgtggatataaatgaccattgtttataaacagttatgaaaaatgctgtgacttgaaatctttcccacatctcccaagaaagtaggtaggagtttatcctttccgtaatctctttttaaccctgctgactattacagggcttgtttaatcacagtggcaagaattacatgtatcttacagtaaagaaacagaatactggaatcgttagagaaccctgatgtgttgacctggataaagtacaaaggtggaagagggaatgagttatgctgttaaaatctcaggctattctgttaatgttcctgctactatgaacccaaactttttttttcccccttttgactccttgtgtcttcctctcctgtggcataaaagtagttctgtcgttaacttgtacaacattgccatctgctgttgagaattggtaggtactgcttctgagaacctggctgcagatccttagcataggcagcaaatgttgagaaagtctatctgtagtattacatatactaagttacagaggatgcattcaagtagagaaaataatatgtgggttaagatacatccttaaactttttttttttgggggggggggggacggagtcttgctgcaacgcccaggctggagtgcaatggcactatctcagctcgctgcaaccttcacctcctgggttcaagcaattctcctgcctcagcctcctgagtagctgggaatataggtgcacaccaccatgcctggctaatttttgtattttcagtagaagcagagtttcaccatattggccaggttggtctcgaactcctgacctcaagtgatctgcctgcctcagcctcccaaagtgctgggattacacgcgtgagccaccacacccagcctccatctttaaacttttaaatgtgaaatttctatcatgtaccgttagcctaacaagattttctttcctatttctgactggtgcctttcccctttttaggagcaacgaaagctactctcttagttatgttcttgtgatgtgacaaaatgtcaagaagataggagaagagaatattttatttcgttgatgcttttgttcccaagtgtgaccctaaacttaagctttgtaggagttgacattctttcatgtcccttccctttactcatgccgaaactatcaactgggacattttgtgcttttggtttaaaagttaattgatattatactttggttttatctaaaaagtaaatgtatttgcctttgacaaaagactgacacaagagcaaataagctttaaaatcgggtgttatgtgctttcctccatttttgagcatattatccaaaatggtctgtataatataaatgagaatgatgcagtttaagtaagccttgttataccattgtcatggacccctgtcataaagccatttcttggtttgtttgggaaagaggcatatgggatttatacagattcacttgtaaatgttggattggggatttttgtgtaaattttctcaaataaaggctagcagaaac

SEQ ID NO: 452878 - DNA, 1512 bp, Homo sapiens
tgaggcacggggtccccccggttccggcgcggttgaggccttcggtggtgaacgagtctccagcaccatgtctggtttgtctggcccaccagcccggcgcggcccttttccgttagcgttgctgcttttgttcctgctcggccccagattggtccttgccatctccttccatctgcccattaactctcgcaagtgcctccgtgaggagattcacaaggacctgctagtgactggcgcgtacgagatctccgaccagtctgggggcgctggcggcctgcgcagccacctcaagatcacagattctgctggccatattctctactccaaagaggatgcaaccaaggggaaatttgcctttaccactgaagattatgacatgtttgaagtgtgttttgagagcaagggaacagggcggatacctgaccaactcgtgatcctagacatgaagcatggagtggaggcgaaaaattacgaagagattgcaaaagttgagaagctcaaaccattagaggtagagctgcgacgcctagaagacctttcagaatctattgttaatgattttgcctacatgaagaagagagaagaggagatgcgtgataccaacgagtcaacaaacactcgggtcctatacttcagcatcttttcaatgttctgtctcattggactagctacctggcaggtcttctacctgcgacgcttcttcaaggccaagaaattgattgagtaatgaatgaggcatattctcctcccaccttgtacctcagccagcagaacatcgctgggacgtgcctggcctaaggcatcctaccaacagcaccatcaaggcacgttggagctttcttgccagaactgatctcttttggtgtgggaggacatggggtaccacctacacccaacaagtcaatgagggacttctttttaatttggtaggattttgactggttttgcaacaataggtctattattagagtcacctatgacaaaaaataggggttacctagataatgccaaagtcagcatttgtcctgggttcccttgtgtgatctgtttggactatgttttcttttcttctcccacttgctcagcagcttgggcttccattcatgcaattgcatatggcaaggccaagacaacaggaaatctgtcaatccttttgagttggcaagtttgagaatttacccagagggctgttttatgcagaagcctcagctatcaaggctcaaagtccctgagaatgctcaggttcaacggagaaggcaggcaatgtaaggttacagtactgagaatgtgggcttgggaaccagacagagctggctgggttccaatccctgcttactaggtactagctctgtgatggtagggaattacttctcctctctatgccttgggctgctttctgtaaaatggggaaaataacacatgcacctcacagagctggctgggttccatacctgcttactaggtactagctctgtgatggtagggaattacttctcctctctatgccttgcc

SEQ ID NO: 452879 - DNA, 3820 bp, Homo sapiens
ccccctccccccccccctcctcctctcctcctcccccaccttaccgctaggtacgaggctgtgtgttaactcggccgaggagggaacagggcggatacctgaccaactcgtgatcctagacatgaagcatggagtggaggcgaaaaattacgaagagattgcaaaagttgagaagctcaaaccattagaggtagagctgcgacgcctagaagacctttcagaatctattgttaatgattttgcctacatgaagaagagagaagaggagatgcgtgataccaacgagtcaacaaacactcgggtcctatacttcagcatcttttcaatgttctgtctcattggactagctacctggcaggtcttctacctgcgacgcttcttcaaggccaagaaattgattgagtaatgaatgaggcatattctcctcccaccttgtacctcagccagcagaacatcgctgggacgtgcctggcctaaggcatcctaccaacagcaccatcaaggcacgttggagctttcttgccagaactgatctcttttggtgtgggaggacatggggtaccacctacacccaacaagtcaatgagggacttctttttaatttggtaggattttgactggttttgcaacaataggtctattattagagtcacctatgacaaaaaataggggttacctagataatgccaaagtcagcatttgtcctgggttcccttgtgtgatctgtttggactatgttttcttttcttctcccacttgctcagcagcttgggcttccattctagttcttttaccaagatttttgtgtgaccatgttgacttcatttggattgccctctttcaatttccttgtgaaaacacccttaactttctctttacccttagctgaaatgtttacatagcttctggtgatatcttttcatgattttatatctcttaaaatggtgatggatgtgacacctcataaaagtgagctttgaactgtagataactcttaaagaaaatgtcattttagacaattaaaatatttgtgctcaactgcttgaacttttttcgtgtatgtgtatttaattctatgcaatattatcacatgtgtagattcatgtgaccaccatcacaagagacagaacagttctgtcacatggatcccttgcactgcccttttacagccgcagccacatccctttcttataccctcaccccaacctgtggctaccactgttctgtcctccatctctgtaattttgtcatttcaagaatgttgtatgaatggaatcatacagaatgtaatcttacaaggctgatcttttttcattcagcataattcccttgaaatccatccaagttgttgcatgtatgaatagtttcttcctttttttcttttaaaaatgttttatatatttagggggtataagtacagatttcttacatgcatatattgcatcgtggtgaagtgggggcagttccttttgattgctgagtagtattccatggtatggatgtaccacagtttgcttaaccattcacccactaaaggacataagagttgttttcagttttttgccctaataaagctgctgtgaacattcatgtacaggtttttatgtgaacatacattttcattttctgggataaatgctcaaaagggcaactgttgggttgtatggtaaacacatatatttttgtaagaaactaccctactctttttccagagtggctctactttttacatacagccactcatacaattcagacagcaatgtatgattgatccagtttcttcacatcctcaccagcatttggtattactactattttttatcttaaccattcacatagatgtgtgtaatgataccacatgtggttttaatttgcatttccaatggctaatgatgttgagtatctttttgtgtgctaatttgccatctatgtatcctcttcggtgaaatgtcttcatgtcttttgtctattttctatttaggtcatttgttctttttactattgagttttgagaggttttttatatatcctagataaaattcctctgttagatatgtggttgcttgaatttttaacataacttctaccaaggaaaaataagtaaaatttccaacccttgcatggccagtcacttacttaattcctgtccttcagtgttccatctagagaattaagagatatgatgtataaaatagacatcgagggccattaagagagtaaatacttaaaaatacatgttatgaaagcaaagccaataatcactgtaggagtatgagttgcctaagggccaaaactaatgtaaataagagaaagtgtggatataaatgaccattgtttataaacagttatgaaaaatgctgtgacttgaaatctttcccacatctcccaagaaagtaggtaggagtttatcctttccgtaatctctttttaaccctgctgactattacagggcttgtttaatcacagtggcaagaattacatgtatcttacagtaaagaaacagaatactggaatcgttagagaaccctgatgtgttgacctggataaagtacaaaggtggaagagggaatgagttatgctgttaaaatctcaggctattctgttaatgttcctgctactatgaacccaaactttttttttcccccttttgactccttgtgtcttcctctcctgtggcataaaagtagttctgtcgttaacttgtacaacattgccatctgctgttgagaattggtaggtactgcttctgagaacctggctgcagatccttagcataggcagcaaatgttgagaaagtctatctgtagtattacatatactaagttacagaggatgcattcaagtagagaaaataatatgtgggttaagatacatccttaaactttttttttttgggggggggggggacggagtcttgctgcaacgcccaggctggagtgcaatggcactatctcagctcgctgcaaccttcacctcctgggttcaagcaattctcctgcctcagcctcctgagtagctgggaatataggtgcacaccaccatgcctggctaatttttgtattttcagtagaagcagagtttcaccatattggccaggttggtctcgaactcctgacctcaagtgatctgcctgcctcagcctcccaaagtgctgggattacacgcgtgagccaccacacccagcctccatctttaaacttttaaatgtgaaatttctatcatgtaccgttagcctaacaagattttctttcctatttctgactggtgcctttcccctttttaggagcaacgaaagctactctcttagttatgttcttgtgatgtgacaaaatgtcaagaagataggagaagagaatattttatttcgttgatgcttttgttcccaagtgtgaccctaaacttaagctttgtaggagttgacattctttcatgtcccttccctttactcatgccgaaactatcaactgggacattttgtgcttttggtttaaaagttaattgatattatactttggttttatctaaaaagtaaatgtatttgcctttgacaaaagactgacacaagagcaaataagctttaaaatcgggtgttatgtgctttcctccatttttgagcatattatccaaaatggtctgtataatataaatgagaatgatgcagtttaagtaagccttgttataccattgtcatggacccctgtcataaagccatttcttggtttgtttgggaaagaggcatatgggatttatacagattcacttgtaaatgttggattggggatttttgtgtaaattttctcaaataaaggctagcagaaac

SEQ ID NO: 452880 - DNA, 795 bp, Homo sapiens
gagacagagtctcgcttttcgcttttttgcccaggctggagttcaacggcgcaatctcggctcactgcaacctccaccttctgggttcaagtgattttcctgcctcagcctcccgagtagaaagtgctgggattacacgcgtgagccaccacacccagcctccatctttaaacttttaaatgtgaaatttctatcatgtaccgttagcctaacaagattttctttcctatttctgactggtgcctttcccctttttaggagcaacgaaagctactctcttagttatgttcttgtgatgtgacaaaatgtcaagaagataggagaagagaatattttatttcgttgatgcttttgttcccaagtgtgaccctaaacttaagctttgtaggagttgacattctttcatgtcccttccctttactcatgccgaaactatcaactgggacattttgtgcttttggtttaaaagttaattgatattatactttggttttatctaaaaagtaaatgtatttgcctttgacaaaagactgacacaagagcaaataagctttaaaatcgggtgttatgtgctttcctccatttttgagcatattatccaaaatggtctgtataatataaatgagaatgatgcagtttaagtaagccttgttataccattgtcatggacccctgtcataaagccatttcttggtttgtttgggaaagaggcatatgggatttatacagattcacttgtaaatgttggattggggatttttgtgtaaattttctcaaataaaggctagcagaaac

SEQ ID NO: 452881 - DNA, 613 bp, Homo sapiens
aaaaatgtgaaagaccaacaggaccggaagccaacaagaggaactcacctataccgacgggcccaaccccaaaaaggagcaacgaaagctactctcttagttatgttcttgtgatgtgacaaaatgtcaagaagataggagaagagaatattttatttcgttgatgcttttgttcccaagtgtgaccctaaacttaagctttgtaggagttgacattctttcatgtcccttccctttactcatgccgaaactatcaactgggacattttgtgcttttggtttaaaagttaattgatattatactttggttttatctaaaaagtaaatgtatttgcctttgacaaaagactgacacaagagcaaataagctttaaaatcgggtgttatgtgctttcctccatttttgagcatattatccaaaatggtctgtataatataaatgagaatgatgcagtttaagtaagccttgttataccattgtcatggacccctgtcataaagccatttcttggtttgtttgggaaagaggcatatgggatttatacagattcacttgtaaatgttggattggggatttttgtgtaaattttctcaaataaaggctagcagaaac

SEQ ID NO: 452882 - DNA, 490 bp, Homo sapiens
atctccgaccagtctgggggcgctggcggcctgcgcagccacctcaaggtgcggcattgggcgacgtggggccgggagggaagacggcaggcttaggcgaggggaggctcgggttcgggggagtcgggccggcggaggcctgggagttgttctggcctcccgggagcgcaaaggacgtgcggtggagcccgccccctcaccccgctggttgcctgtcgcggggcggggcgggtcaccaacgcctgggaaccccaagaagggctgcgaggctttggcggatgtggtgacacctgagctggggcggttgtcaacgtcctataccagttttggtctcagatacattgaaccgtaatttggttctccaaataaatgttggggtgttgaatatttatacggattggcatcataagataccgcgatacctgcaggaaagtaaaggagacagagctaaccgtgattaataaaatgttatttattgagcatctgctgt

SEQ ID NO: 452883 - DNA, 269 bp, Homo sapiens
tcccagaattttaagtatttcacacaatgattcctttgatttctttctcaggaacagggcggatacctgaccaactcgtgatcctagacatgaagcatggagtggaggcgaaaaattacgaagaggtatgtcctgctctaacagccagaggaggcagcagtgtgctatgctgtgaggtttctgtgacctcggcaggccaacaggctgtgctttgcccaaagggctgtggtttcttagcagtcttgtgacagccagccatgatcttactg

SEQ ID NO: 452884 - DNA, 1367 bp, Homo sapiens
tgaggcacggggtccccccggttccggcgcggttgaggccttcggtggtgaacgagtctccagcaccatgtctggtttgtctggcccaccagcccggcgcggcccttttccgttagcgttgctgcttttgttcctgctcggccccagattggtccttgccatctccttccatctgcccattaactctcgcaagtgcctccgtgaggagattcacaaggacctgctagtgactggcgcgtacgagatctccgaccagtctgggggcgctggcggcctgcgcagccacctcaagatcacagattctgctggccatattctctactccaaagaggatgcaaccaaggggaaatttgcctttaccactgaagattatgacatgtttgaagtgtgttttgagagcaagggaacagggcggatacctgaccaactcgtgatcctagacatgaagcatggagtggaggcgaaaaattacgaagagattgcaaaagttgagaagctcaaaccattagaggtagagctgcgacgcctagaagacctttcagaatctattgttaatgattttgcctacatgaagaagagagaagaggagatgcgtgataccaacgagtcaacaaacactcgggtcctatacttcagcatcttttcaatgttctgtctcattggactagctacctggcaggtcttctacctgcgacgcttcttcaaggccaagaaattgattgagtaatgaatgaggcatattctcctcccaccttgtacctcagccagcagaacatcgctgggacgtgcctggcctaaggcatcctaccaacagcaccatcaaggcacgttggagctttcttgccagaactgatctcttttggtgtgggaggacatggggtaccacctacacccaacaagtcaatgagggacttctttttaatttggtaggattttgactggttttgcaacaataggtctattattagagtcacctatgacaaaaaataggggttacctagataatgccaaagtcagcatttgtcctgggttcccttgtgtgatctgtttggactatgttttcttttcttctcccacttgctcagcagcttgggcttccattctagttcttttaccaagatttttgtgtgaccatgttgacttcatttggattgccctctttcaatttccttgtgaaaacacccttaactttctctttacccttagctgaaatgtttacatagcttctggtgatatcttttcatgattttatatctcttaaaatggtgatggatgtgacacctcataaaagtgagctttgaactgtagataactcttaaagaaaatgtcattttagacaattaaaatatttgtgctcaactgcttga

SEQ ID NO: 452885 - DNA, 4141 bp, Homo sapiens
tgaggcacggggtccccccggttccggcgcggttgaggccttcggtggtgaacgagtctccagcaccatgtctggtttgtctggcccaccagcccggcgcggcccttttccgttagcgttgctgcttttgttcctgctcggccccagattggtccttgccatctccttccatctgcccattaactctcgcaagtgcctccgtgaggagattcacaaggacctgctagtgactggcgcgtacgagatctccgaccagtctgggggcgctggcggcctgcgcagccacctcaagatcacagattctgctggccatattctctactccaaagaggatgcaaccaaggggaaatttgcctttaccactgaagattatgacatgtttgaagtgtgttttgagagcaagggaacagggcggatacctgaccaactcgtgatcctagacatgaagcatggagtggaggcgaaaaattacgaagagattgcaaaagttgagaagctcaaaccattagaggtagagctgcgacgcctagaagacctttcagaatctattgttaatgattttgcctacatgaagaagagagaagaggagatgcgtgataccaacgagtcaacaaacactcgggtcctatacttcagcatcttttcaatgttctgtctcattggactagctacctggcaggtcttctacctgcgacgcttcttcaaggccaagaaattgattgagtaatgaatgaggcatattctcctcccaccttgtacctcagccagcagaacatcgctgggacgtgcctggcctaaggcatcctaccaacagcaccatcaaggcacgttggagctttcttgccagaactgatctcttttggtgtgggaggacatggggtaccacctacacccaacaagtcaatgagggacttctttttaatttggtaggattttgactggttttgcaacaataggtctattattagagtcacctatgacaaaaaataggggttacctagataatgccaaagtcagcatttgtcctgggttcccttgtgtgatctgtttggactatgttttcttttcttctcccacttgctcagcagcttgggcttccattctagttcttttaccaagatttttgtgtgaccatgttgacttcatttggattgccctctttcaatttccttgtgaaaacacccttaactttctctttacccttagctgaaatgtttacatagcttctggtgatatcttttcatgattttatatctcttaaaatggtgatggatgtgacacctcataaaagtgagctttgaactgtagataactcttaaagaaaatgtcattttagacaattaaaatatttgtgctcaactgcttgaacttttttcgtgtatgtgtatttaattctatgcaatattatcacatgtgtagattcatgtgaccaccatcacaagagacagaacagttctgtcacatggatcccttgcactgcccttttacagccgcagccacatccctttcttataccctcaccccaacctgtggctaccactgttctgtcctccatctctgtaattttgtcatttcaagaatgttgtatgaatggaatcatacagaatgtaatcttacaaggctgatcttttttcattcagcataattcccttgaaatccatccaagttgttgcatgtatgaatagtttcttcctttttttcttttaaaaatgttttatatatttagggggtataagtacagatttcttacatgcatatattgcatcgtggtgaagtgggggcagttccttttgattgctgagtagtattccatggtatggatgtaccacagtttgcttaaccattcacccactaaaggacataagagttgttttcagttttttgccctaataaagctgctgtgaacattcatgtacaggtttttatgtgaacatacattttcattttctgggataaatgctcaaaagggcaactgttgggttgtatggtaaacacatatatttttgtaagaaactaccctactctttttccagagtggctctactttttacatacagccactcatacaattcagacagcaatgtatgattgatccagtttcttcacatcctcaccagcatttggtattactactattttttatcttaaccattcacatagatgtgtgtaatgataccacatgtggttttaatttgcatttccaatggctaatgatgttgagtatctttttgtgtgctaatttgccatctatgtatcctcttcggtgaaatgtcttcatgtcttttgtctattttctatttaggtcatttgttctttttactattgagttttgagaggttttttatatatcctagataaaattcctctgttagatatgtggttgcttgaatttttaacataacttctaccaaggaaaaataagtaaaatttccaacccttgcatggccagtcacttacttaattcctgtccttcagtgttccatctagagaattaagagatatgatgtataaaatagacatcgagggccattaagagagtaaatacttaaaaatacatgttatgaaagcaaagccaataatcactgtaggagtatgagttgcctaagggccaaaactaatgtaaataagagaaagtgtggatataaatgaccattgtttataaacagttatgaaaaatgctgtgacttgaaatctttcccacatctcccaagaaagtaggtaggagtttatcctttccgtaatctctttttaaccctgctgactattacagggcttgtttaatcacagtggcaagaattacatgtatcttacagtaaagaaacagaatactggaatcgttagagaaccctgatgtgttgacctggataaagtacaaaggtggaagagggaatgagttatgctgttaaaatctcaggctattctgttaatgttcctgctactatgaacccaaactttttttttcccccttttgactccttgtgtcttcctctcctgtggcataaaagtagttctgtcgttaacttgtacaacattgccatctgctgttgagaattggtaggtactgcttctgagaacctggctgcagatccttagcataggcagcaaatgttgagaaagtctatctgtagtattacatatactaagttacagaggatgcattcaagtagagaaaataatatgtgggttaagatacatccttaaactttttttttttgggggggggggggacggagtcttgctgcaacgcccaggctggagtgcaatggcactatctcagctcgctgcaaccttcacctcctgggttcaagcaattctcctgcctcagcctcctgagtagctgggaatataggtgcacaccaccatgcctggctaatttttgtattttcagtagaagcagagtttcaccatattggccaggttggtctcgaactcctgacctcaagtgatctgcctgcctcagcctcccaaagtgctgggattacacgcgtgagccaccacacccagcctccatctttaaacttttaaatgtgaaatttctatcatgtaccgttagcctaacaagattttctttcctatttctgactggtgcctttcccctttttaggagcaacgaaagctactctcttagttatgttcttgtgatgtgacaaaatgtcaagaagataggagaagagaatattttatttcgttgatgcttttgttcccaagtgtgaccctaaacttaagctttgtaggagttgacattctttcatgtcccttccctttactcatgccgaaactatcaactgggacattttgtgcttttggtttaaaagttaattgatattatactttggttttatctaaaaagtaaatgtatttgcctttgacaaaagactgacacaagagcaaataagctttaaaatcgggtgttatgtgctttcctccatttttgagcatattatccaaaatggtctgtataatataaatgagaatgatgcagtttaagtaagccttgttataccattgtcatggacccctgtcataaagccatttcttggtttgtttgggaaagaggcatatgggatttatacagattcacttgtaaatgttggattggggatttttgtgtaaattttctcaaataaaggctagcagaaac

SEQ ID NO: 452886 - DNA, 4091 bp, Homo sapiens
tgaggcacggggtccccccggttccggcgcggttgaggccttcggtggtgaacgagtctccagcaccatgtctggtttgtctggcccaccagcccggcgcggcccttttccgttagcgttgctgcttttgttcctgctcggccccagattggtccttgccatctccttccatctgcccattaactctcgcaagtgcctccgtgaggagattcacaaggacctgctagtgactggcgcgtacgagatctccgaccagtctgggggcgctggcggcctgcgcagccacctcaagatcacagattctgctggccatattctctactccaaagaggatgcaaccaaggggaaatttgcctttaccactgaagattatgacatgtttgaagtgtgttttgagagcaagggaacagggcggatacctgaccaactcgtgatcctagacatgaagcatggagtggaggcgaaaaattacgaagagattgcaaaagttgagaagctcaaaccattagaggtagagctgcgacgcctagaagacctttcagaatctattgttaatgattttgcctacatgaagaagagagaagaggagatgcgtgataccaacgagtcaacaaacactcgggtcctatacttcagcatcttttcaatgttctgtctcattggactagctacctggcaggtcttctacctgcgacgcttcttcaaggccaagaaattgattgagtaatgaatgaggcatattctcctcccaccttgtacctcagccagcagaacatcgctgggacgtgcctggcctaaggcatcctaccaacagcaccatcaaggcacgttggagctttcttgccagaactgatctcttttggtgtgggaggacatggggtaccacctacacccaacaagtcaatgagggacttctttttaatttggtaggattttgactggttttgcaacaataggtctattattagagtcacctatgacaaaaaagtgtgatctgtttggactatgttttcttttcttctcccacttgctcagcagcttgggcttccattctagttcttttaccaagatttttgtgtgaccatgttgacttcatttggattgccctctttcaatttccttgtgaaaacacccttaactttctctttacccttagctgaaatgtttacatagcttctggtgatatcttttcatgattttatatctcttaaaatggtgatggatgtgacacctcataaaagtgagctttgaactgtagataactcttaaagaaaatgtcattttagacaattaaaatatttgtgctcaactgcttgaacttttttcgtgtatgtgtatttaattctatgcaatattatcacatgtgtagattcatgtgaccaccatcacaagagacagaacagttctgtcacatggatcccttgcactgcccttttacagccgcagccacatccctttcttataccctcaccccaacctgtggctaccactgttctgtcctccatctctgtaattttgtcatttcaagaatgttgtatgaatggaatcatacagaatgtaatcttacaaggctgatcttttttcattcagcataattcccttgaaatccatccaagttgttgcatgtatgaatagtttcttcctttttttcttttaaaaatgttttatatatttagggggtataagtacagatttcttacatgcatatattgcatcgtggtgaagtgggggcagttccttttgattgctgagtagtattccatggtatggatgtaccacagtttgcttaaccattcacccactaaaggacataagagttgttttcagttttttgccctaataaagctgctgtgaacattcatgtacaggtttttatgtgaacatacattttcattttctgggataaatgctcaaaagggcaactgttgggttgtatggtaaacacatatatttttgtaagaaactaccctactctttttccagagtggctctactttttacatacagccactcatacaattcagacagcaatgtatgattgatccagtttcttcacatcctcaccagcatttggtattactactattttttatcttaaccattcacatagatgtgtgtaatgataccacatgtggttttaatttgcatttccaatggctaatgatgttgagtatctttttgtgtgctaatttgccatctatgtatcctcttcggtgaaatgtcttcatgtcttttgtctattttctatttaggtcatttgttctttttactattgagttttgagaggttttttatatatcctagataaaattcctctgttagatatgtggttgcttgaatttttaacataacttctaccaaggaaaaataagtaaaatttccaacccttgcatggccagtcacttacttaattcctgtccttcagtgttccatctagagaattaagagatatgatgtataaaatagacatcgagggccattaagagagtaaatacttaaaaatacatgttatgaaagcaaagccaataatcactgtaggagtatgagttgcctaagggccaaaactaatgtaaataagagaaagtgtggatataaatgaccattgtttataaacagttatgaaaaatgctgtgacttgaaatctttcccacatctcccaagaaagtaggtaggagtttatcctttccgtaatctctttttaaccctgctgactattacagggcttgtttaatcacagtggcaagaattacatgtatcttacagtaaagaaacagaatactggaatcgttagagaaccctgatgtgttgacctggataaagtacaaaggtggaagagggaatgagttatgctgttaaaatctcaggctattctgttaatgttcctgctactatgaacccaaactttttttttcccccttttgactccttgtgtcttcctctcctgtggcataaaagtagttctgtcgttaacttgtacaacattgccatctgctgttgagaattggtaggtactgcttctgagaacctggctgcagatccttagcataggcagcaaatgttgagaaagtctatctgtagtattacatatactaagttacagaggatgcattcaagtagagaaaataatatgtgggttaagatacatccttaaactttttttttttgggggggggggggacggagtcttgctgcaacgcccaggctggagtgcaatggcactatctcagctcgctgcaaccttcacctcctgggttcaagcaattctcctgcctcagcctcctgagtagctgggaatataggtgcacaccaccatgcctggctaatttttgtattttcagtagaagcagagtttcaccatattggccaggttggtctcgaactcctgacctcaagtgatctgcctgcctcagcctcccaaagtgctgggattacacgcgtgagccaccacacccagcctccatctttaaacttttaaatgtgaaatttctatcatgtaccgttagcctaacaagattttctttcctatttctgactggtgcctttcccctttttaggagcaacgaaagctactctcttagttatgttcttgtgatgtgacaaaatgtcaagaagataggagaagagaatattttatttcgttgatgcttttgttcccaagtgtgaccctaaacttaagctttgtaggagttgacattctttcatgtcccttccctttactcatgccgaaactatcaactgggacattttgtgcttttggtttaaaagttaattgatattatactttggttttatctaaaaagtaaatgtatttgcctttgacaaaagactgacacaagagcaaataagctttaaaatcgggtgttatgtgctttcctccatttttgagcatattatccaaaatggtctgtataatataaatgagaatgatgcagtttaagtaagccttgttataccattgtcatggacccctgtcataaagccatttcttggtttgtttgggaaagaggcatatgggatttatacagattcacttgtaaatgttggattggggatttttgtgtaaattttctcaaataaaggctagcagaaac

SEQ ID NO: 452887 - DNA, 2983 bp, Homo sapiens
tgaggcacggggtccccccggttccggcgcggttgaggccttcggtggtgaacgagtctccagcaccatgtctggtttgtctggcccaccagcccggcgcggcccttttccgttagcgttgctgcttttgttcctgctcggccccagattggtccttgccatctccttccatctgcccattaactctcgcaagtgcctccgtgaggagattcacaaggacctgctagtgactggcgcgtacgagatctccgaccagtctgggggcgctggcggcctgcgcagccacctcaagatcacagattctgctggccatattctctactccaaagaggatgcaaccaaggggaaatttgcctttaccactgaagattatgacatgtttgaagtgtgttttgagagcaagggaacagggcggatacctgaccaactcgtgatcctagacatgaagcatggagtggaggcgaaaaattacgaagagattgcaaaagttgagaagctcaaaccattagaggtagagctgcgacgcctagaagacctttcagaatctattgttaatgattttgcctacatgaagaagagagaagaggagatgcgtgataccaacgagtcaacaaacactcgggtcctatacttcagcatcttttcaatgttctgtctcattggactagctacctggcaggtcttctacctgcgacgcttcttcaaggccaagaaattgattgagtaatgaatgaggcatattctcctcccaccttgtacctcagccagcagaacatcgctgggacgtgcctggcctaaggcatcctaccaacagcaccatcaaggcacgttggagctttcttgccagaactgatctcttttggtgtgggaggacatggggtaccacctacacccaacaagtcaatgagggacttctttttaatttggtaggattttgactggttttgcaacaataggtctattattagagtcacctatgacaaaaaataggggttacctagataatgccaaagtcagcatttgtcctgggttcccttgtgtgatctgtttggactatgttttcttttcttctcccacttgctcagcagcttgggcttccattctagttcttttaccaagatttttgtgtgaccatgttgacttcatttggattgccctctttcaatttccttgtgaaaacacccttaactttctctttacccttagctgaaatgtttacatagcttctggtgatatcttttcatgattttatatctcttaaaatggtgatggatgtgacacctcataaaagtgagctttgaactgtagataactcttaaagaaaatgtcattttagacaattaaaatatttgtgctcaactgcttgaacttttttcgtgtatgtgtatttaattctatgcaatattatcacatgtgtagattcatgtgaccaccatcacaagagacagaacagttctgtcacatggatcccttgcactgcccttttacagccgcagccacatccctttcttataccctcaccccaacctgtggctaccactgttctgtcctccatctctgtaattttgtcatttcaagaatgttgtatgaatggaatcatacagaatgtaatcttacaaggctgatcttttttcattcagcataattcccttgaaatccatccaagttgttgcatgtatgaatagtttcttcctttttttcttttaaaaatgttttatatatttagggggtataagtacagatttcttacatgcatatattgcatcgtggtgaagtgggggcagttccttttgattgctgagtagtattccatggtatggatgtaccacagtttgcttaaccattcacccactaaaggacataagagttgttttcagttttttgccctaataaagctgctgtgaacattcatgtacaggtttttatgtgaacatacattttcattttctgggataaatgctcaaaagggcaactgttgggttgtatggtaaacacatatatttttgtaagaaactaccctactctttttccagagtggctctactttttacatacagccactcatacaattcagacagcaatgtatgattgatccagtttcttcacatcctcaccagcatttggtattactactattttttatcttaaccattcacatagatgtgtgtaatgataccacatgtggttttaatttgcatttccaatggctaatgatgttgagtatctttttgtgtgctaatttgccatctatgtatcctcttcggtgaaatgtcttcatgtcttttgtctattttctatttaggtcatttgttctttttactattgagttttgagaggttttttatatatcctagataaaattcctctgttagatatgtggttgcttgaatttttaacataacttctaccaaggaaaaataagtaaaatttccaacccttgcatggccagtcacttacttaattcctgtccttcagtgttccatctagagaattaagagatatgatgtataaaatagacatcgagggccattaagagagtaaatacttaaaaatacatgttatgaaagcaaagccaataatcactgtaggagtatgagttgcctaagggccaaaactaatgtaaataagagaaagtgtggatataaatgaccattgtttataaacagttatgaaaaatgctgtgacttgaaatctttcccacatctcccaagaaagtaggtaggagtttatcctttccgtaatctctttttaaccctgctgactattacagggcttgtttaatcacagtggcaagaattacatgtatcttacagtaaagaaacagaatactggaatcgttagagagtctccgtcgaactagttcgacggagactctctgattcctctgagaaagcagaagcctgtggctttctctaaggactgggagacagaaacaacttggtttgtactttcttagagtggagtagatcccagagagaaggga

SEQ ID NO: 452888 - DNA, 4084 bp, Homo sapiens
tgaggcacggggtccccccggttccggcgcggttgaggccttcggtggtgaacgagtctccagcaccatgtctggtttgtctggcccaccagcccggcgcggcccttttccgttagcgttgctgcttttgttcctgctcggccccagattggtccttgccatctccttccatctgcccattaactctcgcaagtgcctccgtgaggagattcacaaggacctgctagtgactggcgcgtacgagatctccgaccagtctgggggcgctggcggcctgcgcagccacctcaagatcacagattctgctggccatattctctactccaaagaggatgcaaccaaggggaaatttgcctttaccactgaagattatgacatgtttgaagtgtgttttgagagcaagggaacagggcggatacctgaccaactcgtgatcctagacatgaagcatggagtggaggcgaaaaattacgaagagctttcagaatctattgttaatgattttgcctacatgaagaagagagaagaggagatgcgtgataccaacgagtcaacaaacactcgggtcctatacttcagcatcttttcaatgttctgtctcattggactagctacctggcaggtcttctacctgcgacgcttcttcaaggccaagaaattgattgagtaatgaatgaggcatattctcctcccaccttgtacctcagccagcagaacatcgctgggacgtgcctggcctaaggcatcctaccaacagcaccatcaaggcacgttggagctttcttgccagaactgatctcttttggtgtgggaggacatggggtaccacctacacccaacaagtcaatgagggacttctttttaatttggtaggattttgactggttttgcaacaataggtctattattagagtcacctatgacaaaaaataggggttacctagataatgccaaagtcagcatttgtcctgggttcccttgtgtgatctgtttggactatgttttcttttcttctcccacttgctcagcagcttgggcttccattctagttcttttaccaagatttttgtgtgaccatgttgacttcatttggattgccctctttcaatttccttgtgaaaacacccttaactttctctttacccttagctgaaatgtttacatagcttctggtgatatcttttcatgattttatatctcttaaaatggtgatggatgtgacacctcataaaagtgagctttgaactgtagataactcttaaagaaaatgtcattttagacaattaaaatatttgtgctcaactgcttgaacttttttcgtgtatgtgtatttaattctatgcaatattatcacatgtgtagattcatgtgaccaccatcacaagagacagaacagttctgtcacatggatcccttgcactgcccttttacagccgcagccacatccctttcttataccctcaccccaacctgtggctaccactgttctgtcctccatctctgtaattttgtcatttcaagaatgttgtatgaatggaatcatacagaatgtaatcttacaaggctgatcttttttcattcagcataattcccttgaaatccatccaagttgttgcatgtatgaatagtttcttcctttttttcttttaaaaatgttttatatatttagggggtataagtacagatttcttacatgcatatattgcatcgtggtgaagtgggggcagttccttttgattgctgagtagtattccatggtatggatgtaccacagtttgcttaaccattcacccactaaaggacataagagttgttttcagttttttgccctaataaagctgctgtgaacattcatgtacaggtttttatgtgaacatacattttcattttctgggataaatgctcaaaagggcaactgttgggttgtatggtaaacacatatatttttgtaagaaactaccctactctttttccagagtggctctactttttacatacagccactcatacaattcagacagcaatgtatgattgatccagtttcttcacatcctcaccagcatttggtattactactattttttatcttaaccattcacatagatgtgtgtaatgataccacatgtggttttaatttgcatttccaatggctaatgatgttgagtatctttttgtgtgctaatttgccatctatgtatcctcttcggtgaaatgtcttcatgtcttttgtctattttctatttaggtcatttgttctttttactattgagttttgagaggttttttatatatcctagataaaattcctctgttagatatgtggttgcttgaatttttaacataacttctaccaaggaaaaataagtaaaatttccaacccttgcatggccagtcacttacttaattcctgtccttcagtgttccatctagagaattaagagatatgatgtataaaatagacatcgagggccattaagagagtaaatacttaaaaatacatgttatgaaagcaaagccaataatcactgtaggagtatgagttgcctaagggccaaaactaatgtaaataagagaaagtgtggatataaatgaccattgtttataaacagttatgaaaaatgctgtgacttgaaatctttcccacatctcccaagaaagtaggtaggagtttatcctttccgtaatctctttttaaccctgctgactattacagggcttgtttaatcacagtggcaagaattacatgtatcttacagtaaagaaacagaatactggaatcgttagagaaccctgatgtgttgacctggataaagtacaaaggtggaagagggaatgagttatgctgttaaaatctcaggctattctgttaatgttcctgctactatgaacccaaactttttttttcccccttttgactccttgtgtcttcctctcctgtggcataaaagtagttctgtcgttaacttgtacaacattgccatctgctgttgagaattggtaggtactgcttctgagaacctggctgcagatccttagcataggcagcaaatgttgagaaagtctatctgtagtattacatatactaagttacagaggatgcattcaagtagagaaaataatatgtgggttaagatacatccttaaactttttttttttgggggggggggggacggagtcttgctgcaacgcccaggctggagtgcaatggcactatctcagctcgctgcaaccttcacctcctgggttcaagcaattctcctgcctcagcctcctgagtagctgggaatataggtgcacaccaccatgcctggctaatttttgtattttcagtagaagcagagtttcaccatattggccaggttggtctcgaactcctgacctcaagtgatctgcctgcctcagcctcccaaagtgctgggattacacgcgtgagccaccacacccagcctccatctttaaacttttaaatgtgaaatttctatcatgtaccgttagcctaacaagattttctttcctatttctgactggtgcctttcccctttttaggagcaacgaaagctactctcttagttatgttcttgtgatgtgacaaaatgtcaagaagataggagaagagaatattttatttcgttgatgcttttgttcccaagtgtgaccctaaacttaagctttgtaggagttgacattctttcatgtcccttccctttactcatgccgaaactatcaactgggacattttgtgcttttggtttaaaagttaattgatattatactttggttttatctaaaaagtaaatgtatttgcctttgacaaaagactgacacaagagcaaataagctttaaaatcgggtgttatgtgctttcctccatttttgagcatattatccaaaatggtctgtataatataaatgagaatgatgcagtttaagtaagccttgttataccattgtcatggacccctgtcataaagccatttcttggtttgtttgggaaagaggcatatgggatttatacagattcacttgtaaatgttggattggggatttttgtgtaaattttctcaaataaaggctagcagaaac

SEQ ID NO: 452889 - DNA, 3778 bp, Homo sapiens
agcagggggaggagttgtggctgtttccctctattgagagggaacagggcggatacctgaccaactcgtgatcctagacatgaagcatggagtggaggcgaaaaattacgaagagattgcaaaagttgagaagctcaaaccattagaggtagagctgcgacgcctagaagacctttcagaatctattgttaatgattttgcctacatgaagaagagagaagaggagatgcgtgataccaacgagtcaacaaacactcgggtcctatacttcagcatcttttcaatgttctgtctcattggactagctacctggcaggtcttctacctgcgacgcttcttcaaggccaagaaattgattgagtaatgaatgaggcatattctcctcccaccttgtacctcagccagcagaacatcgctgggacgtgcctggcctaaggcatcctaccaacagcaccatcaaggcacgttggagctttcttgccagaactgatctcttttggtgtgggaggacatggggtaccacctacacccaacaagtcaatgagggacttctttttaatttggtaggattttgactggttttgcaacaataggtctattattagagtcacctatgacaaaaaataggggttacctagataatgccaaagtcagcatttgtcctgggttcccttgtgtgatctgtttggactatgttttcttttcttctcccacttgctcagcagcttgggcttccattctagttcttttaccaagatttttgtgtgaccatgttgacttcatttggattgccctctttcaatttccttgtgaaaacacccttaactttctctttacccttagctgaaatgtttacatagcttctggtgatatcttttcatgattttatatctcttaaaatggtgatggatgtgacacctcataaaagtgagctttgaactgtagataactcttaaagaaaatgtcattttagacaattaaaatatttgtgctcaactgcttgaacttttttcgtgtatgtgtatttaattctatgcaatattatcacatgtgtagattcatgtgaccaccatcacaagagacagaacagttctgtcacatggatcccttgcactgcccttttacagccgcagccacatccctttcttataccctcaccccaacctgtggctaccactgttctgtcctccatctctgtaattttgtcatttcaagaatgttgtatgaatggaatcatacagaatgtaatcttacaaggctgatcttttttcattcagcataattcccttgaaatccatccaagttgttgcatgtatgaatagtttcttcctttttttcttttaaaaatgttttatatatttagggggtataagtacagatttcttacatgcatatattgcatcgtggtgaagtgggggcagttccttttgattgctgagtagtattccatggtatggatgtaccacagtttgcttaaccattcacccactaaaggacataagagttgttttcagttttttgccctaataaagctgctgtgaacattcatgtacaggtttttatgtgaacatacattttcattttctgggataaatgctcaaaagggcaactgttgggttgtatggtaaacacatatatttttgtaagaaactaccctactctttttccagagtggctctactttttacatacagccactcatacaattcagacagcaatgtatgattgatccagtttcttcacatcctcaccagcatttggtattactactattttttatcttaaccattcacatagatgtgtgtaatgataccacatgtggttttaatttgcatttccaatggctaatgatgttgagtatctttttgtgtgctaatttgccatctatgtatcctcttcggtgaaatgtcttcatgtcttttgtctattttctatttaggtcatttgttctttttactattgagttttgagaggttttttatatatcctagataaaattcctctgttagatatgtggttgcttgaatttttaacataacttctaccaaggaaaaataagtaaaatttccaacccttgcatggccagtcacttacttaattcctgtccttcagtgttccatctagagaattaagagatatgatgtataaaatagacatcgagggccattaagagagtaaatacttaaaaatacatgttatgaaagcaaagccaataatcactgtaggagtatgagttgcctaagggccaaaactaatgtaaataagagaaagtgtggatataaatgaccattgtttataaacagttatgaaaaatgctgtgacttgaaatctttcccacatctcccaagaaagtaggtaggagtttatcctttccgtaatctctttttaaccctgctgactattacagggcttgtttaatcacagtggcaagaattacatgtatcttacagtaaagaaacagaatactggaatcgttagagaaccctgatgtgttgacctggataaagtacaaaggtggaagagggaatgagttatgctgttaaaatctcaggctattctgttaatgttcctgctactatgaacccaaactttttttttcccccttttgactccttgtgtcttcctctcctgtggcataaaagtagttctgtcgttaacttgtacaacattgccatctgctgttgagaattggtaggtactgcttctgagaacctggctgcagatccttagcataggcagcaaatgttgagaaagtctatctgtagtattacatatactaagttacagaggatgcattcaagtagagaaaataatatgtgggttaagatacatccttaaactttttttttttgggggggggggggacggagtcttgctgcaacgcccaggctggagtgcaatggcactatctcagctcgctgcaaccttcacctcctgggttcaagcaattctcctgcctcagcctcctgagtagctgggaatataggtgcacaccaccatgcctggctaatttttgtattttcagtagaagcagagtttcaccatattggccaggttggtctcgaactcctgacctcaagtgatctgcctgcctcagcctcccaaagtgctgggattacacgcgtgagccaccacacccagcctccatctttaaacttttaaatgtgaaatttctatcatgtaccgttagcctaacaagattttctttcctatttctgactggtgcctttcccctttttaggagcaacgaaagctactctcttagttatgttcttgtgatgtgacaaaatgtcaagaagataggagaagagaatattttatttcgttgatgcttttgttcccaagtgtgaccctaaacttaagctttgtaggagttgacattctttcatgtcccttccctttactcatgccgaaactatcaactgggacattttgtgcttttggtttaaaagttaattgatattatactttggttttatctaaaaagtaaatgtatttgcctttgacaaaagactgacacaagagcaaataagctttaaaatcgggtgttatgtgctttcctccatttttgagcatattatccaaaatggtctgtataatataaatgagaatgatgcagtttaagtaagccttgttataccattgtcatggacccctgtcataaagccatttcttggtttgtttgggaaagaggcatatgggatttatacagattcacttgtaaatgttggattggggatttttgtgtaaattttctcaaataaaggctagcagaaac

SEQ ID NO: 452890 - DNA, 4073 bp, Homo sapiens
  misc_feature (357)..(357): n is a, c, g, or t
  misc_feature (361)..(361): n is a, c, g, or t
cgagtgctctactgcgggtgctctactcgcgggtgttctacctcgcgtgtgctctcctcgctcctagatgggatggcggcgggcagagacgctcctcactttccagactgggcagccaggcagaggggctcctcatatcccagacgatgggcggccaggcagagacgctcctcacttcccagacggggtggcggccgggcagaggctgcaatctcggctctttgggaggccaaggcaggcggctgggaggtggttgtagcgagccgagatcacgccactgcactccagccttggcaccattgagcactgagtgaacgagactccgtctgcaatcccggcacctcgggaggccgaggntggnggatcactcgcggttaggagctggagtggaggcgaaaaattacgaagagattgcaaaagttgagaagctcaaaccattagaggtagagctgcgacgcctagaagacctttcagaatctattgttaatgattttgcctacatgaagaagagagaagaggagatgcgtgataccaacgagtcaacaaacactcgggtcctatacttcagcatcttttcaatgttctgtctcattggactagctacctggcaggtcttctacctgcgacgcttcttcaaggccaagaaattgattgagtaatgaatgaggcatattctcctcccaccttgtacctcagccagcagaacatcgctgggacgtgcctggcctaaggcatcctaccaacagcaccatcaaggcacgttggagctttcttgccagaactgatctcttttggtgtgggaggacatggggtaccacctacacccaacaagtcaatgagggacttctttttaatttggtaggattttgactggttttgcaacaataggtctattattagagtcacctatgacaaaaaataggggttacctagataatgccaaagtcagcatttgtcctgggttcccttgtgtgatctgtttggactatgttttcttttcttctcccacttgctcagcagcttgggcttccattctagttcttttaccaagatttttgtgtgaccatgttgacttcatttggattgccctctttcaatttccttgtgaaaacacccttaactttctctttacccttagctgaaatgtttacatagcttctggtgatatcttttcatgattttatatctcttaaaatggtgatggatgtgacacctcataaaagtgagctttgaactgtagataactcttaaagaaaatgtcattttagacaattaaaatatttgtgctcaactgcttgaacttttttcgtgtatgtgtatttaattctatgcaatattatcacatgtgtagattcatgtgaccaccatcacaagagacagaacagttctgtcacatggatcccttgcactgcccttttacagccgcagccacatccctttcttataccctcaccccaacctgtggctaccactgttctgtcctccatctctgtaattttgtcatttcaagaatgttgtatgaatggaatcatacagaatgtaatcttacaaggctgatcttttttcattcagcataattcccttgaaatccatccaagttgttgcatgtatgaatagtttcttcctttttttcttttaaaaatgttttatatatttagggggtataagtacagatttcttacatgcatatattgcatcgtggtgaagtgggggcagttccttttgattgctgagtagtattccatggtatggatgtaccacagtttgcttaaccattcacccactaaaggacataagagttgttttcagttttttgccctaataaagctgctgtgaacattcatgtacaggtttttatgtgaacatacattttcattttctgggataaatgctcaaaagggcaactgttgggttgtatggtaaacacatatatttttgtaagaaactaccctactctttttccagagtggctctactttttacatacagccactcatacaattcagacagcaatgtatgattgatccagtttcttcacatcctcaccagcatttggtattactactattttttatcttaaccattcacatagatgtgtgtaatgataccacatgtggttttaatttgcatttccaatggctaatgatgttgagtatctttttgtgtgctaatttgccatctatgtatcctcttcggtgaaatgtcttcatgtcttttgtctattttctatttaggtcatttgttctttttactattgagttttgagaggttttttatatatcctagataaaattcctctgttagatatgtggttgcttgaatttttaacataacttctaccaaggaaaaataagtaaaatttccaacccttgcatggccagtcacttacttaattcctgtccttcagtgttccatctagagaattaagagatatgatgtataaaatagacatcgagggccattaagagagtaaatacttaaaaatacatgttatgaaagcaaagccaataatcactgtaggagtatgagttgcctaagggccaaaactaatgtaaataagagaaagtgtggatataaatgaccattgtttataaacagttatgaaaaatgctgtgacttgaaatctttcccacatctcccaagaaagtaggtaggagtttatcctttccgtaatctctttttaaccctgctgactattacagggcttgtttaatcacagtggcaagaattacatgtatcttacagtaaagaaacagaatactggaatcgttagagaaccctgatgtgttgacctggataaagtacaaaggtggaagagggaatgagttatgctgttaaaatctcaggctattctgttaatgttcctgctactatgaacccaaactttttttttcccccttttgactccttgtgtcttcctctcctgtggcataaaagtagttctgtcgttaacttgtacaacattgccatctgctgttgagaattggtaggtactgcttctgagaacctggctgcagatccttagcataggcagcaaatgttgagaaagtctatctgtagtattacatatactaagttacagaggatgcattcaagtagagaaaataatatgtgggttaagatacatccttaaactttttttttttgggggggggggggacggagtcttgctgcaacgcccaggctggagtgcaatggcactatctcagctcgctgcaaccttcacctcctgggttcaagcaattctcctgcctcagcctcctgagtagctgggaatataggtgcacaccaccatgcctggctaatttttgtattttcagtagaagcagagtttcaccatattggccaggttggtctcgaactcctgacctcaagtgatctgcctgcctcagcctcccaaagtgctgggattacacgcgtgagccaccacacccagcctccatctttaaacttttaaatgtgaaatttctatcatgtaccgttagcctaacaagattttctttcctatttctgactggtgcctttcccctttttaggagcaacgaaagctactctcttagttatgttcttgtgatgtgacaaaatgtcaagaagataggagaagagaatattttatttcgttgatgcttttgttcccaagtgtgaccctaaacttaagctttgtaggagttgacattctttcatgtcccttccctttactcatgccgaaactatcaactgggacattttgtgcttttggtttaaaagttaattgatattatactttggttttatctaaaaagtaaatgtatttgcctttgacaaaagactgacacaagagcaaataagctttaaaatcgggtgttatgtgctttcctccatttttgagcatattatccaaaatggtctgtataatataaatgagaatgatgcagtttaagtaagccttgttataccattgtcatggacccctgtcataaagccatttcttggtttgtttgggaaagaggcatatgggatttatacagattcacttgtaaatgttggattggggatttttgtgtaaattttctcaaataaaggctagcagaaac

SEQ ID NO: 452891 - DNA, 641 bp, Homo sapiens
gatagcagccttttaaggtccctatcaaggctgctatctctggatttaaggtttggcctccaagtcatgagtcttgagttctgagatagcagcctcgatagggaccttaaaaggattcacaaaaacttttgccacacttggtgcctaggccctgttcctaataaccccttctagggccgtttatccaacatttagatgccttcttttccctccctaatttgtagccagtccaacctttcattccttggaggatttagttttgggataaaattttggtccttgggcacagagacattcactattaatgaagtaacccttgggcatgactccaatcccagaattgctcactgagcgctatgccaccgaagcgttgacctgaacatattagtgcaatccagtccagattggacctttgatcctatgtggaagggctgttttttaagaaaaaatttttggtaaacagtattgtgtaaaattgctttttgtataccaatatatgcatgttttgtgcatgagtagtacttgtgttgatactcctgttgatgttaaattactatataatataaacagtatgtgtttttatatatcattgtgtaaatttaatataacatatgcagtaataaaccatttgttttactgct

SEQ ID NO: 452892 - DNA, 2968 bp, Homo sapiens
ccccaaatctgcagatgtgaatcccaagtaccagtgtgatctggtgtctaaaaacgggaatgatgtatatcgctatcccagtccacttcatgctgtggctgtgcagagcccaatgtttctcctttgtctgacgggcaaccctctgagggaagaggacaggcttggaaaccatgccagtgacatttgcggtggatctgagctagatgccgtcaaaacagacagttccttaccgtccccaagcagtctgtggtctgcttcccatccttcatccagcaagaaaatggatggctacattctgagcctggtccagaaaaaaacacaccctgtaaggaccaacaaaccaagaaccagcgtgaacgctgaccccacgaaagggcttctgaggaacgggagcgtttgtgtcagagccccgggcggtgtctcacagggcaacagtgtgaaccttaagaattcgaaacaggcgtgtctgccctctggcgggataccttctctgaacaatgggacattctccccaccgaagcagtggtcgaaagaatcaaaggccgaacaagccgaaagcaagagggtgcccctgccagagggctgcccctcaggcgctgcctccgaccttcagagtaagcacctgccaaaaacggccaagccagcctcgcaagaacatgttcggtgttccgccattgggacaggggagtcccctaaggaaagcgctcagctctcaggggcctctccaaaagagagtcctagcagaggccctgccccgccgcaggagaacaaagttgtacagcccctgaaaaagatgtcacagaaaaacagcctgcagggcgtccccccggccactcctcccctgctgtctacagctttccccgtggaagagaggcctgccttggatttcaagagcgagggctcttcccaaagcctggaggaagcgcacctggtcaaggcccagtttatcccggggcagcagcccagtgtcaggctccaccggggccacaggaacatgggcgtcgtgaagaactccagcctgaagcaccgcggcccagccctccaggggctggagaacggcttgcccaccgtcagggagaaaacgcgggccgggagcaagaagtgtcgcttcccagatgacttggatacaaataagaaactcaagaaagcctcctccaaggggaggaagagtgggggcgggcccgaggctggtgttcccggcaggcccgcgggcgggggccacagggcggggagcagggcgcatggccacggacgggaggcggtggtggccaaacctaagcacaagcgaactgactaccggcggtggaagtcctcggccgagatttcctacgaagaggccctgaggagggcccggcgcggtcgccgggagaatgtggggctgtaccccgcgcctgtgcctctgccctacgccagcccctacgcctacgtggctagcgactccgagtactcggccgagtgcgagtccctgttccactccaccgtggtggacaccagtgaggacgagcagagcaattacaccaccaactgcttcggggacagcgagtcgagtgtgagcgagggcgagttcgtgggggagagcacaaccaccagcgactctgaagaaagcgggggcttaatttggtcccagtttgtccagactctgcccattcaaacggtaacggccccagaccttcacaaccaccccgcaaaaacctttgtcaaaattaaggcctcacataacctcaagaagaagatcctccgctttcggtctggctctttgaaactgatgacgacggtttgagtgacatcattggtgtagaaagtttgtgtgtttttttttcttctccctagttgccaaaattaaaaaggtggtgttttcatttttgtataatactttaatggaatgctttttaaaaaaatataaaaccaaggtaaattattgtttcatcttcacgtatggatgctagtgcctttaatggaaggtaaagaatgttttgctagttagaagtacatattgaggttttaatggtggtgatagtgagttttgtggcaccagctgttttttattttaaactttctgagcatccggcaaggtacaggttttgatgttcaagttttattgggataagatcttttgatcccaaggtcaggtggatggaatttttggatttatatttgttccttgagtcttcagggcagtgtctccatgagggttttcctgttgaggggcaccacatacaatagtgtgaagtaggtatgaggggcagtcattgtattctatagtttttttatgtagtctacatttctcagatgtatccccattcggttttattctcagaactgttactagactcatgacttggaggccaaaccttaaatccagagatagcagcctcgatagggaccttaaaaggattcacaaaaacttttgccacacttggtgcctaggccctgttcctaataaccccttctagggccgtttatccaacatttagatgccttcttttccctccctaatttgtagccagtccaacctttcattccttggaggatttagttttgggataaaattttggtccttgggcacagagacattcactattaatgaagtaacccttgggcatgactccaatcccagaattgctcactgagcgctatgccaccgaagcgttgacctgaacatattagtgcaatccagtccagattggacctttgatcctatgtggaagggctgttttttaagaaaaaatttttggtaaacagtattgtgtaaaattgctttttgtataccaatatatgcatgttttgtgcatgagtagtacttgtgttgatactcctgttgatgttaaattactatataatataaacagtatgtgtttttatatatcattgtgtaaatttaatataacatatgcagtaataaaccatttgttttactgctgttaagtttgttatttgggtataaaaccagatgtttacacctgtaaaa

SEQ ID NO: 452893 - DNA, 326 bp, Homo sapiens
tggactggattgcacaaatatgtcaggttggacctttgatcctatgtggaagggctgttttttcttaaaaaaacagcccttccacattaggatcaaaggtcaatttttgaattgccttgttttttaagaaaaaatttttggtaaacagtattgtgtaaaattgctttttgtataccaatatatgcatgttttgtgcatgagtagtacttgtgttgatactcctgttgatgttaaattactatataatataaacagtatgtgtttttatatatcattgtgtaaatttaatataacatatgcagtaataaaccatttgttttactgct

SEQ ID NO: 452894 - DNA, 2920 bp, Homo sapiens
ccccaaatctgcagatgtgaatcccaagtaccagtgtgatctggtgtctaaaaacgggaatgatgtatatcgctatcccagtccacttcatgctgtggctgtgcagagcccaatgtttctcctttgtctgacgggcaaccctctgagggaagaggacaggcttggaaaccatgccagtgacatttgcggtggatctgagctagatgccgtcaaaacagacagttccttaccgtccccaagcagtctgtggtctgcttcccatccttcatccagcaagaaaatggatggctacattctgagcctggtccagaaaaaaacacaccctgtaaggaccaacaaaccaagaaccagcgtgaacgctgaccccacgaaagggcttctgaggaacgggagcgtttgtgtcagagccccgggcggtgtctcacagggcaacagtgtgaaccttaagaattcgaaacaggcgtgtctgccctctggcgggataccttctctgaacaatgggacattctccccaccgaagcagtggtcgaaagaatcaaaggccgaacaagccgaaagcaagagggtgcccctgccagagggctgcccctcaggcgctgcctccgaccttcagagtaagcacctgccaaaaacggccaagccagcctcgcaagaacatgttcggtgttccgccattgggacaggggagtcccctaaggaaagcgctcagctctcaggggcctctccaaaagagagtcctagcagaggccctgccccgccgcaggagaacaaagttgtacagcccctgaaaaagatgtcacagaaaaacagcctgcagggcgtccccccggccactcctcccctgctgtctacagctttccccgtggaagagaggcctgccttggatttcaagagcgagggctcttcccaaagcctggaggaagcgcacctggtcaaggcccagtttatcccggggcagcagcccagtgtcaggctccaccggggccacaggaacatgggcgtcgtgaagaactccagcctgaagcaccgcggcccagccctccaggggctggagaacggcttgcccaccgtcagggagaaaacgcgggccgggagcaagaagtgtcgcttcccagatgacttggatacaaataagaaactcaagaaagcctcctccaaggggaggaagagtgggggcgggcccgaggctggtgttcccggcaggcccgcgggcgggggccacagggcggggagcagggcgcatggccacggacgggaggcggtggtggccaaacctaagcacaagcgaactgactaccggcggtggaagtcctcggccgagatttcctacgaagaggccctgaggagggcccggcgcggtcgccgggagaatgtggggctgtaccccgcgcctgtgcctctgccctacgccagcccctacgcctacgtggctagcgactccgagtactcggccgagtgcgagtccctgttccactccaccgtggtggacaccagtgaggacgagcagagcaattacaccaccaactgcttcggggacagcgagtcgagtgtgagcgagggcgagttcgtgggggagagcacaaccaccagcgactctgaagaaagcgggggcttaatttggtcccagtttgtccagactctgcccattcaaacggtaacggccccagaccttcacaaccaccccgcaaaaacctttgtcaaaattaaggcctcacataacctcaagaagaagatcctccgctttcggtctggctctttgaaactgatgacgacggtttgagtgacatcattggtgtagaaagtttgtgtgtttttttttcttctccctagttgccaaaattaaaaaggtggtgttttcatttttgtataatactttaatggaatgctttttaaaaaaatataaaaccaaggtaaattattgtttcatcttcacgtatggatgctagtgcctttaatggaaggtaaagaatgttttgctagttagaagtacatattgaggttttaatggtggtgatagtgagttttgtggcaccagctgttttttattttaaactttctgagcatccggcaaggtacaggttttgatgttcaagttttattgggataagatcttttgatcccaaggtcaggtggatggaatttttggatttatatttgttccttgagtcttcagggcagtgtctccatgagggttttcctgttgaggggcaccacatacaatagtgtgaagtaggtatgaggggcagtcattgtattctatagtttttttatgtagtctacatttctcagatgtatccccattcggttttattctcagaactgttactagactcatgacttggaggccaaaccttaaatccagagatagcagcctcgatagggaccttaaaaggattcacaaaaacttttgccacacttggtgcctaggccctgttcctaataaccccttctagggccgtttatccaacatttagatgccttcttttccctccctaatttgtagccagtccaacctttcattccttggaggatttagttttgggataaaattttggtccttgggcacagagacattcactattaatgaagtaacccttgggcatgactccaatcccagaattgctcactgagcgctatgccaccgaagcgttgacctgaacatattagtgcaatccagtccagattggacctttgatcctatgtggaagggctgttttttaagaaaaaatttttggtaaacagtattgtgtaaaattgctttttgtataccaatatatgcatgttttgtgcatgagtagtacttgtgttgatactcctgttgatgttaaattactatataatataaacagtatgtgtttttatatatcattgtgtaaatttaatataacatatgcagtaataaaccatttgttttactgct

SEQ ID NO: 452895 - DNA, 595 bp, Homo sapiens
aagagacaacttctgttgggtgttggccagtgtccctcgtccccccaccctgggtccccactgctttacctcttgctttgcagccttctctcctcacagccttcctgtggctgtgtttttggccctgatagccccatggcacaactgcactttgcctcacctaggcctgtggcttcttgcctggcaggtgccacttctccacttttaagcagtgccaagagtggctctcacggctaagccgagccacagcaagacctgccaagcctgaagacctctttgcctttgcctaccatgcctggtgcctggggctgaccgaggaggaccagcacactcacctatgtcagccaggtgagcacatacgttgtcgacaggaggcggagcttgcaaggatgggctttgacctgcagaacgtctggagagtctcacacatcaacagcaactacaagtgagagggttggggaccaaaacaccttccacaccaaactacttccgtgtttggataaagtgtggtgggcacagcttctgagtctgagagggaggaaggctcatggtttctcttcccacaaagccatccccagggatcctgtcatcacat

SEQ ID NO: 452896 - DNA, 324 bp, Homo sapiens
ttacaaaaacaggcagtgggctagtttggcctgtgggccatagcttgccaacccctggtttagaacataacaagagtctttctatgctgtggtgtagcatatcggtaagagtgtaaatctgaagctacaatactaggttcaaatcccagctttactacgtatcagctctttctctgtggcttcattttcttatttgtaaaatgggggtattagtagtatacattgtaagactgtcataagaaataagttcatgtgtgtaatgcacttagcacagtgcctgacacatggtaaacagtaagcgttaatgatgatgaagataatttg

SEQ ID NO: 452897 - DNA, 5798 bp, Homo sapiens
gcgagtaacgggatagcgcggctcagagggtcgggcggacgccgcctggtgagaagcaggcagccagtacccttgccacggtagaatgggtgaggaggggccccccagcctggagtacatccaagccaaggatctgttcccccccaaggaactagtgaaggaggaagagaatcttcaggtccccttcacagtgctgcagggtgagggagtagagttcctgggccgggcagccgatgccctcattgccatctctaactaccggctgcatatcaaattcaaggactctgtcatcaacgtccccctccggatgattgacagtgtggagagccgtgatatgttccagttgcacatttcctgcaaggactccaaagtggtgaggtgccacttctccacttttaagcagtgccaagagtggctctcacggctaagccgagccacagcaagacctgccaagcctgaagacctctttgcctttgcctaccatgcctggtgcctggggctgaccgaggaggaccagcacactcacctatgtcagccaggtgagcacatacgttgtcgacaggaggcggagcttgcaaggatgggctttgacctgcagaacgtctggagagtctcacacatcaacagcaactacaaattgtgccccagttacccccagaagctgctggttcctgtgtggatcactgacaaagagctggagaacgtggcttccttccgctcctggaagcggattcccgtggttgtgtatagacacttgcgcaatggggctgccatcgcccgctgcagccagccagagatcagctggtggggctggcgcaatgctgatgatgagtacctggtcacgtccattgctaaagcctgtgccctggacccggggacaagggccactgggggctccctcagcaccgggaataatgataccagcgaggcgtgtgatgctgactttgattcttctctgactgcgtgctctggagtggagagcacagcagctcctcaaaagctgctgatcctggatgcgcgatcctacacggcagcagtggccaaccgggccaagggtggaggctgtgaatgtgaagagtactatcccaactgtgaggtcgtgttcatgggaatggccaacatccatgccatccggaacagctttcagtacctccgggctgtgtgtagccagatgccggatcctagcaactggttgtcggcactggagagtaccaaatggctgcagcacttgtcggtgatgctaaaagcagctgtgctggtggctaatacagtagaccgggaaggccggcctgtgctggtacactgctcagatggctgggaccgcacaccgcagatcgtagccctggccaaaatattactggacccatattacaggacgttggagggcttccaagtgttagtggagtctgactggctggattttgggcacaagtttggagatcgctgtggccaccaagagaatgtggaggaccaaaacgaacaatgccctgtgttcctccagtggcttgattctgttcatcagttgcttaagcagttcccctgcctgtttgaatttaatgaagcattcctggtaaaactggtgcaacacacatactcctgcctctacggcaccttcctggccaacaacccctgtgagcgagagaagcgcaacatctacaagcggacctgctctgtgtgggcgctccttcgagctggcaataaaaactttcataacttcctctacacacccagctcagacatggtcctgcatcctgtttgtcatgtccgggccctgcacctctggacagctgtttatctgccagcatcatctccatgcacacttggggaagaaaacatggatctttacctttccccagtggcccagagccaggagttctctggccgctctctggacagattacctaaaaccagatccatggatgatcttctttctgcctgtgacacaagcagccccctgactcgtacatccagtgaccctaacctgaataaccactgtcaggaggtcagggtaggcctggagccctggcacagcaatcctgagggatcagagacaagctttgtggactctggggtaggagggcctcagcaaactgtaggagaagtgggtcttcctcctcctctgcccagcagccagaaagactacttgagcaataaacctttcaagagtcacaaaagctgttctccaagttacaaactgcttaataccgcagtgcctcgggaaatgaagagcaacacctctgatcctgagatcaaagtcctagaagagactaagggaccagctccagacccttctgcccaggatgagctgggtaggactttagatggcataggggagccacctgaacattgtcctgaaacagaagctgtcagtgcactctccaaggtcatttctaacaagtgtgatggagtttgtaattttcctgagtcttcccagaactctcctacaggtacgccccaacaggcccagccagactccatgctaggtgtgccctccaagtgtgttcttgatcacagcctcagcaccgtttgcaacccaccgagtgctgcctgccaaactcctctagacccaagcactgacttcctcaaccaagatccctcagggtctgtggcaagtatctcccaccaggaacaactgagttctgtgccggatctgacccatggggaggaagacattggtaaaagaggaaataataggaatgggcagttattggaaaatcctcgctttgggaaaatgccattggaattggtccggaagccaatttctcagagccagatcagtgagttctcttttctagggtccaactgggacagcttccaagggatggtgacttcattcccaagtggggaggccacccctcggcggctgctttcctatggctgttgtagcaagaggccaaacagtaagcagatgcgggccacagggccctgctttgggggccagtgggctcagagagaaggtgtgaagtcacctgtctgttctagtcattccaatggacattgtactggcccaggaggaaagaaccagatgtggttgtccagtcatccaaagcaagtctctagcacaaagcccgttccactgaactgcccttctccagtgcctcctctgtatttggatgatgatggactcccctttcccacggatgtgatccagcataggttacggcaaatcgaagcagggtacaaacaagaggtggagcagctacgtcgacaggtgcgtgagcttcagatgaggctggacatccgtcactgctgtgcccctccagcagagccccccatggactatgaggatgattttacatgtttgaaggagtcagatggcagtgatactgaggattttggctctgatcacagtgaagactgcctttcagaagcaagctgggaacctgttgataagaaagagactgaggtgactcgctgggttccagaccatatggcatcacactgctataactgtgactgtgaattctggttggccaaacgaagacaccattgcagaaattgtgggaatgtattttgtgctggatgctgccacctgaagctgcccattcctgatcagcaactctatgacccagttctcgtctgtaactcatgttacgaacacattcaagtctctcgtgccagggaactcatgagccaacagctgaagaaacccattgctacagcttccagttgaatgccggggagaaacctgtccaattttagcaggtttgaagggaggatcttcttcagttgtagtttggaaggttccttggtgtggctcatgaaatcacagagctcagagataccatcttgagaaatcctccttggtatcatgaaactggagcagaggaattgcaatttagcaggaggtcctctactggtgataccctcaccttggggtaatggtcctaacccagacccagggtctggaagcttaatgttgagttggtgactccagcctctttctcctggaggtcacaagatgatgattgcgtagatgttgcctggtgcaaagtgccccaaacagcaatagaaaggcatatgtataaccaaactccaagtgataaccagacccatctctcctccaccttgacaaaagcagattatagtatacaaggtaggaattcctgtcctatttgagatgaactatatcctgtacctctgtgctctgtgtctgcatgaaggctcagcctttagaggcactccttctagttgcattagtactgtctttctgtggagtttggtttgaagactggctcagcaagtggaggtttcaatgtatttttcagttggctcatcagccagcattggtgaatattcagtttaggggaacagttctagggagtgagacatttttgggagcagaggaaaactctgctgatgttcggtcctggcaaacattgagttattttgagctgtgaaggcagtcgtctctgttacacagtggcagctcttgagttatgcactgtgaagaatgagaagggaaaagcaaaaattatccttgtgaaatatctgctgattgtgccctactctttgcacctgacttttcctagttgtcctggtgctaacacaggagctacaccttgatcctctcctggcatgaaaataaaacaaaggttttcgttgttgttgttccattgcccatttcccccatgttgtctttcccttggctgatgcctcctctgggtcacattgcttcttatcctgaacacttgacaccttgagggtagaatttagcgtttggtttttacctcctagcatatgctgtttggtatgtgagggtttcagtacaaatgctgctgtctatttctgtgcacttaacaatggaacccaaacagaagagaataaagccttgataccaaaattgggaaagaacatgtgtccatttggaccaaacgttgttggtttttaaaaaattttattttgtttttttgttttgtttttgttttttttcatcttaatatgtaccagtggcacttaaccaaaagatacagtgatatagccatgtactgtgggtgggacagatacagtctccttggcctataatgaaaccactaggactttatacagttttccttaatttgttgacatataaatggtaaattatatttaggcttatcctgttttgaaatgatggtagtcatctttcttactgctactttcatgttgctttctagaaaacagcatttcattccaaaataactaggatctgcatttagaacaagaatcattatttgtcctgaccttttcagtcctacagagacgcatctgtggttcttttgtacttgccatagatgtaacctaaaaagttttggcatatttaggtcagcctagcggaactttttttttcatttaaatggagctgaataatggagattttgtgtctgcaaaattcctgagatcattgaaaaagtaacaagctgttccttgtttctgatacataaaattattttaagcattttatcaatcattaaaatttactgccagttgtgagtggctttttaattaacttgtctttcattgcacttcactctgcctgttttcaaggggagtaagattggtaacatttggggagactgtatctgtctacttagcgtggctgttttgagggactgtcccatcagtgaacaaactgcatggccttggagagagactctgggctcttggctcagatgtgttcatcaaatactcctttcagagctgttgtgggtgtaagtgacatgatgtggccaaaaatccaaactgtgcagttgcgttgtgacaaacatgcaatgtgctgtaaaaattcaatacagtttaaataaaatctctatattagt

SEQ ID NO: 452898 - DNA, 5607 bp, Homo sapiens
aagagacaacttctgttgggtgttggccagtgtccctcgtccccccaccctgggtccccactgctttacctcttgctttgcagccttctctcctcacagccttcctgtggctgtgtttttggccctgatagccccatggcacaactgcactttgcctcacctaggcctgtggcttcttgcctggcaggtgccacttctccacttttaagcagtgccaagagtggctctcacggctaagccgagccacagcaagacctgccaagcctgaagacctctttgcctttgcctaccatgcctggtgcctggggctgaccgaggaggaccagcacactcacctatgtcagccaggtgagcacatacgttgtcgacaggaggcggagcttgcaaggatgggctttgacctgcagaacgtctggagagtctcacacatcaacagcaactacaaattgtgccccagttacccccagaagctgctggttcctgtgtggatcactgacaaagagctggagaacgtggcttccttccgctcctggaagcggattcccgtggttgtgtatagacacttgcgcaatggggctgccatcgcccgctgcagccagccagagatcagctggtggggctggcgcaatgctgatgatgagtacctggtcacgtccattgctaaagcctgtgccctggacccggggacaagggccactgggggctccctcagcaccgggaataatgataccagcgaggcgtgtgatgctgactttgattcttctctgactgcgtgctctggagtggagagcacagcagctcctcaaaagctgctgatcctggatgcgcgatcctacacggcagcagtggccaaccgggccaagggtggaggctgtgaatgtgaagagtactatcccaactgtgaggtcgtgttcatgggaatggccaacatccatgccatccggaacagctttcagtacctccgggctgtgtgtagccagatgccggatcctagcaactggttgtcggcactggagagtaccaaatggctgcagcacttgtcggtgatgctaaaagcagctgtgctggtggctaatacagtagaccgggaaggccggcctgtgctggtacactgctcagatggctgggaccgcacaccgcagatcgtagccctggccaaaatattactggacccatattacaggacgttggagggcttccaagtgttagtggagtctgactggctggattttgggcacaagtttggagatcgctgtggccaccaagagaatgtggaggaccaaaacgaacaatgccctgtgttcctccagtggcttgattctgttcatcagttgcttaagcagttcccctgcctgtttgaatttaatgaagcattcctggtaaaactggtgcaacacacatactcctgcctctacggcaccttcctggccaacaacccctgtgagcgagagaagcgcaacatctacaagcggacctgctctgtgtgggcgctccttcgagctggcaataaaaactttcataacttcctctacacacccagctcagacatggtcctgcatcctgtttgtcatgtccgggccctgcacctctggacagctgtttatctgccagcatcatctccatgcacacttggggaagaaaacatggatctttacctttccccagtggcccagagccaggagttctctggccgctctctggacagattacctaaaaccagatccatggatgatcttctttctgcctgtgacacaagcagccccctgactcgtacatccagtgaccctaacctgaataaccactgtcaggaggtcagggtaggcctggagccctggcacagcaatcctgagggatcagagacaagctttgtggactctggggtaggagggcctcagcaaactgtaggagaagtgggtcttcctcctcctctgcccagcagccagaaagactacttgagcaataaacctttcaagagtcacaaaagctgttctccaagttacaaactgcttaataccgcagtgcctcgggaaatgaagagcaacacctctgatcctgagatcaaagtcctagaagagactaagggaccagctccagacccttctgcccaggatgagctgggtaggactttagatggcataggggagccacctgaacattgtcctgaaacagaagctgtcagtgcactctccaaggtcatttctaacaagtgtgatggagtttgtaattttcctgagtcttcccagaactctcctacaggtacgccccaacaggcccagccagactccatgctaggtgtgccctccaagtgtgttcttgatcacagcctcagcaccgtttgcaacccaccgagtgctgcctgccaaactcctctagacccaagcactgacttcctcaaccaagatccctcagggtctgtggcaagtatctcccaccaggaacaactgagttctgtgccggatctgacccatggggaggaagacattggtaaaagaggaaataataggaatgggcagttattggaaaatcctcgctttgggaaaatgccattggaattggtccggaagccaatttctcagagccagatcagtgagttctcttttctagggtccaactgggacagcttccaagggatggtgacttcattcccaagtggggaggccacccctcggcggctgctttcctatggctgttgtagcaagaggccaaacagtaagcagatgcgggccacagggccctgctttgggggccagtgggctcagagagaaggtgtgaagtcacctgtctgttctagtcattccaatggacattgtactggcccaggaggaaagaaccagatgtggttgtccagtcatccaaagcaagtctctagcacaaagcccgttccactgaactgcccttctccagtgcctcctctgtatttggatgatgatggactcccctttcccacggatgtgatccagcataggttacggcaaatcgaagcagggtacaaacaagaggtggagcagctacgtcgacaggtgcgtgagcttcagatgaggctggacatccgtcactgctgtgcccctccagcagagccccccatggactatgaggatgattttacatgtttgaaggagtcagatggcagtgatactgaggattttggctctgatcacagtgaagactgcctttcagaagcaagctgggaacctgttgataagaaagagactgaggtgactcgctgggttccagaccatatggcatcacactgctataactgtgactgtgaattctggttggccaaacgaagacaccattgcagaaattgtgggaatgtattttgtgctggatgctgccacctgaagctgcccattcctgatcagcaactctatgacccagttctcgtctgtaactcatgttacgaacacattcaagtctctcgtgccagggaactcatgagccaacagctgaagaaacccattgctacagcttccagttgaatgccggggagaaacctgtccaattttagcaggtttgaagggaggatcttcttcagttgtagtttggaaggttccttggtgtggctcatgaaatcacagagctcagagataccatcttgagaaatcctccttggtatcatgaaactggagcagaggaattgcaatttagcaggaggtcctctactggtgataccctcaccttggggtaatggtcctaacccagacccagggtctggaagcttaatgttgagttggtgactccagcctctttctcctggaggtcacaagatgatgattgcgtagatgttgcctggtgcaaagtgccccaaacagcaatagaaaggcatatgtataaccaaactccaagtgataaccagacccatctctcctccaccttgacaaaagcagattatagtatacaaggtaggaattcctgtcctatttgagatgaactatatcctgtacctctgtgctctgtgtctgcatgaaggctcagcctttagaggcactccttctagttgcattagtactgtctttctgtggagtttggtttgaagactggctcagcaagtggaggtttcaatgtatttttcagttggctcatcagccagcattggtgaatattcagtttaggggaacagttctagggagtgagacatttttgggagcagaggaaaactctgctgatgttcggtcctggcaaacattgagttattttgagctgtgaaggcagtcgtctctgttacacagtggcagctcttgagttatgcactgtgaagaatgagaagggaaaagcaaaaattatccttgtgaaatatctgctgattgtgccctactctttgcacctgacttttcctagttgtcctggtgctaacacaggagctacaccttgatcctctcctggcatgaaaataaaacaaaggttttcgttgttgttgttccattgcccatttcccccatgttgtctttcccttggctgatgcctcctctgggtcacattgcttcttatcctgaacacttgacaccttgagggtagaatttagcgtttggtttttacctcctagcatatgctgtttggtatgtgagggtttcagtacaaatgctgctgtctatttctgtgcacttaacaatggaacccaaacagaagagaataaagccttgataccaaaattgggaaagaacatgtgtccatttggaccaaacgttgttggtttttaaaaaattttattttgtttttttgttttgtttttgttttttttcatcttaatatgtaccagtggcacttaaccaaaagatacagtgatatagccatgtactgtgggtgggacagatacagtctccttggcctataatgaaaccactaggactttatacagttttccttaatttgttgacatataaatggtaaattatatttaggcttatcctgttttgaaatgatggtagtcatctttcttactgctactttcatgttgctttctagaaaacagcatttcattccaaaataactaggatctgcatttagaacaagaatcattatttgtcctgaccttttcagtcctacagagacgcatctgtggttcttttgtacttgccatagatgtaacctaaaaagttttggcatatttaggtcagcctagcggaactttttttttcatttaaatggagctgaataatggagattttgtgtctgcaaaattcctgagatcattgaaaaagtaacaagctgttccttgtttctgatacataaaattattttaagcattttatcaatcattaaaatttactgccagttgtgagtggctttttaattaacttgtctttcattgcacttcactctgcctgttttcaaggggagtaagattggtaacatttggggagactgtatctgtctacttagcgtggctgttttgagggactgtcccatcagtgaacaaactgcatggccttggagagagactctgggctcttggctcagatgtgttcatcaaatactcctttcagagctgttgtgggtgtaagtgacatgatgtggccaaaaatccaaactgtgcagttgcgttgtgacaaacatgcaatgtgctgtaaaaattcaatacagtttaaataaaatctctatattagt

SEQ ID NO: 452899 - DNA, 5957 bp, Homo sapiens
gcgagtaacgggatagcgcggctcagagggtcgggcggacgccgcctggtgagaagcaggcagccagtacccttgccacggtagaatgggtgaggaggggccccccagcctggagtacatccaagccaaggatctgttcccccccaaggaactagtgaaggaggaagagaatcttcaggtccccttcacagtgctgcagggtgagggagtagagttcctgggccgggcagccgatgccctcattgccatctctaactaccggctgcatatcaaattcaaggactctgtcatcaacgtccccctccggatgattgacagtgtggagagccgtgatatgttccagttgcacatttcctgcaaggactccaaagtggtgaggtgccacttctccacttttaagcagtgccaagagtggctctcacggctaagccgagccacagcaagacctgccaagcctgaagacctctttgcctttgcctaccatgcctggtgcctggggctgaccgaggaggaccagcacactcacctatgtcagccaggtgagcacatacgttgtcgacaggaggcggagcttgcaaggatgggctttgacctgcagaacgtctggagagtctcacacatcaacagcaactacaaattgtgccccagttacccccagaagctgctggttcctgtgtggatcactgacaaagagctggagaacgtggcttccttccgctcctggaagcggattcccgtggttgtgtatagacacttgcgcaatggggctgccatcgcccgctgcagccagccagagatcagctggtggggctggcgcaatgctgatgatgagtacctggtcacgtccattgctaaagcctgtgccctggacccggggacaagggccactgggggctccctcagcaccgggaataatgataccagcgaggcgtgtgatgctgactttgattcttctctgactgcgtgctctggagtggagagcacagcagctcctcaaaagctgctgatcctggatgcgcgatcctacacggcagcagtggccaaccgggccaagggtggaggctgtgaatgtgaagagtactatcccaactgtgaggtcgtgttcatgggaatggccaacatccatgccatccggaacagctttcagtacctccgggctgtgtgtagccagatgccggatcctagcaactggttgtcggcactggagagtaccaaatggctgcagcacttgtcggtgatgctaaaagcagctgtgctggtggctaatacagtagaccgggaaggccggcctgtgctggtacactgctcagatggctgggaccgcacaccgcagatcgtagccctggccaaaatattactggacccatattacaggacgttggagggcttccaagtgttagtggagtctgactggctggattttgggcacaagtttggagatcgctgtggccaccaagagaatgtggaggaccaaaacgaacaatgccctgtgttcctccagtggcttgattctgttcatcagttgcttaagcagttcccctgcctgtttgaatttaatgaagcattcctggtaaaactggtgcaacacacatactcctgcctctacggcaccttcctggccaacaacccctgtgagcgagagaagcgcaacatctacaagcggacctgctctgtgtgggcgctccttcgagctggcaataaaaactttcataacttcctctacacacccagctcagacatggtcctgcatcctgtttgtcatgtccgggccctgcacctctggacagctgtttatctgccagcatcatctccatgcacacttggggaagaaaacatggatctttacctttccccagtggcccagagccaggagttctctggccgctctctggacagattacctaaaaccagatccatggatgatcttctttctgcctgtgacacaagcagccccctgactcgtacatccagtgaccctaacctgaataaccactgtcaggaggtcagggtaggcctggagccctggcacagcaatcctgagggatcagagacaagctttgtggactctggggtaggagggcctcagcaaactgtaggagaagtgggtcttcctcctcctctgcccagcagccagaaagactacttgagcaataaacctttcaagagtcacaaaagctgttctccaagttacaaactgcttaataccgcagtgcctcgggaaatgaagagcaacacctctgatcctgagatcaaagtcctagaagagactaagggaccagctccagacccttctgcccaggatgagctgggtaggactttagatggcataggggagccacctgaacattgtcctgaaacagaagctgtcagtgcactctccaaggtcatttctaacaagtgtgatggagtttgtaattttcctgagtcttcccagaactctcctacaggtacgccccaacaggcccagccagactccatgctaggtgtgccctccaagtgtgttcttgatcacagcctcagcaccgtttgcaacccaccgagtgctgcctgccaaactcctctagacccaagcactgacttcctcaaccaagatccctcagggtctgtggcaagtatctcccaccaggaacaactgagttctgtgccggatctgacccatggggaggaagacattggtaaaagaggaaataataggaatgggcagttattggaaaatcctcgctttgggaaaatgccattggaattggtccggaagccaatttctcagagccagatcagtgagttctcttttctagggtccaactgggacagcttccaagggatggtgacttcattcccaagtggggaggccacccctcggcggctgctttcctatggctgttgtagcaagaggccaaacagtaagcagatgcgggccacagggccctgctttgggggccagtgggctcagagagaaggtgtgaagtcacctgtctgttctagtcattccaatggacattgtactggcccaggaggaaagaaccagatgtggttgtccagtcatccaaagcaagtctctagcacaaagcccgttccactgaactgcccttctccagtgcctcctctgtatttggatgatgatggactcccctttcccacggatgtgatccagcataggttacggcaaatcgaagcagggtacaaacaagaggtggagcagctacgtcgacaggtgcgtgagcttcagatgaggctggacatccgtcactgctgtgcccctccagcagagccccccatggactatgaggatgattttacatgtttgaaggagtcagatggcagtgatactgaggattttggctctgatcacagtgaagactgcctttcagaagcaagctgggaacctgttgataagaaagagactgaggtgactcgctgggttccagaccatatggcatcacactgctataactgtgactgtgaattctggttggccaaacgaagacaccattgcagaaattgtgggaatgtattttgtgctggatgctgccacctgaagctgcccattcctgatcagcaactctatgacccagttctcgtctgtaactcatgttacgaacacattcaagtctctcgtgccagggaactcatgagccaacagctgaagaaacccattgctacagcttccagttgaatgccggggagaaacctgtccaattttagcaggtttgaagggaggatcttcttcagttgtagtttggaaggttccttggtgtggctcatgaaatcacagagctcagagataccatcttgagaaatcctccttggtatcatgaaactggagcagaggaattgcaatttagcaggaggtcctctactggtgataccctcaccttggggtaatggtcctaacccagacccagggtctggaagcttaatgttgagttggtgactccagcctctttctcctggaggtcacaagatgatgattgcgtagatgttgcctggtgcaaagtgccccaaacagcaatagaaaggcatatgtataaccaaactccaagtgataaccagacccatctctcctccaccttgacaaaagcagattatagtatacaaggtaggaattcctgtcctatttgagatgaactatatcctgtacctctgtgctctgtgtctgcatgaaggctcagcctttagaggcactccttctagttgcattagtactgtctttctgtggagtttggtttgaagactggctcagcaagtggaggtttcaatgtatttttcagttggctcatcagccagcattggtgaatattcagtttaggggaacagttctagggagtgagacatttttgggagcagaggaaaactctgctgatgttcggtcctggcaaacattgagttattttgagctgtgaaggcagtcgtctctgttacacagtggcagctcttgagttatgcactgtgaagaatgagaagggaaaagcaaaaattatccttgtgaaatatctgctgattgtgccctactctttgcacctgacttttcctagttgtcctggtgctaacacaggagctacaccttgatcctctcctggcatgaaaataaaacaaaggttttcgttgttgttgttccattgcccatttcccccatgttgtctttcccttggctgatgcctcctctgggtcacattgcttcttatcctgaacacttgacaccttgagggtagaatttagcgtttggtttttacctcctagcatatgctgtttggtatgtgagggtttcagtacaaatgctgctgtctatttctgtgcacttaacaatggaacccaaacagaagagaataaagccttgataccaaaattgggaaagaacatgtgtccatttggaccaaacgttgttggtttttaaaaaattttattttgtttttttgttttgtttttgttttttttcatcttaatatgtaccagtggcacttaaccaaaagatacagtgatatagccatgtactgtgggtgggacagatacagtctccttggcctataatgaaaccactaggactttatacagttttccttaatttgttgacatataaatggtaaattatatttaggcttatcctgttttgaaatgatggtagtcatctttcttactgctactttcatgttgctttctagaaaacagcatttcattccaaaataactaggatctgcatttagaacaagaatcattatttgtcctgaccttttcagtcctacagagacgcatctgtggttcttttgtacttgccatagatgtaacctaaaaagttttggcatatttaggtcagcctagcggaactttttttttcatttaaatggagctgaataatggagattttgtgtctgcaaaattcctgagatcattgaaaaagtaacaagctgttccttgtttctgatacataaaattattttaagcattttatcaatcattaaaatttactgccagttgtgagtggctttttaattaacttgtctttcattgcacttcactctgcctgttttcaaggggagtaagattggtaacatttggggagactgtatctgtctacttagcgtggctgttttgagggactgtcccatcagtgaacaaactgcatggccttggagagagactctgggctcttggctcagatgtgttcatcaaatactcctttcagagctgttgtgggtgtaagtgacatgatgtggccaaaaatccaaactgtgcagttgcgttgtgacaaacatgcaatgtgctgtaaaaattcaatacagtttaaataaaatctctatattagtaaaaaaaaaaaaactcgagggggggcccgtgaccaaattcgcctaaagggagccgattcaaattaactggccggggtttaaaacgtcgggactggaaaacctggcttaccaacttaatgctttgaaacatccccttttcccgctgcgtaattgaaaaag

SEQ ID NO: 452900 - DNA, 5606 bp, Homo sapiens
atccctgcactagaatattgtagctaaaatagagtgagacaggaagtaaccctgaagtttggaattgttcctattcttggctcagccaggccttgttctcctgctgggtgtctgtacctggagcagttgctgtgcagatttgatgagtcaaggtcaccttggacatacagagcccatttgagaaagtatgtgtgatggtgctttgtaaacggtgaagcctgctagtgacgttggggcttttggttgctgttatggcctggatgagttggtagcccctgctggctctagagactttggtctaaccccctgaggtaggcctctggaggcttcgaatgccaagggcattacggtttcttctgttttgtcagacacgcaatgctgatgatgagtacctggtcacgtccattgctaaagcctgtgccctggacccggggacaagggccactgggggctccctcagcaccgggaataatgataccagcgaggcgtgtgatgctgactttggtaaggtgtggatgatgctaaccccccagggagcaggccccctccttggcttcattggctcccagggagtccccagtgagagtctgggaagatgacaacacacggggtgctggggtccctgccttgtcagaagctgtggggtatgaggggtctctagttgcatgttctgccttctgagagggagtgccagagggccagcaagaggttgggtggctggctgactcagggactccttcctgctgtgtgtttagattcttctctgactgcgtgctctggagtggagagcacagcagctcctcaaaagctgctgatcctggatgcgcgatcctacacggcagcagtggccaaccgggccaagggtggaggctgtgaatgtgaagagtactatcccaactgtgaggtcgtgttcatgggaatggccaacatccatgccatccggaacagctttcagtacctccgggctgtgtgtagccagatgccggatcctagcaactggttgtcggcactggagagtaccaaatggctgcagcacttgtcggtgatgctaaaagcagctgtgctggtggctaatacagtagaccgggaaggccggcctgtgctggtacactgctcagatggctgggaccgcacaccgcagatcgtagccctggccaaaatattactggacccatattacaggacgttggagggcttccaagtgttagtggagtctgactggctggattttgggcacaagtttggagatcgctgtggccaccaagagaatgtggaggaccaaaacgaacaatgccctgtgttcctccagtggcttgattctgttcatcagttgcttaagcagttcccctgcctgtttgaatttaatgaagcattcctggtaaaactggtgcaacacacatactcctgcctctacggcaccttcctggccaacaacccctgtgagcgagagaagcgcaacatctacaagcggacctgctctgtgtgggcgctccttcgagctggcaataaaaactttcataacttcctctacacacccagctcagacatggtcctgcatcctgtttgtcatgtccgggccctgcacctctggacagctgtttatctgccagcatcatctccatgcacacttggggaagaaaacatggatctttacctttccccagtggcccagagccaggagttctctggccgctctctggacagattacctaaaaccagatccatggatgatcttctttctgcctgtgacacaagcagccccctgactcgtacatccagtgaccctaacctgaataaccactgtcaggaggtcagggtaggcctggagccctggcacagcaatcctgagggatcagagacaagctttgtggactctggggtaggagggcctcagcaaactgtaggagaagtgggtcttcctcctcctctgcccagcagccagaaagactacttgagcaataaacctttcaagagtcacaaaagctgttctccaagttacaaactgcttaataccgcagtgcctcgggaaatgaagagcaacacctctgatcctgagatcaaagtcctagaagagactaagggaccagctccagacccttctgcccaggatgagctgggtaggactttagatggcataggggagccacctgaacattgtcctgaaacagaagctgtcagtgcactctccaaggtcatttctaacaagtgtgatggagtttgtaattttcctgagtcttcccagaactctcctacaggtacgccccaacaggcccagccagactccatgctaggtgtgccctccaagtgtgttcttgatcacagcctcagcaccgtttgcaacccaccgagtgctgcctgccaaactcctctagacccaagcactgacttcctcaaccaagatccctcagggtctgtggcaagtatctcccaccaggaacaactgagttctgtgccggatctgacccatggggaggaagacattggtaaaagaggaaataataggaatgggcagttattggaaaatcctcgctttgggaaaatgccattggaattggtccggaagccaatttctcagagccagatcagtgagttctcttttctagggtccaactgggacagcttccaagggatggtgacttcattcccaagtggggaggccacccctcggcggctgctttcctatggctgttgtagcaagaggccaaacagtaagcagatgcgggccacagggccctgctttgggggccagtgggctcagagagaaggtgtgaagtcacctgtctgttctagtcattccaatggacattgtactggcccaggaggaaagaaccagatgtggttgtccagtcatccaaagcaagtctctagcacaaagcccgttccactgaactgcccttctccagtgcctcctctgtatttggatgatgatggactcccctttcccacggatgtgatccagcataggttacggcaaatcgaagcagggtacaaacaagaggtggagcagctacgtcgacaggtgcgtgagcttcagatgaggctggacatccgtcactgctgtgcccctccagcagagccccccatggactatgaggatgattttacatgtttgaaggagtcagatggcagtgatactgaggattttggctctgatcacagtgaagactgcctttcagaagcaagctgggaacctgttgataagaaagagactgaggtgactcgctgggttccagaccatatggcatcacactgctataactgtgactgtgaattctggttggccaaacgaagacaccattgcagaaattgtgggaatgtattttgtgctggatgctgccacctgaagctgcccattcctgatcagcaactctatgacccagttctcgtctgtaactcatgttacgaacacattcaagtctctcgtgccagggaactcatgagccaacagctgaagaaacccattgctacagcttccagttgaatgccggggagaaacctgtccaattttagcaggtttgaagggaggatcttcttcagttgtagtttggaaggttccttggtgtggctcatgaaatcacagagctcagagataccatcttgagaaatcctccttggtatcatgaaactggagcagaggaattgcaatttagcaggaggtcctctactggtgataccctcaccttggggtaatggtcctaacccagacccagggtctggaagcttaatgttgagttggtgactccagcctctttctcctggaggtcacaagatgatgattgcgtagatgttgcctggtgcaaagtgccccaaacagcaatagaaaggcatatgtataaccaaactccaagtgataaccagacccatctctcctccaccttgacaaaagcagattatagtatacaaggtaggaattcctgtcctatttgagatgaactatatcctgtacctctgtgctctgtgtctgcatgaaggctcagcctttagaggcactccttctagttgcattagtactgtctttctgtggagtttggtttgaagactggctcagcaagtggaggtttcaatgtatttttcagttggctcatcagccagcattggtgaatattcagtttaggggaacagttctagggagtgagacatttttgggagcagaggaaaactctgctgatgttcggtcctggcaaacattgagttattttgagctgtgaaggcagtcgtctctgttacacagtggcagctcttgagttatgcactgtgaagaatgagaagggaaaagcaaaaattatccttgtgaaatatctgctgattgtgccctactctttgcacctgacttttcctagttgtcctggtgctaacacaggagctacaccttgatcctctcctggcatgaaaataaaacaaaggttttcgttgttgttgttccattgcccatttcccccatgttgtctttcccttggctgatgcctcctctgggtcacattgcttcttatcctgaacacttgacaccttgagggtagaatttagcgtttggtttttacctcctagcatatgctgtttggtatgtgagggtttcagtacaaatgctgctgtctatttctgtgcacttaacaatggaacccaaacagaagagaataaagccttgataccaaaattgggaaagaacatgtgtccatttggaccaaacgttgttggtttttaaaaaattttattttgtttttttgttttgtttttgttttttttcatcttaatatgtaccagtggcacttaaccaaaagatacagtgatatagccatgtactgtgggtgggacagatacagtctccttggcctataatgaaaccactaggactttatacagttttccttaatttgttgacatataaatggtaaattatatttaggcttatcctgttttgaaatgatggtagtcatctttcttactgctactttcatgttgctttctagaaaacagcatttcattccaaaataactaggatctgcatttagaacaagaatcattatttgtcctgaccttttcagtcctacagagacgcatctgtggttcttttgtacttgccatagatgtaacctaaaaagttttggcatatttaggtcagcctagcggaactttttttttcatttaaatggagctgaataatggagattttgtgtctgcaaaattcctgagatcattgaaaaagtaacaagctgttccttgtttctgatacataaaattattttaagcattttatcaatcattaaaatttactgccagttgtgagtggctttttaattaacttgtctttcattgcacttcactctgcctgttttcaaggggagtaagattggtaacatttggggagactgtatctgtctacttagcgtggctgttttgagggactgtcccatcagtgaacaaactgcatggccttggagagagactctgggctcttggctcagatgtgttcatcaaatactcctttcagagctgttgtgggtgtaagtgacatgatgtggccaaaaatccaaactgtgcagttgcgttgtgacaaacatgcaatgtgctgtaaaaattcaatacagtttaaataaaatctctatattagt

SEQ ID NO: 452901 - DNA, 4325 bp, Homo sapiens
agctccttgtcctcagggtggctgtgtggggggcggcctacctctgagatcttctggaactggttgttggactggctgcacttctcagctgtctccagagcgactttatagttatcgacaaacgctttgtacacaccgagccggggccaacaacccctgtgagcgagagaagcgcaacatctacaagcggacctgctctgtgtgggcgctccttcgagctggcaataaaaactttcataacttcctctacacacccagctcagacatggtcctgcatcctgtttgtcatgtccgggccctgcacctctggacagctgtttatctgccagcatcatctccatgcacacttggggaagaaaacatggatctttacctttccccagtggcccagagccaggagttctctggccgctctctggacagattacctaaaaccagatccatggatgatcttctttctgcctgtgacacaagcagccccctgactcgtacatccagtgaccctaacctgaataaccactgtcaggaggtcagggtaggcctggagccctggcacagcaatcctgagggatcagagacaagctttgtggactctggggtaggagggcctcagcaaactgtaggagaagtgggtcttcctcctcctctgcccagcagccagaaagactacttgagcaataaacctttcaagagtcacaaaagctgttctccaagttacaaactgcttaataccgcagtgcctcgggaaatgaagagcaacacctctgatcctgagatcaaagtcctagaagagactaagggaccagctccagacccttctgcccaggatgagctgggtaggactttagatggcataggggagccacctgaacattgtcctgaaacagaagctgtcagtgcactctccaaggtcatttctaacaagtgtgatggagtttgtaattttcctgagtcttcccagaactctcctacaggtacgccccaacaggcccagccagactccatgctaggtgtgccctccaagtgtgttcttgatcacagcctcagcaccgtttgcaacccaccgagtgctgcctgccaaactcctctagacccaagcactgacttcctcaaccaagatccctcagggtctgtggcaagtatctcccaccaggaacaactgagttctgtgccggatctgacccatggggaggaagacattggtaaaagaggaaataataggaatgggcagttattggaaaatcctcgctttgggaaaatgccattggaattggtccggaagccaatttctcagagccagatcagtgagttctcttttctagggtccaactgggacagcttccaagggatggtgacttcattcccaagtggggaggccacccctcggcggctgctttcctatggctgttgtagcaagaggccaaacagtaagcagatgcgggccacagggccctgctttgggggccagtgggctcagagagaaggtgtgaagtcacctgtctgttctagtcattccaatggacattgtactggcccaggaggaaagaaccagatgtggttgtccagtcatccaaagcaagtctctagcacaaagcccgttccactgaactgcccttctccagtgcctcctctgtatttggatgatgatggactcccctttcccacggatgtgatccagcataggttacggcaaatcgaagcagggtacaaacaagaggtggagcagctacgtcgacaggtgcgtgagcttcagatgaggctggacatccgtcactgctgtgcccctccagcagagccccccatggactatgaggatgattttacatgtttgaaggagtcagatggcagtgatactgaggattttggctctgatcacagtgaagactgcctttcagaagcaagctgggaacctgttgataagaaagagactgaggtgactcgctgggttccagaccatatggcatcacactgctataactgtgactgtgaattctggttggccaaacgaagacaccattgcagaaattgtgggaatgtattttgtgctggatgctgccacctgaagctgcccattcctgatcagcaactctatgacccagttctcgtctgtaactcatgttacgaacacattcaagtctctcgtgccagggaactcatgagccaacagctgaagaaacccattgctacagcttccagttgaatgccggggagaaacctgtccaattttagcaggtttgaagggaggatcttcttcagttgtagtttggaaggttccttggtgtggctcatgaaatcacagagctcagagataccatcttgagaaatcctccttggtatcatgaaactggagcagaggaattgcaatttagcaggaggtcctctactggtgataccctcaccttggggtaatggtcctaacccagacccagggtctggaagcttaatgttgagttggtgactccagcctctttctcctggaggtcacaagatgatgattgcgtagatgttgcctggtgcaaagtgccccaaacagcaatagaaaggcatatgtataaccaaactccaagtgataaccagacccatctctcctccaccttgacaaaagcagattatagtatacaaggtaggaattcctgtcctatttgagatgaactatatcctgtacctctgtgctctgtgtctgcatgaaggctcagcctttagaggcactccttctagttgcattagtactgtctttctgtggagtttggtttgaagactggctcagcaagtggaggtttcaatgtatttttcagttggctcatcagccagcattggtgaatattcagtttaggggaacagttctagggagtgagacatttttgggagcagaggaaaactctgctgatgttcggtcctggcaaacattgagttattttgagctgtgaaggcagtcgtctctgttacacagtggcagctcttgagttatgcactgtgaagaatgagaagggaaaagcaaaaattatccttgtgaaatatctgctgattgtgccctactctttgcacctgacttttcctagttgtcctggtgctaacacaggagctacaccttgatcctctcctggcatgaaaataaaacaaaggttttcgttgttgttgttccattgcccatttcccccatgttgtctttcccttggctgatgcctcctctgggtcacattgcttcttatcctgaacacttgacaccttgagggtagaatttagcgtttggtttttacctcctagcatatgctgtttggtatgtgagggtttcagtacaaatgctgctgtctatttctgtgcacttaacaatggaacccaaacagaagagaataaagccttgataccaaaattgggaaagaacatgtgtccatttggaccaaacgttgttggtttttaaaaaattttattttgtttttttgttttgtttttgttttttttcatcttaatatgtaccagtggcacttaaccaaaagatacagtgatatagccatgtactgtgggtgggacagatacagtctccttggcctataatgaaaccactaggactttatacagttttccttaatttgttgacatataaatggtaaattatatttaggcttatcctgttttgaaatgatggtagtcatctttcttactgctactttcatgttgctttctagaaaacagcatttcattccaaaataactaggatctgcatttagaacaagaatcattatttgtcctgaccttttcagtcctacagagacgcatctgtggttcttttgtacttgccatagatgtaacctaaaaagttttggcatatttaggtcagcctagcggaactttttttttcatttaaatggagctgaataatggagattttgtgtctgcaaaattcctgagatcattgaaaaagtaacaagctgttccttgtttctgatacataaaattattttaagcattttatcaatcattaaaatttactgccagttgtgagtggctttttaattaacttgtctttcattgcacttcactctgcctgttttcaaggggagtaagattggtaacatttggggagactgtatctgtctacttagcgtggctgttttgagggactgtcccatcagtgaacaaactgcatggccttggagagagactctgggctcttggctcagatgtgttcatcaaatactcctttcagagctgttgtgggtgtaagtgacatgatgtggccaaaaatccaaactgtgcagttgcgttgtgacaaacatgcaatgtgctgtaaaaattcaatacagtttaaataaaatctctatattagt

SEQ ID NO: 452902 - DNA, 2801 bp, Homo sapiens
aatgtgtataggtgcgggctggtggtatttcagtagagggcaggcttcaaagcaagtctctagcacaaagcccgttccactgaactgcccttctccagtgcctcctctgtatttggatgatgatggactcccctttcccacggatgtgatccagcataggttacggcaaatcgaagcagggtacaaacaagaggtggagcagctacgtcgacaggtgcgtgagcttcagatgaggctggacatccgtcactgctgtgcccctccagcagagccccccatggactatgaggatgattttacatgtttgaaggagtcagatggcagtgatactgaggattttggctctgatcacagtgaagactgcctttcagaagcaagctgggaacctgttgataagaaagagactgaggtgactcgctgggttccagaccatatggcatcacactgctataactgtgactgtgaattctggttggccaaacgaagacaccattgcagaaattgtgggaatgtattttgtgctggatgctgccacctgaagctgcccattcctgatcagcaactctatgacccagttctcgtctgtaactcatgttacgaacacattcaagtctctcgtgccagggaactcatgagccaacagctgaagaaacccattgctacagcttccagttgaatgccggggagaaacctgtccaattttagcaggtttgaagggaggatcttcttcagttgtagtttggaaggttccttggtgtggctcatgaaatcacagagctcagagataccatcttgagaaatcctccttggtatcatgaaactggagcagaggaattgcaatttagcaggaggtcctctactggtgataccctcaccttggggtaatggtcctaacccagacccagggtctggaagcttaatgttgagttggtgactccagcctctttctcctggaggtcacaagatgatgattgcgtagatgttgcctggtgcaaagtgccccaaacagcaatagaaaggcatatgtataaccaaactccaagtgataaccagacccatctctcctccaccttgacaaaagcagattatagtatacaaggtaggaattcctgtcctatttgagatgaactatatcctgtacctctgtgctctgtgtctgcatgaaggctcagcctttagaggcactccttctagttgcattagtactgtctttctgtggagtttggtttgaagactggctcagcaagtggaggtttcaatgtatttttcagttggctcatcagccagcattggtgaatattcagtttaggggaacagttctagggagtgagacatttttgggagcagaggaaaactctgctgatgttcggtcctggcaaacattgagttattttgagctgtgaaggcagtcgtctctgttacacagtggcagctcttgagttatgcactgtgaagaatgagaagggaaaagcaaaaattatccttgtgaaatatctgctgattgtgccctactctttgcacctgacttttcctagttgtcctggtgctaacacaggagctacaccttgatcctctcctggcatgaaaataaaacaaaggttttcgttgttgttgttccattgcccatttcccccatgttgtctttcccttggctgatgcctcctctgggtcacattgcttcttatcctgaacacttgacaccttgagggtagaatttagcgtttggtttttacctcctagcatatgctgtttggtatgtgagggtttcagtacaaatgctgctgtctatttctgtgcacttaacaatggaacccaaacagaagagaataaagccttgataccaaaattgggaaagaacatgtgtccatttggaccaaacgttgttggtttttaaaaaattttattttgtttttttgttttgtttttgttttttttcatcttaatatgtaccagtggcacttaaccaaaagatacagtgatatagccatgtactgtgggtgggacagatacagtctccttggcctataatgaaaccactaggactttatacagttttccttaatttgttgacatataaatggtaaattatatttaggcttatcctgttttgaaatgatggtagtcatctttcttactgctactttcatgttgctttctagaaaacagcatttcattccaaaataactaggatctgcatttagaacaagaatcattatttgtcctgaccttttcagtcctacagagacgcatctgtggttcttttgtacttgccatagatgtaacctaaaaagttttggcatatttaggtcagcctagcggaactttttttttcatttaaatggagctgaataatggagattttgtgtctgcaaaattcctgagatcattgaaaaagtaacaagctgttccttgtttctgatacataaaattattttaagcattttatcaatcattaaaatttactgccagttgtgagtggctttttaattaacttgtctttcattgcacttcactctgcctgttttcaaggggagtaagattggtaacatttggggagactgtatctgtctacttagcgtggctgttttgagggactgtcccatcagtgaacaaactgcatggccttggagagagactctgggctcttggctcagatgtgttcatcaaatactcctttcagagctgttgtgggtgtaagtgacatgatgtggccaaaaatccaaactgtgcagttgcgttgtgacaaacatgcaatgtgctgtaaaaattcaatacagtttaaataaaatctctatattagt

SEQ ID NO: 452903 - DNA, 5568 bp, Homo sapiens
  misc_feature (5234)..(5234): n is a, c, g, or t
  misc_feature (5238)..(5238): n is a, c, g, or t
  misc_feature (5250)..(5250): n is a, c, g, or t
gcgagtaacgggatagcgcggctcagagggtcgggcggacgccgcctggtgagaagcaggcagccagtacccttgccacggtagaatgggtgaggaggggccccccagcctggagtacatccaagccaaggatctgttcccccccaaggaactagtgaaggaggaagagaatcttcaggtccccttcacagtgctgcagggtgagggagtagagttcctgggccgggcagccgatgccctcattgccatctctaactaccggctgcatatcaaattcaaggactctgtcatcaacgtccccctccggatgattgacagtgtggagagccgtgatatgttccagttgcacatttcctgcaaggactccaaagtggtgaggtgccacttctccacttttaagcagtgccaagagtggctctcacggctaagccgagccacagcaagacctgccaagcctgaagacctctttgcctttgcctaccatgcctggtgcctggggctgaccgaggaggaccagcacactcacctatgtcagccaggtgagcacatacgttgtcgacaggaggcggagcttgcaaggatgggctttgacctgcagaacgtctggagagtctcacacatcaacagcaactacaaattgtgccccagttacccccagaagctgctggttcctgtgtggatcactgacaaagagctggagaacgtggcttccttccgctcctggaagcggattcccgtggttgtgtatagacacttgcgcaatggggctgccatcgcccgctgcagccagccagagatcagctggtggggctggcgcaatgctgatgatgagtacctggtcacgtccattgctaaagcctgtgccctggacccggggacaagggccactgggggctccctcagcaccgggaataatgataccagcgaggcgtgtgatgctgactttgattcttctctgactgcgtgctctggagtggagagcacagcagctcctcaaaagctgctgatcctggatgcgcgatcctacacggcagcagtggccaaccgggccaagggtggaggctgtgaatgtgaagagtactatcccaactgtgaggtcgtgttcatgggaatggccaacatccatgccatccggaacagctttcagtacctccgggctgtgtgtagccagatgccggatcctagcaactggttgtcggcactggagagtaccaaatggctgcagcacttgtcggtgatgctaaaagcagctgtgctggtggctaatacagtagaccgggaaggccggcctgtgctggtacactgctcagatggctgggaccgcacaccgcagatcgtagccctggccaaaatattactggacccatattacaggacgttggagggcttccaagtgttagtggagtctgactggctggattttgggcacaagtttggagatcgctgtggccaccaagagaatgtggaggaccaaaacgaacaatgccctgtgttcctccagtggcttgattctgttcatcagttgcttaagcagttcccctgcctgtttgaatttaatgaagcattcctggtaaaactggtgcaacacacatactcctgcctctacggcaccttcctggccaacaacccctgtgagcgagagaagcgcaacatctacaagcggacctgctctgtgtgggcgctccttcgagctggcaataaaaactttcataacttcctctacacacccagctcagacatggtcctgcatcctgtttgtcatgtccgggccctgcacctctggacagctgtttatctgccagcatcatctccatgcacacttggggaagaaaacatggatctttacctttccccagtggcccagagccaggagttctctggccgctctctggacagattacctaaaaccagatccatggatgatcttctttctgcctgtgacacaagcagccccctgactcgtacatccagtgaccctaacctgaataaccactgtcaggaggtcagggtaggcctggagccctggcacagcaatcctgagggatcagagacaagctttgtggactctggggtaggagggcctcagcaaactgtaggagaagtgggtcttcctcctcctctgcccagcagccagaaagactacttgagcaataaacctttcaagagtcacaaaagctgttctccaagttacaaactgcttaataccgcagtgcctcgggaaatgaagagcaacacctctgatcctgagatcaaagtcctagaagagactaagggaccagctccagacccttctgcccaggatgagctgggtaggactttagatggcataggggagccacctgaacattgtcctgaaacagaagctgtcagtgcactctccaaggtcatttctaacaagtgtgatggagtttgtaattttcctgagtcttcccagaactctcctacaggtacgccccaacaggcccagccagactccatgctaggtgtgccctccaagtgtgttcttgatcacagcctcagcaccgtttgcaacccaccgagtgctgcctgccaaactcctctagacccaagcactgacttcctcaaccaagatccctcagggtctgtggcaagtatctcccaccaggaacaactgagttctgtgccggatctgacccatggggaggaagacattggtaaaagaggaaataataggaatgggcagttattggaaaatcctcgctttgggaaaatgccattggaattggtccggaagccaatttctcagagccagatcagtgagttctcttttctagggtccaactgggacagcttccaagggatggtgacttcattcccaagtggggaggccacccctcggcggctgctttcctatggctgttgtagcaagaggccaaacagtaagcagatgcgggccacagggccctgctttgggggccagtgggctcagagagaaggtgtgaagtcacctgtctgttctagtcattccaatggacattgtactggcccaggaggaaagaaccagatgtggttgtccagtcatccaaagcaagtctctagcacaaagcccgttccactgaactgcccttctccagtgcctcctctgtatttggatgatgatggactcccctttcccacggatgtgatccagcataggttacggcaaatcgaagcagggtacaaacaagaggtggagcagctacgtcgacaggtgcgtgagcttcagatgaggctggacatccgtcactgctgtgcccctccagcagagccccccatggactatgaggatgattttacatgtttgaaggagtcagatggcagtgatactgaggattttggctctgatcacagtgaagactgcctttcagaagcaagctgggaacctgttgataagaaagagactgaggtgactcgctgggttccagaccatatggcatcacactgctataactgtgactgtgaattctggttggccaaacgaagacaccattgcagaaattgtgggaatgtattttgtgctggatgctgccacctgaagctgcccattcctgatcagcaactctatgacccagttctcgtctgtaactcatgttacgaacacattcaagtctctcgtgccagggaactcatgagccaacagctgaagaaacccattgctacagcttccagttgaatgccggggagaaacctgtccaattttagcaggtttgaagggaggatcttcttcagttgtagtttggaaggttccttggtgtggctcatgaaatcacagagctcagagataccatcttgagaaatcctccttggtatcatgaaactggagcagaggaattgcaatttagcaggaggtcctctactggtgataccctcaccttggggtaatggtcctaacccagacccagggtctggaagcttaatgttgagttggtgactccagcctctttctcctggaggtcacaagatgatgattgcgtagatgttgcctggtgcaaagtgccccaaacagcaatagaaaggcatatgtataaccaaactccaagtgataaccagacccatctctcctccaccttgacaaaagcagattatagtatacaaggtaggaattcctgtcctatttgagatgaactatatcctgtacctctgtgctctgtgtctgcatgaaggctcagcctttagaggcactccttctagttgcattagtactgtctttctgtggagtttggtttgaagactggctcagcaagtggaggtttcaatgtatttttcagttggctcatcagccagcattggtgaatattcagtttaggggaacagttctagggagtgagacatttttgggagcagaggaaaactctgctgatgttcggtcctggcaaacattgagttattttgagctgtgaaggcagtcgtctctgttacacagtggcagctcttgagttatgcactgtgaagaatgagaagggaaaagcaaaaattatccttgtgaaatatctgctgattgtgccctactctttgcacctgacttttcctagttgtcctggtgctaacacaggagctacaccttgatcctctcctggcatgaaaataaaacaaaggttttcgttgttgttgttccattgcccatttcccccatgttgtctttcccttggctgatgcctcctctgggtcacattgcttcttatcctgaacacttgacaccttgagggtagaatttagcgtttggtttttacctcctagcatatgctgtttggtatgtgagggtttcagtacaaatgctgctgtctatttctgtgcacttaacaatggaacccaaacagaagagaataaagccttgataccaaaattgggaaagaacatgtgtccatttggaccaaacgttgttggtttttaaaaaattttattttgtttttttgttttgtttttgttttttttcatcttaatatgtaccagtggcacttaaccaaaagatacagtgatatagccatatctgtctacttagcgtggctgttttgagggactgtcccatcagtgaacaaactgcatggccttggagagagactctgggctcttggctcagatgtgttcatcaaatactcctttcagagctgttgtgggtgtaagtgacatgatgtggccaaaaatccaaactgtgcagttgcgttgtgacaaacatgcaatgtgctgtaaaaattcaatacagtttaaataaaatctctatattagtaaaaaaaaanaaanaaaaaaaaaaanaaaaaaaaaaaaaaaaaaaaaaataaaaaaaaaaaaaaaaaaaaaaaaaaaaaatagtggtgggcggcccgcgccgccggccacacgaggaaaaaattttaacaaaccacctggggtggggggcgaggcgcgaccccaatgatgatatgaaacaaggtgtggaacaagacgtgtcccagagaagaaatcggcggcagacaggggggtggctccccccaaaaaaaagacggcggggacacgagggtgtgaacaccacaaggacatgtggaggcaagggggacaacagagagccacgaagcgagaaaataaccgcgccgg

SEQ ID NO: 452904 - DNA, 4259 bp, Homo sapiens
gcgagtaacgggatagcgcggctcagagggtcgggcggacgccgcctggtgagaagcaggcagccagtacccttgccacggtagaatgggtgaggaggggccccccagcctggagtacatccaagccaaggatctgttcccccccaaggaactagtgaaggaggaagagaatcttcaggtccccttcacagtgctgcagggtgagggagtagagttcctgggccgggcagccgatgccctcattgccatctctaactaccggctgcatatcaaattcaaggactctgtcatcaacgtccccctccggatgattgacagtgtggagagccgtgatatgttccagttgcacatttcctgcaaggactccaaagtggtgaggtgccacttctccacttttaagcagtgccaagagtggctctcacggctaagccgagccacagcaagacctgccaagcctgaagacctctttgcctttgcctaccatgcctggtgcctggggctgaccgaggaggaccagcacactcacctatgtcagccaggtgagcacatacgttgtcgacaggaggcggagcttgcaaggatgggctttgacctgcagaacgtctggagagtctcacacatcaacagcaactacaaattgtgccccagttacccccagaagctgctggttcctgtgtggatcactgacaaagagctggagaacgtggcttccttccgctcctggaagcggattcccgtggttgtgtatagacacttgcgcaatggggctgccatcgcccgctgcagccagccagagatcagctggtggggctggcgcaatgctgatgatgagtacctggtcacgtccattgctaaagcctgtgccctggacccggggacaagggccactgggggctccctcagcaccgggaataatgataccagcgaggcgtgtgatgctgactttgattcttctctgactgcgtgctctggagtggagagcacagcagctcctcaaaagctgctgatcctggatgcgcgatcctacacggcagcagtggccaaccgggccaagggtggaggctgtgaatgtgaagagtactatcccaactgtgaggtcgtgttcatgggaatggccaacatccatgccatccggaacagctttcagtacctccgggctgtgtgtagccagatgccggatcctagcaactggttgtcggcactggagagtaccaaatggctgcagcacttgtcggtgatgctaaaagcagctgtgctggtggctaatacagtagaccgggaaggccggcctgtgctggtacactgctcagatggctgggaccgcacaccgcagatcgtagccctggccaaaatattactggacccatattacaggacgttggagggcttccaagtgttagtggagtctgactggctggattttgggcacaagtttggagatcgctgtggccaccaagagaatgtggaggaccaaaacgaacaatgccctgtgttcctccagtggcttgattctgttcatcagttgcttaagcagttcccctgcctgtttgaatttaatgaagcattcctggtaaaactggtgcaacacacatactcctgcctctacggcaccttcctggccaacaacccctgtgagcgagagaagcgcaacatctacaagcggacctgctctgtgtgggcgctccttcgagctggcaataaaaactttcataacttcctctacacacccagctcagacatggtcctgcatcctgtttgtcatgtccgggccctgcacctctggacagctgtttatctgccagcatcatctccatgcacacttggggaagaaaacatggatctttacctttccccagtggcccagagccaggagttctctggccgctctctggacagattacctaaaaccagatccatggatgatcttctttctgcctgtgacacaagcagccccctgactcgtacatccagtgaccctaacctgaataaccactgtcaggaggtcagggtaggcctggagccctggcacagcaatcctgagggatcagagacaagctttgtggactctggggtaggagggcctcagcaaactgtaggagaagtgggtcttcctcctcctctgcccagcagccagaaagactacttgagcaataaacctttcaagagtcacaaaagctgttctccaagttacaaactgcttaataccgcagtgcctcgggaaatgaagagcaacacctctgatcctgagatcaaagtcctagaagagactaagggaccagctccagacccttctgcccaggatgagctgggtaggactttagatggcataggggagccacctgaacattgtcctgaaacagaagctgtcagtgcactctccaaggtcatttctaacaagtgtgatggagtttgtaattttcctgagtcttcccagaactctcctacaggtacgccccaacaggcccagccagactccatgctaggtgtgccctccaagtgtgttcttgatcacagcctcagcaccgtttgcaacccaccgagtgctgcctgccaaactcctctagacccaagcactgacttcctcaaccaagatccctcagggtctgtggcaagtatctcccaccaggaacaactgagttctgtgccggatctgacccatggggaggaagacattggtaaaagaggaaataataggaatgggcagttattggaaaatcctcgctttgggaaaatgccattggaattggtccggaagccaatttctcagagccagatcagtgagttctcttttctagggtccaactgggacagcttccaagggatggtgacttcattcccaagtggggaggccacccctcggcggctgctttcctatggctgttgtagcaagaggccaaacagtaagcagatgcgggccacagggccctgctttgggggccagtgggctcagagagaaggtgtgaagtcacctgtctgttctagtcattccaatggacattgtactggcccaggaggaaagaaccagatgtggttgtccagtcatccaaagcaagtctctagcacaaagcccgttccactgaactgcccttctccagtgcctcctctgtatttggatgatgatggactcccctttcccacggatgtgatccagcataggttacggcaaatcgaagcagggtacaaacaagaggtggagcagctacgtcgacaggtgcgtgagcttcagatgaggctggacatccgtcactgctgtgcccctccagcagagccccccatggactatgaggatgattttacatgtttgaaggagtcagatggcagtgatactgaggattttggctctgatcacagtgaagactgcctttcagaagcaagctgggaacctgttgataagaaagagactgaggtgactcgctgggttccagaccatatggcatcacactgctataactgtgactgtgaattctggttggccaaacgaagacaccattgcagaaattgtgggaatgtattttgtgctggatgctgccacctgaagctgcccattcctgatcagcaactctatgacccagttctcgtctgtaactcatgttacgaacacattcaagtctctcgtgccagggaactcatgagccaacagctgaagaaacccattgctacagcttccagttgaatgccggggagaaacctgtccaattttagcaggtttgaagggaggatcttcttcagttgtagtttggaaggttccttggtgtggctcatgaaatcacagagctcagagataccatcttgagaaatcctccttggtatcatgaaactggagcagaggaattgcaatttagcaggaggtcctctactggtgataccctcaccttggggtaatggtcctaacccagacccagggtctggaagcttaatgttgagttggtgactccagcctctttctcctggaggtcacaagatgatgattgcgtccgtcgattcgacggacgcattcacgcaacttcataaaaaacacctgagggagagaccactggctttgattagcaaataaggtatgaacctgggccagttgcccacattcacacagaccactggcccagggacatcctcctcatatgatagcattaaggcacatgctgtactgtgagccagcacttcctgacctcaggctgtgtgaggtgttggcactgtagagaggttccacgacttttcctcatatgcctgcgttaattctgatgcacccagtcaaaagctga

SEQ ID NO: 452905 - DNA, 3778 bp, Homo sapiens
gcgagtaacgggatagcgcggctcagagggtcgggcggacgccgcctggtgagaagcaggcagccagtacccttgccacggtagaatgggtgaggaggggccccccagcctggagtacatccaagccaaggatctgttcccccccaaggaactagtgaaggaggaagagaatcttcaggtccccttcacagtgctgcagggtgagggagtagagttcctgggccgggcagccgatgccctcattgccatctctaactaccggctgcatatcaaattcaaggactctgtcatcaacgtccccctccggatgattgacagtgtggagagccgtgatatgttccagttgcacatttcctgcaaggactccaaagtggtgaggtgccacttctccacttttaagcagtgccaagagtggctctcacggctaagccgagccacagcaagacctgccaagcctgaagacctctttgcctttgcctaccatgcctggtgcctggggctgaccgaggaggaccagcacactcacctatgtcagccaggtgagcacatacgttgtcgacaggaggcggagcttgcaaggatgggctttgacctgcagaacgtctggagagtctcacacatcaacagcaactacaaattgtgccccagttacccccagaagctgctggttcctgtgtggatcactgacaaagagctggagaacgtggcttccttccgctcctggaagcggattcccgtggttgtgtatagacacttgcgcaatggggctgccatcgcccgctgcagccagccagagatcagctggtggggctggcgcaatgctgatgatgagtacctggtcacgtccattgctaaagcctgtgccctggacccggggacaagggccactgggggctccctcagcaccgggaataatgataccagcgaggcgtgtgatgctgactttggtaaggtgtggatgatgctaaccccccagggagcaggccccctccttggcttcattggctcccagggagtccccagtgagagtctgggaagatgacaacacacggggtgctggggtccctgccttgtcagaagctgtggggtatgaggggtctctagttgcatgttctgccttctgagagggagtgccagagggccagcaagaggttgggtggctggctgactcagggactccttcctgctgtgtgtttagattcttctctgactgcgtgctctggagtggagagcacagcagctcctcaaaagctgctgatcctggatgcgcgatcctacacggcagcagtggccaaccgggccaagggtggaggctgtgaatgtgaagagtactatcccaactgtgaggtcgtgttcatgggaatggccaacatccatgccatccggaacagctttcagtacctccgggctgtgtgtagccagatgccggatcctagcaactggttgtcggcactggagagtaccaaatggctgcagcacttgtcggtgatgctaaaagcagctgtgctggtggctaatacagtagaccgggaaggccggcctgtgctggtacactgctcagatggctgggaccgcacaccgcagatcgtagccctggccaaaatattactggacccatattacaggacgttggagggcttccaagtgttagtggagtctgactggctggattttgggcacaagtttggagatcgctgtggccaccaagagaatgtggaggaccaaaacgaacaatgccctgtgttcctccagtggcttgattctgttcatcagttgcttaagcagttcccctgcctgtttgaatttaatgaagcattcctggtaaaactggtgcaacacacatactcctgcctctacggcaccttcctggccaacaacccctgtgagcgagagaagcgcaacatctacaagcggacctgctctgtgtgggcgctccttcgagctggcaataaaaactttcataacttcctctacacacccagctcagacatggtcctgcatcctgtttgtcatgtccgggccctgcacctctggacagctgtttatctgccagcatcatctccatgcacacttggggaagaaaacatggatctttacctttccccagtggcccagagccaggagttctctggccgctctctggacagattacctaaaaccagatccatggatgatcttctttctgcctgtgacacaagcagccccctgactcgtacatccagtgaccctaacctgaataaccactgtcaggaggtcagggtaggcctggagccctggcacagcaatcctgagggatcagagacaagctttgtggactctggggtaggagggcctcagcaaactgtaggagaagtgggtcttcctcctcctctgcccagcagccagaaagactacttgagcaataaacctttcaagagtcacaaaagctgttctccaagttacaaactgcttaataccgcagtgcctcgggaaatgaagagcaacacctctgatcctgagatcaaagtcctagaagagactaagggaccagctccagacccttctgcccaggatgagctgggtaggactttagatggcataggggagccacctgaacattgtcctgaaacagaagctgtcagtgcactctccaaggtcatttctaacaagtgtgatggagtttgtaattttcctgagtcttcccagaactctcctacaggtacgccccaacaggcccagccagactccatgctaggtgtgccctccaagtgtgttcttgatcacagcctcagcaccgtttgcaacccaccgagtgctgcctgccaaactcctctagacccaagcactgacttcctcaaccaagatccctcagggtctgtggcaagtatctcccaccaggaacaactgagttctgtgccggatctgacccatggggaggaagacattggtaaaagaggaaataataggaatgggcagttattggaaaatcctcgctttgggaaaatgccattggaattggtccggaagccaatttctcagagccagatcagtgagttctcttttctagggtccaactgggacagcttccaagggatggtgacttcattcccaagtggggaggccacccctcggcggctgctttcctatggctgttgtagcaagaggccaaacagtaagcagatgcgggccacagggccctgctttgggggccagtgggctcagagagaaggtgtgaagtcacctgtctgttctagtcattccaatggacattgtactggcccaggaggaaagaaccagatgtggttgtccagtcatccaaagcaagtctctagcacaaagcccgttccactgaactgcccttctccagtgcctcctctgtatttggatgatgatggactcccctttcccacggatgtgatccagcataggttacggcaaatcgaagcagggtacaaacaagaggtggagcagctacgtcgacaggtgcgtgagcttcagatgaggctggacatccgtcactgctgtgcccctccagcagagccccccatggactatgaggatgattttgtaagtagtcaccaactgccatacacccattatttactctgttcatccagccttccctccattcagcatttattcgttgggtacttgctgtgtgccactgagttaggtgcctgggctataggatgaaaaacaagtaagcaattagaatgatgtttttaagtgctatgattgaggaggcatcaggtgttagagggctggagtggagtgaaacgtcaaggaagactttcttgag

SEQ ID NO: 452906 - DNA, 1836 bp, Homo sapiens
gcgagtaacgggatagcgcggctcagagggtcgggcggacgccgcctggtgagaagcaggcagccagtacccttgccacggtagaatgggtgaggaggggccccccagcctggagtacatccaagccaaggatctgttcccccccaaggaactagtgaaggaggaagagaatcttcaggtccccttcacagtgctgcagggtgagggagtagagttcctgggccgggcagccgatgccctcattgccatctctaactaccggctgcatatcaaattcaaggactctgtcatcaacgtccccctccggatgattgacagtgtggagagccgtgatatgttccagttgcacatttcctgcaaggactccaaagtggtgaggtgccacttctccacttttaagcagtgccaagagtggctctcacggctaagccgagccacagcaagacctgccaagcctgaagacctctttgcctttgcctaccatgcctggtgcctggggctgaccgaggaggaccagcacactcacctatgtcagccaggtgagcacatacgttgtcgacaggaggcggagcttgcaaggatgggctttgacctgcagaacgtctggagagtctcacacatcaacagcaactacaaattgtgccccagttacccccagaagctgctggttcctgtgtggatcactgacaaagagctggagaacgtggcttccttccgctcctggaagcggattcccgtggttgtgtatagacacttgcgcaatggggctgccatcgcccgctgcagccagccagagatcagctggtggggctggcgcaatgctgatgatgagtacctggtcacgtccattgctaaagcctgtgccctggacccggggacaagggccactgggggctccctcagcaccgggaataatgataccagcgaggcgtgtgatgctgactttggtaaggtgtggatgatgctaaccccccagggagcaggccccctccttggcttcattggctcccagggagtccccagtgagagtctgggaagatgacaacacacggggtgctggggtccctgccttgtcagaagctgtggggtatgaggggtctctagttgcatgttctgccttctgagagggagtgccagagggccagcaagaggttgggtggctggctgactcagggactccttcctgctgtgtgtttagattcttctctgactgcgtgctctggagtggagagcacagcagctcctcaaaagctgctgatcctggatgcgcgatcctacacggcagcagtggccaaccgggccaagggtggaggctgtgaatgtgaagagtactatcccaactgtgaggtcgtgttcatgggaatggccaacatccatgccatccggaacagctttcagtacctccgggctgtgtgtagccagatgccggatcctagcaactggttgtcggcactggagagtaccaaatggctgcagcacttgtcggtgatgctaaaagcagctgtgctggtggctaatacagtagaccgggaaggccggcctgtgctggtacactgctcagatggctgggaccgcacaccgcagatcgtagccctggccaaaatattactggacccatattacaggacgttggagggcttccaagtgttagtggagtctgactggctggattttgggctcttggctcagatgtgttcatcaaatactcctttcagagctgttgtgggtgtaagtgacatgatgtggccaaaaatccaaactgtgcagttgcgttgtgacaaacatgcaatgtgctgtaaaaattcaatacagtttaaataaaatctctatattagt

SEQ ID NO: 452907 - DNA, 684 bp, Homo sapiens
catgctgctgcattccagcctgggcaaaagagcgagaccttgtctcaaaaacaaaacaaaaagcagccatagacagtaagtaaatgaatgaatgcagctgtgttccagcaaaacctgatttacaaaaacaggcagtgggctagtttggcctgtgggccatagcttgccaacccctggtttagaacataacaagagtctttctatgctgtggtgtagcatatcggtaagagtgtaaatctgaagctacaatactaggttcaaatcccagctttactacgtatcagctctttctctgtggcttcattttcttatttgtaaaatgggggtattagtagtatacattgtaagactgtcataagaaataagttcatgtgtgtaatgcacttagcacagtgcctgacacatggtaaacagtaagcgttaatgatgatgaagataatttgttgtctttgccttttcatcagacatgtttgaaggagtcagatggcagtgatactgaggattttggctctgatcacagtgaagactgcctttcagaagcaagctgggaacctgttgataagaaagagactgaggtatgtttaggcacatatgtggtgggtacttacgtgagccagtgagtcatcatattttccagagatgaatgacatgctgtagactgagctgtcccccagaggagtgtca

SEQ ID NO: 452908 - DNA, 5945 bp, Homo sapiens
cgctccattgtggagaggaggggagaggcgcgcgggagccgcgcggaggcccggccaccagcgccctagcctcttggccgccgcggctgcacctggcgagccccgcagccgggatgcggcgggcgcccggggctggcgggcagcgcagcggctccggggacatgtgcgctggcccagaccgcccgcgaccatgagcctgaccgcccgcgtctcctgctccatgcttagctgcttcggtgaggaggggccccccagcctggagtacatccaagccaaggatctgttcccccccaaggaactagtgaaggaggaagagaatcttcaggtccccttcacagtgctgcagggtgagggagtagagttcctgggccgggcagccgatgccctcattgccatctctaactaccggctgcatatcaaattcaaggactctgtcatcaacgtccccctccggatgattgacagtgtggagagccgtgatatgttccagttgcacatttcctgcaaggactccaaagtggtgaggtgccacttctccacttttaagcagtgccaagagtggctctcacggctaagccgagccacagcaagacctgccaagcctgaagacctctttgcctttgcctaccatgcctggtgcctggggctgaccgaggaggaccagcacactcacctatgtcagccaggtgagcacatacgttgtcgacaggaggcggagcttgcaaggatgggctttgacctgcagaacgtctggagagtctcacacatcaacagcaactacaaattgtgccccagttacccccagaagctgctggttcctgtgtggatcactgacaaagagctggagaacgtggcttccttccgctcctggaagcggattcccgtggttgtgtatagacacttgcgcaatggggctgccatcgcccgctgcagccagccagagatcagctggtggggctggcgcaatgctgatgatgagtacctggtcacgtccattgctaaagcctgtgccctggacccggggacaagggccactgggggctccctcagcaccgggaataatgataccagcgaggcgtgtgatgctgactttgattcttctctgactgcgtgctctggagtggagagcacagcagctcctcaaaagctgctgatcctggatgcgcgatcctacacggcagcagtggccaaccgggccaagggtggaggctgtgaatgtgaagagtactatcccaactgtgaggtcgtgttcatgggaatggccaacatccatgccatccggaacagctttcagtacctccgggctgtgtgtagccagatgccggatcctagcaactggttgtcggcactggagagtaccaaatggctgcagcacttgtcggtgatgctaaaagcagctgtgctggtggctaatacagtagaccgggaaggccggcctgtgctggtacactgctcagatggctgggaccgcacaccgcagatcgtagccctggccaaaatattactggacccatattacaggacgttggagggcttccaagtgttagtggagtctgactggctggattttgggcacaagtttggagatcgctgtggccaccaagagaatgtggaggaccaaaacgaacaatgccctgtgttcctccagtggcttgattctgttcatcagttgcttaagcagttcccctgcctgtttgaatttaatgaagcattcctggtaaaactggtgcaacacacatactcctgcctctacggcaccttcctggccaacaacccctgtgagcgagagaagcgcaacatctacaagcggacctgctctgtgtgggcgctccttcgagctggcaataaaaactttcataacttcctctacacacccagctcagacatggtcctgcatcctgtttgtcatgtccgggccctgcacctctggacagctgtttatctgccagcatcatctccatgcacacttggggaagaaaacatggatctttacctttccccagtggcccagagccaggagttctctggccgctctctggacagattacctaaaaccagatccatggatgatcttctttctgcctgtgacacaagcagccccctgactcgtacatccagtgaccctaacctgaataaccactgtcaggaggtcagggtaggcctggagccctggcacagcaatcctgagggatcagagacaagctttgtggactctggggtaggagggcctcagcaaactgtaggagaagtgggtcttcctcctcctctgcccagcagccagaaagactacttgagcaataaacctttcaagagtcacaaaagctgttctccaagttacaaactgcttaataccgcagtgcctcgggaaatgaagagcaacacctctgatcctgagatcaaagtcctagaagagactaagggaccagctccagacccttctgcccaggatgagctgggtaggactttagatggcataggggagccacctgaacattgtcctgaaacagaagctgtcagtgcactctccaaggtcatttctaacaagtgtgatggagtttgtaattttcctgagtcttcccagaactctcctacaggtacgccccaacaggcccagccagactccatgctaggtgtgccctccaagtgtgttcttgatcacagcctcagcaccgtttgcaacccaccgagtgctgcctgccaaactcctctagacccaagcactgacttcctcaaccaagatccctcagggtctgtggcaagtatctcccaccaggaacaactgagttctgtgccggatctgacccatggggaggaagacattggtaaaagaggaaataataggaatgggcagttattggaaaatcctcgctttgggaaaatgccattggaattggtccggaagccaatttctcagagccagatcagtgagttctcttttctagggtccaactgggacagcttccaagggatggtgacttcattcccaagtggggaggccacccctcggcggctgctttcctatggctgttgtagcaagaggccaaacagtaagcagatgcgggccacagggccctgctttgggggccagtgggctcagagagaaggtgtgaagtcacctgtctgttctagtcattccaatggacattgtactggcccaggaggaaagaaccagatgtggttgtccagtcatccaaagcaagtctctagcacaaagcccgttccactgaactgcccttctccagtgcctcctctgtatttggatgatgatggactcccctttcccacggatgtgatccagcataggttacggcaaatcgaagcagggtacaaacaagaggtggagcagctacgtcgacaggtgcgtgagcttcagatgaggctggacatccgtcactgctgtgcccctccagcagagccccccatggactatgaggatgattttacatgtttgaaggagtcagatggcagtgatactgaggattttggctctgatcacagtgaagactgcctttcagaagcaagctgggaacctgttgataagaaagagactgaggtgactcgctgggttccagaccatatggcatcacactgctataactgtgactgtgaattctggttggccaaacgaagacaccattgcagaaattgtgggaatgtattttgtgctggatgctgccacctgaagctgcccattcctgatcagcaactctatgacccagttctcgtctgtaactcatgttacgaacacattcaagtctctcgtgccagggaactcatgagccaacagctgaagaaacccattgctacagcttccagttgaatgccggggagaaacctgtccaattttagcaggtttgaagggaggatcttcttcagttgtagtttggaaggttccttggtgtggctcatgaaatcacagagctcagagataccatcttgagaaatcctccttggtatcatgaaactggagcagaggaattgcaatttagcaggaggtcctctactggtgataccctcaccttggggtaatggtcctaacccagacccagggtctggaagcttaatgttgagttggtgactccagcctctttctcctggaggtcacaagatgatgattgcgtagatgttgcctggtgcaaagtgccccaaacagcaatagaaaggcatatgtataaccaaactccaagtgataaccagacccatctctcctccaccttgacaaaagcagattatagtatacaaggtaggaattcctgtcctatttgagatgaactatatcctgtacctctgtgctctgtgtctgcatgaaggctcagcctttagaggcactccttctagttgcattagtactgtctttctgtggagtttggtttgaagactggctcagcaagtggaggtttcaatgtatttttcagttggctcatcagccagcattggtgaatattcagtttaggggaacagttctagggagtgagacatttttgggagcagaggaaaactctgctgatgttcggtcctggcaaacattgagttattttgagctgtgaaggcagtcgtctctgttacacagtggcagctcttgagttatgcactgtgaagaatgagaagggaaaagcaaaaattatccttgtgaaatatctgctgattgtgccctactctttgcacctgacttttcctagttgtcctggtgctaacacaggagctacaccttgatcctctcctggcatgaaaataaaacaaaggttttcgttgttgttgttccattgcccatttcccccatgttgtctttcccttggctgatgcctcctctgggtcacattgcttcttatcctgaacacttgacaccttgagggtagaatttagcgtttggtttttacctcctagcatatgctgtttggtatgtgagggtttcagtacaaatgctgctgtctatttctgtgcacttaacaatggaacccaaacagaagagaataaagccttgataccaaaattgggaaagaacatgtgtccatttggaccaaacgttgttggtttttaaaaaattttattttgtttttttgttttgtttttgttttttttcatcttaatatgtaccagtggcacttaaccaaaagatacagtgatatagccatgtactgtgggtgggacagatacagtctccttggcctataatgaaaccactaggactttatacagttttccttaatttgttgacatataaatggtaaattatatttaggcttatcctgttttgaaatgatggtagtcatctttcttactgctactttcatgttgctttctagaaaacagcatttcattccaaaataactaggatctgcatttagaacaagaatcattatttgtcctgaccttttcagtcctacagagacgcatctgtggttcttttgtacttgccatagatgtaacctaaaaagttttggcatatttaggtcagcctagcggaactttttttttcatttaaatggagctgaataatggagattttgtgtctgcaaaattcctgagatcattgaaaaagtaacaagctgttccttgtttctgatacataaaattattttaagcattttatcaatcattaaaatttactgccagttgtgagtggctttttaattaacttgtctttcattgcacttcactctgcctgttttcaaggggagtaagattggtaacatttggggagactgtatctgtctacttagcgtggctgttttgagggactgtcccatcagtgaacaaactgcatggccttggagagagactctgggctcttggctcagatgtgttcatcaaatactcctttcagagctgttgtgggtgtaagtgacatgatgtggccaaaaatccaaactgtgcagttgcgttgtgacaaacatgcaatgtgctgtaaaaattcaatacagtttaaataaaatctctatattagt

SEQ ID NO: 452909 - DNA, 5740 bp, Homo sapiens
gcgagtaacgggatagcgcggctcagagggtcgggcggacgccgcctggtgagaagcaggcagccagtacccttgccacggtagaatgggtgaggaggggccccccagcctggagtacatccaagccaaggatctgttcccccccaaggaactagtgaaggaggaagagaatcttcaggtccccttcacagtgctgcagggtgagggagtagagttcctgggccgggcagccgatgccctcattgccatctctaactaccggctgcatatcaaattcaaggactctgtcatcaacgtccccctccggatgattgacagtgtggagagccgtgatatgttccagttgcacatttcctgcaaggactccaaagtggtgaggtgccacttctccacttttaagcagtgccaagagtggctctcacggctaagccgagccacagcaagacctgccaagcctgaagacctctttgcctttgcctaccatgcctggtgcctggggctgaccgaggaggaccagcacactcacctatgtcagccaggtgagcacatacgttgtcgacaggaggcggagcttgcaaggatgggctttgacctgcagaacgtctggagagtctcacacatcaacagcaactacaaattgtgccccagttacccccagaagctgctggttcctgtgtggatcactgacaaagagctggagaacgtggcttccttccgctcctggaagcggattcccgtggttgtgtatagacacttgcgcaatggggctgccatcgcccgctgcagccagccagagatcagctggtggggctggcgcaatgctgatgatgagtacctggtcacgtccattgctaaagcctgtgccctggacccggggacaagggccactgggggctccctcagcaccgggaataatgataccagcgaggcgtgtgatgctgactttgattcttctctgactgcgtgctctggagtggagagcacagcagctcctcaaaagctgctgatcctggatgcgcgatcctacacggcagcagtggccaaccgggccaagggtggaggctgtgaatgtgaagagtactatcccaactgtgaggtcgtgttcatgggaatggccaacatccatgccatccggaacagctttcagtacctccgggctgtgtgtagccagatgccggatcctagcaactggttgtcggcactggagagtaccaaatggctgcagcacttgtcggtgatgctaaaagcagctgtgctggtggctaatacagtagaccgggaaggccggcctgtgctggtacactgctcagatggctgggaccgcacaccgcagatcgtagccctggccaaaatattactggacccatattacaggacgttggagggcttccaagtgttagtggagtctgactggctggattttgggcacaagtttggagatcgctgtggccaccaagagaatgtggaggaccaaaacgaacaatgccctgtgttcctccagtggcttgattctgttcatcagttgcttaagcagttcccctgcctgtttgaatttaatgaagcattcctggtaaaactggtgcaacacacatactcctgcctctacggcaccttcctggccaacaacccctgtgagcgagagaagcgcaacatctacaagcggacctgctctgtgtgggcgctccttcgagctggcaataaaaactttcataacttcctctacacacccagctcagacatggtcctgcatcctgtttgtcatgtccgggccctgcacctctggacagctgtttatctgccagcatcatctccatgcacacttggggaagaaaacatggatctttacctttccccagtggcccagagccaggagttctctggccgctctctggacagattacctaaaaccagatccatggatgatcttctttctgcctgtgacacaagcagccccctgactcgtacatccagtgaccctaacctgaataaccactgtcaggaggtcagggtaggcctggagccctggcacagcaatcctgagggatcagagacaagctttgtggactctggggtaggagggcctcagcaaactgtaggagaagtgggtcttcctcctcctctgcccagcagccagaaagactacttgagcaataaacctttcaagagtcacaaaagctgttctccaagttacaaactgcttaataccgcagtgcctcgggaaatgaagagcaacacctctgatcctgagatcaaagtcctagaagagactaagggaccagctccagacccttctgcccaggatgagctgggtaggactttagatggcataggggagccacctgaacattgtcctgaaacagaagctgtcagtgcactctccaaggtcatttctaacaagtgtgatggagtttgtaattttcctgagtcttcccagaactctcctacaggtacgccccaacaggcccagccagactccatgctaggtgtgccctccaagtgtgttcttgatcacagcctcagcaccgtttgcaacccaccgagtgctgcctgccaaactcctctagacccaagcactgacttcctcaaccaagatccctcagggtctgtggcaagtatctcccaccaggaacaactgagttctgtgccggatctgacccatggggaggaagacattggtaaaagaggaaataataggaatgggcagttattggaaaatcctcgctttgggaaaatgccattggaattggtccggaagccaatttctcagagccagatcagtgagttctcttttctagggtccaactgggacagcttccaagggatggtgacttcattcccaagtggggaggccacccctcggcggctgctttcctatggctgttgtagcaagaggccaaacagtaagcagatgcgggccacagggccctgctttgggggccagtgggctcagagagaaggtgtgaagtcacctgtctgttctagtcattccaatggacattgtactggcccaggaggaaagaaccagatgtggttgtccagtcatccaaagcaagtctctagcacaaagcccgttccactgaactgcccttctccagtgcctcctctgtatttggatgatgatggactcccctttcccacggatgtgatccagcataggttacggcaaatcgaagcagggtacaaacaagaggtggagcagctacgtcgacaggtgcgtgagcttcagatgaggctggacatccgtcactgctgtgcccctccagcagagccccccatggactatgaggatgattttacatgtttgaaggagtcagatggcagtgatactgaggattttggctctgatcacagtgaagactgcctttcagaagcaagctgggaacctgttgataagaaagagactgaggtgactcgctgggttccagaccatatggcatcacactgctataactgtgactgtgaattctggttggccaaacgaagacaccattgcagaaattgtgggaatgtattttgtgctggatgctgccacctgaagctgcccattcctgatcagcaactctatgacccagttctcgtctgtaactcatgttacgaacacattcaagtctctcgtgccagggaactcatgagccaacagctgaagaaacccattgctacagcttccagttgaatgccggggagaaacctgtccaattttagcaggtttgaagggaggatcttcttcagttgtagtttggaaggttccttggtgtggctcatgaaatcacagagctcagagataccatcttgagaaatcctccttggtatcatgaaactggagcagaggaattgcaatttagcaggaggtcctctactggtgataccctcaccttggggtaatggtcctaacccagacccagggtctggaagcttaatgttgagttggtgactccagcctctttctcctggaggtcacaagatgatgattgcgtagatgttgcctggtgcaaagtgccccaaacagcaatagaaaggcatatgtataaccaaactccaagtgataaccagacccatctctcctccaccttgacaaaagcagattatagtatacaaggtaggaattcctgtcctatttgagatgaactatatcctgtacctctgtgctctgtgtctgcatgaaggctcagcctttagaggcactccttctagttgcattagtactgtctttctgtggagtttggtttgaagactggctcagcaagtggaggtttcaatgtatttttcagttggctcatcagccagcattggtgaatattcagtttaggggaacagttctagggagtgagacatttttgggagcagaggaaaactctgctgatgttcggtcctggcaaacattgagttattttgagctgtgaaggcagtcgtctctgttacacagtggcagctcttgagttatgcactgtgaagaatgagaagggaaaagcaaaaattatccttgtgaaatatctgctgattgtgccctactctttgcacctgacttttcctagttgtcctggtgctaacacaggagctacaccttgatcctctcctggcatgtttcccttggctgatgcctcctctgggtcacattgcttcttatcctgaacacttgacaccttgagggtagaatttagcgtttggtttttacctcctagcatatgctgtttggtatgtgagggtttcagtacaaatgctgctgtctatttctgtgcacttaacaatggaacccaaacagaagagaataaagccttgataccaaaattgggaaagaacatgtgtccatttggaccaaacgttgttggtttttaaaaaattttattttgtttttttgttttgtttttgttttttttcatcttaatatgtaccagtggcacttaaccaaaagatacagtgatatagccatgtactgtgggtgggacagatacagtctccttggcctataatgaaaccactaggactttatacagttttccttaatttgttgacatataaatggtaaattatatttaggcttatcctgttttgaaatgatggtagtcatctttcttactgctactttcatgttgctttctagaaaacagcatttcattccaaaataactaggatctgcatttagaacaagaatcattatttgtcctgaccttttcagtcctacagagacgcatctgtggttcttttgtacttgccatagatgtaacctaaaaagttttggcatatttaggtcagcctagcggaactttttttttcatttaaatggagctgaataatggagattttgtgtctgcaaaattcctgagatcattgaaaaagtaacaagctgttccttgtttctgatacataaaattattttaagcattttatcaatcattaaaatttactgccagttgtgagtggctttttaattaacttgtctttcattgcacttcactctgcctgttttcaaggggagtaagattggtaacatttggggagactgtatctgtctacttagcgtggctgttttgagggactgtcccatcagtgaacaaactgcatggccttggagagagactctgggctcttggctcagatgtgttcatcaaatactcctttcagagctgttgtgggtgtaagtgacatgatgtggccaaaaatccaaactgtgcagttgcgttgtgacaaacatgcaatgtgctgtaaaaattcaatacagtttaaataaaatctctatattagt

SEQ ID NO: 452910 - DNA, 6049 bp, Homo sapiens
gcgagtaacgggatagcgcggctcagagggtcgggcggacgccgcctggtgagaagcaggcagccagtacccttgccacggtagaatgggtgaggaggggccccccagcctggagtacatccaagccaaggatctgttcccccccaaggaactagtgaaggaggaagagaatcttcaggtccccttcacagtgctgcagggtgagggagtagagttcctgggccgggcagccgatgccctcattgccatctctaactaccggctgcatatcaaattcaaggactctgtcatcaacgtccccctccggatgattgacagtgtggagagccgtgatatgttccagttgcacatttcctgcaaggactccaaagtggtgaggtgccacttctccacttttaagcagtgccaagagtggctctcacggctaagccgagccacagcaagacctgccaagcctgaagacctctttgcctttgcctaccatgcctggtgcctggggctgaccgaggaggaccagcacactcacctatgtcagccaggtgagcacatacgttgtcgacaggaggcggagcttgcaaggatgggctttgacctgcagaacgtctggagagtctcacacatcaacagcaactacaaattgtgccccagttacccccagaagctgctggttcctgtgtggatcactgacaaagagctggagaacgtggcttccttccgctcctggaagcggattcccgtggttgtgtatagacacttgcgcaatggggctgccatcgcccgctgcagccagccagagatcagctggtggggctggcgcaatgctgatgatgagtacctggtcacgtccattgctaaagcctgtgccctggacccggggacaagggccactgggggctccctcagcaccgggaataatgataccagcgaggcgtgtgatgctgactttggtaaggtgtggatgatgctaaccccccagggagcaggccccctccttggcttcattggctcccagggagtccccagtgagagtctgggaagatgacaacacacggggtgctggggtccctgccttgtcagaagctgtggggtatgaggggtctctagttgcatgttctgccttctgagagggagtgccagagggccagcaagaggttgggtggctggctgactcagggactccttcctgctgtgtgtttagattcttctctgactgcgtgctctggagtggagagcacagcagctcctcaaaagctgctgatcctggatgcgcgatcctacacggcagcagtggccaaccgggccaagggtggaggctgtgaatgtgaagagtactatcccaactgtgaggtcgtgttcatgggaatggccaacatccatgccatccggaacagctttcagtacctccgggctgtgtgtagccagatgccggatcctagcaactggttgtcggcactggagagtaccaaatggctgcagcacttgtcggtgatgctaaaagcagctgtgctggtggctaatacagtagaccgggaaggccggcctgtgctggtacactgctcagatggctgggaccgcacaccgcagatcgtagccctggccaaaatattactggacccatattacaggacgttggagggcttccaagtgttagtggagtctgactggctggattttgggcacaagtttggagatcgctgtggccaccaagagaatgtggaggaccaaaacgaacaatgccctgtgttcctccagtggcttgattctgttcatcagttgcttaagcagttcccctgcctgtttgaatttaatgaagcattcctggtaaaactggtgcaacacacatactcctgcctctacggcaccttcctggccaacaacccctgtgagcgagagaagcgcaacatctacaagcggacctgctctgtgtgggcgctccttcgagctggcaataaaaactttcataacttcctctacacacccagctcagacatggtcctgcatcctgtttgtcatgtccgggccctgcacctctggacagctgtttatctgccagcatcatctccatgcacacttggggaagaaaacatggatctttacctttccccagtggcccagagccaggagttctctggccgctctctggacagattacctaaaaccagatccatggatgatcttctttctgcctgtgacacaagcagccccctgactcgtacatccagtgaccctaacctgaataaccactgtcaggaggtcagggtaggcctggagccctggcacagcaatcctgagggatcagagacaagctttgtggactctggggtaggagggcctcagcaaactgtaggagaagtgggtcttcctcctcctctgcccagcagccagaaagactacttgagcaataaacctttcaagagtcacaaaagctgttctccaagttacaaactgcttaataccgcagtgcctcgggaaatgaagagcaacacctctgatcctgagatcaaagtcctagaagagactaagggaccagctccagacccttctgcccaggatgagctgggtaggactttagatggcataggggagccacctgaacattgtcctgaaacagaagctgtcagtgcactctccaaggtcatttctaacaagtgtgatggagtttgtaattttcctgagtcttcccagaactctcctacaggtacgccccaacaggcccagccagactccatgctaggtgtgccctccaagtgtgttcttgatcacagcctcagcaccgtttgcaacccaccgagtgctgcctgccaaactcctctagacccaagcactgacttcctcaaccaagatccctcagggtctgtggcaagtatctcccaccaggaacaactgagttctgtgccggatctgacccatggggaggaagacattggtaaaagaggaaataataggaatgggcagttattggaaaatcctcgctttgggaaaatgccattggaattggtccggaagccaatttctcagagccagatcagtgagttctcttttctagggtccaactgggacagcttccaagggatggtgacttcattcccaagtggggaggccacccctcggcggctgctttcctatggctgttgtagcaagaggccaaacagtaagcagatgcgggccacagggccctgctttgggggccagtgggctcagagagaaggtgtgaagtcacctgtctgttctagtcattccaatggacattgtactggcccaggaggaaagaaccagatgtggttgtccagtcatccaaagcaagtctctagcacaaagcccgttccactgaactgcccttctccagtgcctcctctgtatttggatgatgatggactcccctttcccacggatgtgatccagcataggttacggcaaatcgaagcagggtacaaacaagaggtggagcagctacgtcgacaggtgcgtgagcttcagatgaggctggacatccgtcactgctgtgcccctccagcagagccccccatggactatgaggatgattttacatgtttgaaggagtcagatggcagtgatactgaggattttggctctgatcacagtgaagactgcctttcagaagcaagctgggaacctgttgataagaaagagactgaggtgactcgctgggttccagaccatatggcatcacactgctataactgtgactgtgaattctggttggccaaacgaagacaccattgcagaaattgtgggaatgtattttgtgctggatgctgccacctgaagctgcccattcctgatcagcaactctatgacccagttctcgtctgtaactcatgttacgaacacattcaagtctctcgtgccagggaactcatgagccaacagctgaagaaacccattgctacagcttccagttgaatgccggggagaaacctgtccaattttagcaggtttgaagggaggatcttcttcagttgtagtttggaaggttccttggtgtggctcatgaaatcacagagctcagagataccatcttgagaaatcctccttggtatcatgaaactggagcagaggaattgcaatttagcaggaggtcctctactggtgataccctcaccttggggtaatggtcctaacccagacccagggtctggaagcttaatgttgagttggtgactccagcctctttctcctggaggtcacaagatgatgattgcgtagatgttgcctggtgcaaagtgccccaaacagcaatagaaaggcatatgtataaccaaactccaagtgataaccagacccatctctcctccaccttgacaaaagcagattatagtatacaaggtaggaattcctgtcctatttgagatgaactatatcctgtacctctgtgctctgtgtctgcatgaaggctcagcctttagaggcactccttctagttgcattagtactgtctttctgtggagtttggtttgaagactggctcagcaagtggaggtttcaatgtatttttcagttggctcatcagccagcattggtgaatattcagtttaggggaacagttctagggagtgagacatttttgggagcagaggaaaactctgctgatgttcggtcctggcaaacattgagttattttgagctgtgaaggcagtcgtctctgttacacagtggcagctcttgagttatgcactgtgaagaatgagaagggaaaagcaaaaattatccttgtgaaatatctgctgattgtgccctactctttgcacctgacttttcctagttgtcctggtgctaacacaggagctacaccttgatcctctcctggcatgaaaataaaacaaaggttttcgttgttgttgttccattgcccatttcccccatgttgtctttcccttggctgatgcctcctctgggtcacattgcttcttatcctgaacacttgacaccttgagggtagaatttagcgtttggtttttacctcctagcatatgctgtttggtatgtgagggtttcagtacaaatgctgctgtctatttctgtgcacttaacaatggaacccaaacagaagagaataaagccttgataccaaaattgggaaagaacatgtgtccatttggaccaaacgttgttggtttttaaaaaattttattttgtttttttgttttgtttttgttttttttcatcttaatatgtaccagtggcacttaaccaaaagatacagtgatatagccatgtactgtgggtgggacagatacagtctccttggcctataatgaaaccactaggactttatacagttttccttaatttgttgacatataaatggtaaattatatttaggcttatcctgttttgaaatgatggtagtcatctttcttactgctactttcatgttgctttctagaaaacagcatttcattccaaaataactaggatctgcatttagaacaagaatcattatttgtcctgaccttttcagtcctacagagacgcatctgtggttcttttgtacttgccatagatgtaacctaaaaagttttggcatatttaggtcagcctagcggaactttttttttcatttaaatggagctgaataatggagattttgtgtctgcaaaattcctgagatcattgaaaaagtaacaagctgttccttgtttctgatacataaaattattttaagcattttatcaatcattaaaatttactgccagttgtgagtggctttttaattaacttgtctttcattgcacttcactctgcctgttttcaaggggagtaagattggtaacatttggggagactgtatctgtctacttagcgtggctgttttgagggactgtcccatcagtgaacaaactgcatggccttggagagagactctgggctcttggctcagatgtgttcatcaaatactcctttcagagctgttgtgggtgtaagtgacatgatgtggccaaaaatccaaactgtgcagttgcgttgtgacaaacatgcaatgtgctgtaaaaattcaatacagtttaaataaaatctctatattagt

SEQ ID NO: 452911 - DNA, 4428 bp, Homo sapiens
atttattatcatcattgtataaagggagaaaccaagtatctgagaggttaatttacttatttgtagtcatgtagctaattagcgtcagagccaatattgtctagctccaaaacccatcttctttctgttttactgtgatggaggcagtgggatattgggtttgagtctcaggtatagtcctagctggaacagtagattcagaaggcattggcatagaaggcagctgaaaccactgtagtggttgagattgcccagggagactggtaggttgagtgctgacaaaagctgaggatagatttttgggttccggaggacacggtccatgtctcatgctttttttacagagtaaactttcagtgaacattggttatttgtgatcttaagggtccttatttctaaacttaagtgttcttaagtgtcattatttctaaactctggctttgatattgctccattgattcagttccatatattgtattgcaagtgcccatctcctgacctggaggtgttatatttgtctttccagattacctaaaaccagatccatggatgatcttctttctgcctgtgacacaagcagccccctgactcgtacatccagtgaccctaacctgaataaccactgtcaggaggtcagggtaggcctggagccctggcacagcaatcctgagggatcagagacaagctttgtggactctggggtaggagggcctcagcaaactgtaggagaagtgggtcttcctcctcctctgcccagcagccagaaagactacttgagcaataaacctttcaagagtcacaaaagctgttctccaagttacaaactgcttaataccgcagtgcctcgggaaatgaagagcaacacctctgatcctgagatcaaagtcctagaagagactaagggaccagctccagacccttctgcccaggatgagctgggtaggactttagatggcataggggagccacctgaacattgtcctgaaacagaagctgtcagtgcactctccaaggtcatttctaacaagtgtgatggagtttgtaattttcctgagtcttcccagaactctcctacaggtacgccccaacaggcccagccagactccatgctaggtgtgccctccaagtgtgttcttgatcacagcctcagcaccgtttgcaacccaccgagtgctgcctgccaaactcctctagacccaagcactgacttcctcaaccaagatccctcagggtctgtggcaagtatctcccaccaggaacaactgagttctgtgccggatctgacccatggggaggaagacattggtaaaagaggaaataataggaatgggcagttattggaaaatcctcgctttgggaaaatgccattggaattggtccggaagccaatttctcagagccagatcagtgagttctcttttctagggtccaactgggacagcttccaagggatggtgacttcattcccaagtggggaggccacccctcggcggctgctttcctatggctgttgtagcaagaggccaaacagtaagcagatgcgggccacagggccctgctttgggggccagtgggctcagagagaaggtgtgaagtcacctgtctgttctagtcattccaatggacattgtactggcccaggaggaaagaaccagatgtggttgtccagtcatccaaagcaagtctctagcacaaagcccgttccactgaactgcccttctccagtgcctcctctgtatttggatgatgatggactcccctttcccacggatgtgatccagcataggttacggcaaatcgaagcagggtacaaacaagaggtggagcagctacgtcgacaggtgcgtgagcttcagatgaggctggacatccgtcactgctgtgcccctccagcagagccccccatggactatgaggatgattttacatgtttgaaggagtcagatggcagtgatactgaggattttggctctgatcacagtgaagactgcctttcagaagcaagctgggaacctgttgataagaaagagactgaggtgactcgctgggttccagaccatatggcatcacactgctataactgtgactgtgaattctggttggccaaacgaagacaccattgcagaaattgtgggaatgtattttgtgctggatgctgccacctgaagctgcccattcctgatcagcaactctatgacccagttctcgtctgtaactcatgttacgaacacattcaagtctctcgtgccagggaactcatgagccaacagctgaagaaacccattgctacagcttccagttgaatgccggggagaaacctgtccaattttagcaggtttgaagggaggatcttcttcagttgtagtttggaaggttccttggtgtggctcatgaaatcacagagctcagagataccatcttgagaaatcctccttggtatcatgaaactggagcagaggaattgcaatttagcaggaggtcctctactggtgataccctcaccttggggtaatggtcctaacccagacccagggtctggaagcttaatgttgagttggtgactccagcctctttctcctggaggtcacaagatgatgattgcgtagatgttgcctggtgcaaagtgccccaaacagcaatagaaaggcatatgtataaccaaactccaagtgataaccagacccatctctcctccaccttgacaaaagcagattatagtatacaaggtaggaattcctgtcctatttgagatgaactatatcctgtacctctgtgctctgtgtctgcatgaaggctcagcctttagaggcactccttctagttgcattagtactgtctttctgtggagtttggtttgaagactggctcagcaagtggaggtttcaatgtatttttcagttggctcatcagccagcattggtgaatattcagtttaggggaacagttctagggagtgagacatttttgggagcagaggaaaactctgctgatgttcggtcctggcaaacattgagttattttgagctgtgaaggcagtcgtctctgttacacagtggcagctcttgagttatgcactgtgaagaatgagaagggaaaagcaaaaattatccttgtgaaatatctgctgattgtgccctactctttgcacctgacttttcctagttgtcctggtgctaacacaggagctacaccttgatcctctcctggcatgaaaataaaacaaaggttttcgttgttgttgttccattgcccatttcccccatgttgtctttcccttggctgatgcctcctctgggtcacattgcttcttatcctgaacacttgacaccttgagggtagaatttagcgtttggtttttacctcctagcatatgctgtttggtatgtgagggtttcagtacaaatgctgctgtctatttctgtgcacttaacaatggaacccaaacagaagagaataaagccttgataccaaaattgggaaagaacatgtgtccatttggaccaaacgttgttggtttttaaaaaattttattttgtttttttgttttgtttttgttttttttcatcttaatatgtaccagtggcacttaaccaaaagatacagtgatatagccatgtactgtgggtgggacagatacagtctccttggcctataatgaaaccactaggactttatacagttttccttaatttgttgacatataaatggtaaattatatttaggcttatcctgttttgaaatgatggtagtcatctttcttactgctactttcatgttgctttctagaaaacagcatttcattccaaaataactaggatctgcatttagaacaagaatcattatttgtcctgaccttttcagtcctacagagacgcatctgtggttcttttgtacttgccatagatgtaacctaaaaagttttggcatatttaggtcagcctagcggaactttttttttcatttaaatggagctgaataatggagattttgtgtctgcaaaattcctgagatcattgaaaaagtaacaagctgttccttgtttctgatacataaaattattttaagcattttatcaatcattaaaatttactgccagttgtgagtggctttttaattaacttgtctttcattgcacttcactctgcctgttttcaaggggagtaagattggtaacatttggggagactgtatctgtctacttagcgtggctgttttgagggactgtcccatcagtgaacaaactgcatggccttggagagagactctgggctcttggctcagatgtgttcatcaaatactcctttcagagctgttgtgggtgtaagtgacatgatgtggccaaaaatccaaactgtgcagttgcgttgtgacaaacatgcaatgtgctgtaaaaattcaatacagtttaaataaaatctctatattagt

SEQ ID NO: 452912 - DNA, 5224 bp, Homo sapiens
gcgagtaacgggatagcgcggctcagagggtcgggcggacgccgcctggtgagaagcaggcagccagtacccttgccacggtagaatgggtgaggaggggccccccagcctggagtacatccaagccaaggatctgttcccccccaaggaactagtgaaggaggaagagaatcttcaggtccccttcacagtgctgcagggtgagggagtagagttcctgggccgggcagccgatgccctcattgccatctctaactaccggctgcatatcaaattcaaggactctgtcatcaacgtccccctccggatgattgacagtgtggagagccgtgatatgttccagttgcacatttcctgcaaggactccaaagtggtgaggtgccacttctccacttttaagcagtgccaagagtggctctcacggctaagccgagccacagcaagacctgccaagcctgaagacctctttgcctttgcctaccatgcctggtgcctggggctgaccgaggaggaccagcacactcacctatgtcagccaggtgagcacatacgttgtcgacaggaggcggagcttgcaaggatgggctttgacctgcagaacgtctggagagtctcacacatcaacagcaactacaaattgtgccccagttacccccagaagctgctggttcctgtgtggatcactgacaaagagctggagaacgtggcttccttccgctcctggaagcggattcccgtggttgtgtatagacacttgcgcaatggggctgccatcgcccgctgcagccagccagagatcagctggtggggctggcgcaatgctgatgatgagtacctggtcacgtccattgctaaagcctgtgccctggacccggggacaagggccactgggggctccctcagcaccgggaataatgataccagcgaggcgtgtgatgctgactttgattcttctctgactgcgtgctctggagtggagagcacagcagctcctcaaaagctgctgatcctggatgcgcgatcctacacggcagcagtggccaaccgggccaagggtggaggctgtgaatgtgaagagtactatcccaactgtgaggtcgtgttcatgggaatggccaacatccatgccatccggaacagctttcagtacctccgggctgtgtgtagccagatgccggatcctagcaactggttgtcggcactggagagtaccaaatggctgcagcacttgtcggtgatgctaaaagcagctgtgctggtggctaatacagtagaccgggaaggccggcctgtgctggtacactgctcagatggctgggaccgcacaccgcagatcgtagccctggccaaaatattactggacccatattacaggacgttggagggcttccaagtgttagtggagtctgactggctggattttgggcacaagtttggagatcgctgtggccaccaagagaatgtggaggaccaaaacgaacaatgccctgtgttcctccagtggcttgattctgttcatcagttgcttaagcagttcccctgcctgtttgaatttaatgaagcattcctggtaaaactggtgcaacacacatactcctgcctctacggcaccttcctggccaacaacccctgtgagcgagagaagcgcaacatctacaagcggacctgctctgtgtgggcgctccttcgagctggcaataaaaactttcataacttcctctacacacccagctcagacatggtcctgcatcctgtttgtcatgtccgggccctgcacctctggacagctgtttatctgccagcatcatctccatgcacacttggggaagaaaacatggatctttacctttccccagtggcccagagccaggagttctctggccgctctctggacagattacctaaaaccagatccatggatgatcttctttctgcctgtgacacaagcagccccctgactcgtacatccagtgaccctaacctgaataaccactgtcaggaggtcagggtaggcctggagccctggcacagcaatcctgagggatcagagacaagctttgtggactctggggtaggagggcctcagcaaactgtaggagaagtgggtcttcctcctcctctgcccagcagccagaaagactacttgagcaataaacctttcaagagtcacaaaagctgttctccaagttacaaactgcttaataccgcagtgcctcgggaaatgaagagcaacacctctgatcctgagatcaaagtcctagaagagactaagggaccagctccagacccttctgcccaggatgagctgggtaggactttagatggcataggggagccacctgaacattgtcctgaaacagaagctgtcagtgcactctccaaggtcatttctaacaagtgtgatggagtttgtaattttcctgagtcttcccagaactctcctacaggtacgccccaacaggcccagccagactccatgctaggtgtgccctccaagtgtgttcttgatcacagcctcagcaccgtttgcaacccaccgagtgctgcctgccaaactcctctagacccaagcactgacttcctcaaccaagatccctcagggtctgtggcaagtatctcccaccaggaacaactgagttctgtgccggatctgacccatggggaggaagacattggtaaaagaggaaataataggaatgggcagttattggaaaatcctcgctttgggaaaatgccattggaattggtccggaagccaatttctcagagccagatcagtgagttctcttttctagggtccaactgggacagcttccaagggatggtgacttcattcccaagtggggaggccacccctcggcggctgctttcctatggctgttgtagcaagaggccaaacagtaagcagatgcgggccacagggccctgctttgggggccagtgggctcagagagaaggtgtgaagtcacctgtctgttctagtcattccaatggacattgtactggcccaggaggaaagaaccagatgtggttgtccagtcatccaaagcaagtctctagcacaaagcccgttccactgaactgcccttctccagtgcctcctctgtatttggatgatgatggactcccctttcccacggatgtgatccagcataggttacggcaaatcgaagcagggtacaaacaagaggtggagcagctacgtcgacaggtgcgtgagcttcagatgaggctggacatccgtcactgctgtgcccctccagcagagccccccatggactatgaggatgattttacatgtttgaaggagtcagatggcagtgatactgaggattttggctctgatcacagtgaagactgcctttcagaagcaagctgggaacctgttgataagaaagagactgaggtgactcgctgggttccagaccatatggcatcacactgctataactgtgactgtgaattctggttggccaaacgaagacaccattgcagaaattgtgggaatgtattttgtgctggatgctgccacctgaagctgcccattcctgatcagcaactctatgacccagttctcgtctgtaactcatgttacgaacacattcaagtctctcgtgccagggaactcatgagccaacagctgaagaaacccattgctacagcttccagttgaatgccggggagaaacctgtccaattttagcaggtttgaagggaggatcttcttcagttgtagtttggaaggttccttggtgtggctcatgaaatcacagagctcagagataccatcttgagaaatcctccttggtatcatgaaactggagcagaggaattgcaatttagcaggaggtcctctactggtgataccctcaccttggggtaatggtcctaacccagacccagggtctggaagcttaatgttgagttggtgactccagcctctttctcctggaggtcacaagatgatgattgcgtagatgttgcctggtgcaaagtgccccaaacagcaatagaaaggcatatgtataaccaaactccaagtgataaccagacccatctctcctccaccttgacaaaagcagattatagtatacaaggtaggaattcctgtcctatttgagatgaactatatcctgtacctctgtgctctgtgtctgcatgaaggctcagcctttagaggcactccttctagttgcattagtactgtctttctgtggagtttggtttgaagactggctcagcaagtggaggtttcaatgtatttttcagttggctcatcagccagcattggtgaatattcagtttaggggaacagttctagggagtgagacatttttgggagcagaggaaaactctgctgatgttcggtcctggcaaacattgagttattttgagctgtgaaggcagtcgtctctgttacacagtggcagctcttgagttatgcactgtgaagaatgagaagggaaaagcaaaaattatccttgtgaaatatctgctgattgtgccctactctttgcacctgacttttcctagttgtcctggtgctaacacaggagctacaccttgatcctctcctggcatgaaaataaaacaaaggttttcgttgttgttgttccattgcccatttcccccatgttgtctttcccttggctgatgcctcctctgggtcacattgcttcttatcctgaacacttgacaccttgagggtagaatttagcgtttggtttttacctcctagcatatgctgtttggtatgtgagggtttcagtacaaatgctgctgtctatttctgtgcacttaacaatggaacccaaacagaagagaataaagccttgataccaaaattgggaaagaacatgtgtccatttggaccaaacgttgttggtttttaaaaaattttattttgtttttttgttttgtttttgttttttttcatcttaatatgtaccagtggcacttaaccaaaagatacagtgatatagccatatctgtctacttagcgtggctgttttgagggactgtcccatcagtgaacaaactgcatggccttggagagagactctgggctcttggctcagatgtgttcatcaaatactcctttcagagctgttgtgggtgtaagtgacatgatgtggccaaaaatccaaactgtgcagttgcgttgtgacaaacatgcaatgtgctgtaaaaattcaatacagtttaaataaaatctctatattagt

SEQ ID NO: 452913 - DNA, 4963 bp, Homo sapiens
  misc_feature (4629)..(4629): n is a, c, g, or t
  misc_feature (4633)..(4633): n is a, c, g, or t
  misc_feature (4645)..(4645): n is a, c, g, or t
gcgagtaacgggatagcgcggctcagagggtcgggcggacgccgcctggtgagaagcaggcagccagtacccttgccacggtagaatgggtgaggaggggccccccagcctggagtacatccaagccaaggatctgttcccccccaaggaactagtgaaggaggaagagaatcttcaggtccccttcacagtgctgcagggtgagggagtagagttcctgggccgggcagccgatgccctcattgccatctctaactaccggctgcatatcaaattcaaggactctgtcatcaacgtccccctccggatgattgacagtgtggagagccgtgatatgttccagttgcacatttcctgcaaggactccaaagtggtgaggtgccacttctccacttttaagcagtgccaagagtggctctcacggctaagccgagccacagcaagacctgccaagcctgaagacctctttgcctttgcctaccatgcctggtgcctggggctgaccgaggaggaccagcacactcacctatgtcagccaggtgagcacatacgttgtcgacaggaggcggagcttgcaaggatgggctttgacctgcagaacgtctggagagtctcacacatcaacagcaactacaaattgtgccccagttacccccagaagctgctggttcctgtgtggatcactgacaaagagctggagaacgtggcttccttccgctcctggaagcggattcccgtggttgtgtatagacacttgcgcaatggggctgccatcgcccgctgcagccagccagagatcagctggtggggctggcgcaatgctgatgatgagtacctggtcacgtccattgctaaagcctgtgccctggacccggggacaagggccactgggggctccctcagcaccgggaataatgataccagcgaggcgtgtgatgctgactttgattcttctctgactgcgtgctctggagtggagagcacagcagctcctcaaaagctgctgatcctggatgcgcgatcctacacggcagcagtggccaaccgggccaagggtggaggctgtgaatgtgaagagtactatcccaactgtgaggtcgtgttcatgggaatggccaacatccatgccatccggaacagctttcagtacctccgggctgtgtgtagccagatgccggatcctagcaactggttgtcggcactggagagtaccaaatggctgcagcacttgtcggtgatgctaaaagcagctgtgctggtggctaatacagtagaccgggaaggccggcctgtgctggtacactgctcagatggctgggaccgcacaccgcagatcgtagccctggccaaaatattactggacccatattacaggacgttggagggcttccaagtgttagtggagtctgactggctggattttgggcacaagtttggagatcgctgtggccaccaagagaatgtggaggaccaaaacgaacaatgccctgtgttcctccagtggcttgattctgttcatcagttgcttaagcagttcccctgcctgtttgaatttaatgaagcattcctggtaaaactggtgcaacacacatactcctgcctctacggcaccttcctggccaacaacccctgtgagcgagagaagcgcaacatctacaagcggacctgctctgtgtgggcgctccttcgagctggcaataaaaactttcataacttcctctacacacccagctcagacatggtcctgcatcctgtttgtcatgtccgggccctgcacctctggacagctgtttatctgccagcatcatctccatgcacacttggggaagaaaacatggatctttacctttccccagtggcccagagccaggagttctctggccgctctctggacagattacctaaaaccagatccatggatgatcttctttctgcctgtgacacaagcagccccctgactcgtacatccagtgaccctaacctgaataaccactgtcaggaggtcagggtaggcctggagccctggcacagcaatcctgagggatcagagacaagctttgtggactctggggtaggagggcctcagcaaactgtaggagaagtgggtcttcctcctcctctgcccagcagccagaaagactacttgagcaataaacctttcaagagtcacaaaagctgttctccaagttacaaactgcttaataccgcagtgcctcgggaaatgaagagcaacacctctgatcctgagatcaaagtcctagaagagactaagggaccagctccagacccttctgcccaggatgagctgggtaggactttagatggcataggggagccacctgaacattgtcctgaaacagaagctgtcagtgcactctccaaggtcatttctaacaagtgtgatggagtttgtaattttcctgagtcttcccagaactctcctacaggtacgccccaacaggcccagccagactccatgctaggtgtgccctccaagtgtgttcttgatcacagcctcagcaccgtttgcaacccaccgagtgctgcctgccaaactcctctagacccaagcactgacttcctcaaccaagatccctcagggtctgtggcaagtatctcccaccaggaacaactgagttctgtgccggatctgacccatggggaggaagacattggtaaaagaggaaataataggaatgggcagttattggaaaatcctcgctttgggaaaatgccattggaattggtccggaagccaatttctcagagccagatcagtgagttctcttttctagggtccaactgggacagcttccaagggatggtgacttcattcccaagtggggaggccacccctcggcggctgctttcctatggctgttgtagcaagaggccaaacagtaagcagatgcgggccacagggccctgctttgggggccagtgggctcagagagaaggtgtgaagtcacctgtctgttctagtcattccaatggacattgtactggcccaggaggaaagaaccagatgtggttgtccagtcatccaaagcaagtctctagcacaaagcccgttccactgaactgcccttctccagtgcctcctctgtatttggatgatgatggactcccctttcccacggatgtgatccagcataggttacggcaaatcgaagcagggtacaaacaagaggtggagcagctacgtcgacaggtgcgtgagcttcagatgaggctggacatccgtcactgctgtgcccctccagcagagccccccatggactatgaggatgattttacatgtttgaaggagtcagatggcagtgatactgaggattttggctctgatcacagtgaagactgcctttcagaagcaagctgggaacctgttgataagaaagagactgaggtgactcgctgggttccagaccatatggcatcacactgctataactgtgactgtgaattctggttggccaaacgaagacaccattgcagaaattgtgggaatgtattttgtgctggatgctgccacctgaagctgcccattcctgatcagcaactctatgacccagttctcgtctgtaactcatgttacgaacacattcaagtctctcgtgccagggaactcatgagccaacagctgaagaaacccattgctacagcttccagttgaatgccggggagaaacctgtccaattttagcaggtttgaagggaggatcttcttcagttgtagtttggaaggttccttggtgtggctcatgaaatcacagagctcagagataccatcttgagaaatcctccttggtatcatgaaactggagcagaggaattgcaatttagcaggaggtcctctactggtgataccctcaccttggggtaatggtcctaacccagacccagggtctggaagcttaatgttgagttggtgactccagcctctttctcctggaggtcacaagatgatgattgcgtagatgttgcctggtgcaaagtgccccaaacagcaatagaaaggcatatgtataaccaaactccaagtgataaccagacccatctctcctccaccttgacaaaagcagattatagtatacaaggtaggaattcctgtcctatttgagatgaactatatcctgtacctctgtgctctgtgtctgcatgaaggctcagcctttagaggcactccttctagttgcattagtactgtctttctgtggagtttggtttgaagactggctcagcaagtggaggtttcaatgtatttttcagttggctcatcagccagcattggtgaatattcagtttaggggaacagttctagggagtgagacatttttgggagcagaggaaaactctgctgatgttcggtcctggcaaacattgagttattttgagctgtgaaggcagtcgtctctgttacacagtggcagctcttgagttatgcactgtgaagaatgagaagggaaaagcaaaaattatccttgtgaaatatctgctgattgtgccctactctttgcacctgacttttcctagttgtcctggtgctaacacaggagctacaccttgatcctctcctggcatgaaaataaaacaaaggttttcgttgttgttgttccattgaaaaaaaaanaaanaaaaaaaaaaanaaaaaaaaaaaaaaaaaaaaaaataaaaaaaaaaaaaaaaaaaaaaaaaaaaaatagtggtgggcggcccgcgccgccggccacacgaggaaaaaattttaacaaaccacctggggtggggggcgaggcgcgaccccaatgatgatatgaaacaaggtgtggaacaagacgtgtcccagagaagaaatcggcggcagacaggggggtggctccccccaaaaaaaagacggcggggacacgagggtgtgaacaccacaaggacatgtggaggcaagggggacaacagagagccacgaagcgagaaaataaccgcgccgg

SEQ ID NO: 452914 - DNA, 2855 bp, Homo sapiens
gcgagtaacgggatagcgcggctcagagggtcgggcggacgccgcctggtgagaagcaggcagccagtacccttgccacggtagaatgggtgaggaggggccccccagcctggagtacatccaagccaaggatctgttcccccccaaggaactagtgaaggaggaagagaatcttcaggtccccttcacagtgctgcagggtgagggagtagagttcctgggccgggcagccgatgccctcattgccatctctaactaccggctgcatatcaaattcaaggactctgtcatcaacgtccccctccggatgattgacagtgtggagagccgtgatatgttccagttgcacatttcctgcaaggactccaaagtggtgaggtgccacttctccacttttaagcagtgccaagagtggctctcacggctaagccgagccacagcaagacctgccaagcctgaagacctctttgcctttgcctaccatgcctggtgcctggggctgaccgaggaggaccagcacactcacctatgtcagccaggtgagcacatacgttgtcgacaggaggcggagcttgcaaggatgggctttgacctgcagaacgtctggagagtctcacacatcaacagcaactacaaattgtgccccagttacccccagaagctgctggttcctgtgtggatcactgacaaagagctggagaacgtggcttccttccgctcctggaagcggattcccgtggttgtgtatagacacttgcgcaatggggctgccatcgcccgctgcagccagccagagatcagctggtggggctggcgcaatgctgatgatgagtacctggtcacgtccattgctaaagcctgtgccctggacccggggacaagggccactgggggctccctcagcaccgggaataatgataccagcgaggcgtgtgatgctgactttggtaaggtgtggatgatgctaaccccccagggagcaggccccctccttggcttcattggctcccagggagtccccagtgagagtctgggaagatgacaacacacggggtgctggggtccctgccttgtcagaagctgtggggtatgaggggtctctagttgcatgttctgccttctgagagggagtgccagagggccagcaagaggttgggtggctggctgactcagggactccttcctgctgtgtgtttagattcttctctgactgcgtgctctggagtggagagcacagcagctcctcaaaagctgctgatcctggatgcgcgatcctacacggcagcagtggccaaccgggccaagggtggaggctgtgaatgtgaagagtactatcccaactgtgaggtcgtgttcatgggaatggccaacatccatgccatccggaacagctttcagtacctccgggctgtgtgtagccagatgccggatcctagcaactggttgtcggcactggagagtaccaaatggctgcagcacttgtcggtgatgctaaaagcagctgtgctggtggctaatacagtagaccgggaaggccggcctgtgctggtacactgctcagatggctgggaccgcacaccgcagatcgtagccctggccaaaatattactggacccatattacaggacgttggagggcttccaagtgttagtggagtctgactggctggattttgggcacaagtttggagatcgctgtggccaccaagagaatgtggaggaccaaaacgaacaatgccctgtgttcctccagtggcttgattctgttcatcagttgcttaagcagttcccctgcctgtttgaatttaatgaagcattcctggtaaaactggtgcaacacacatactcctgcctctacggcaccttcctggccaacaacccctgtgagcgagagaagcgcaacatctacaagcggacctgctctgtgtgggcgctccttcgagctggcaataaaaactttcataacttcctctacacacccagctcagacatggtcctgcatcctgtttgtcatgtccgggccctgcacctctggacagctgtttatctgccagcatcatctccatgcacacttggggaagaaaacatggatctttacctttccccagtggcccagagccaggagttctctggccgctctctggacagattacctaaaaccagatccatggatgatcttctttctgcctgtgacacaagcagccccctgactcgtacatccagtgaccctaacctgaataaccactgtcaggaggtcagggtaggcctggagccctggcacagcaatcctgagggatcagagacaagctttgtggactctggggtaggagggcctcagcaaactgtaggagaagtgggtcttcctcctcctctgcccagcagccagaaagactacttgagcaataaacctttcaagagtcacaaaagctgttctccaagttacaaactgcttaataccgcagtgcctcgggaaatgaagagcaacacctctgatcctgagatcaaagtcctagaagagactaagggaccagctccagacccttctgcccaggatgagctgggtaggactttagatggcataggggagccacctgaacattgtcctgaaacagaagctatctgtctacttagcgtggctgttttgagggactgtcccatcagtgaacaaactgcatggccttggagagagactctgggctcttggctcagatgtgttcatcaaatactcctttcagagctgttgtgggtgtaagtgacatgatgtggccaaaaatccaaactgtgcagttgcgttgtgacaaacatgcaatgtgctgtaaaaattcaatacagtttaaataaaatctctatattagt

SEQ ID NO: 452915 - DNA, 602 bp, Homo sapiens
gcgagtaacgggatagcgcggctcagagggtcgggcggacgccgcctggtgagaagcaggcagccagtacccttgccacggtagaatgggtgaggaggggccccccagcctggagtacatccaagccaaggatctgttcccccccaaggaactagtgaaggaggaagagaatcttcaggtccccttcacagtgctgcagggtgagggagtagagttcctgggccgggcagccgatgccctcattgccatctctaactaccggctgcatatcaaattcaaggactctgtcatcaacgtccccctccggatgattgacagtgtggagagccgtgatatgttccagttgcacatttcctgcaaggactccaaagtggtgaggtgagaacaacggagcctcactcaggtcccctggccctagtcttgtccagttctctgtgctgcagggtttctctggtgcaagagaggaaagatcctgcctcactttccccagttggaagaaaaggtgaagaccatgttctgggttgggaggtcagtttactgacccataggatcttgacctgaaaaaatgggggtaatgcctagttcatggagtcatcgtaagg

SEQ ID NO: 452916 - DNA, 424 bp, Homo sapiens
ggtgggcccctgagccaagcaaactccctaaagctggcggtctgggagggagggcctgggacccccactgcccgcccctccaggctagagtgtgtggtgcttttcttataactaacactgcctttctctgcccatttccctcaaaggatggcatgaactgggtctgcaaaaatgtcaatgcaaagaagaaataaaatctagacgaatggagatgcaggagctgcgggagccgaattcggtcctgaaaaacactaatttgctgctttctgaccaaatgtttttccatctgtgtacagctccagctgtttgaagagagggaacaacacggtttagaaagaatccccattccagcagtagatttaactgatctctgaggttcagtatcatttttcaaataaaggaattatattatttcctctgcata

SEQ ID NO: 452917 - DNA, 589 bp, Homo sapiens
tgcgcactctggggaaagcggagctgcaccccgccccgtattgctgctcagctcctcagctgtgcgtgcgagggacgtcgggggtggcgccgcagcagttgcccctggtaacgggggaggcagcaggaggaggaggaggaggagggactcggcgggaggatgggcttgctctcaattttgcgcaagttgaaaagtgcaccagaccaggaggtgagaatacttctcctgggcttggataatgctggcaagaccactcttctgaagcagcttgcatctgaagacatcagccacatcacacctacacagggtttcaacatcaaaagtgtacaatcacaaggttttaaactgaatgtatgggacattggtggacagaggaaaatcagaccatactggaagaattattttgaaaataccgatattcttatatatgtaatcgacagtgcagacagaaaaagatttgaagagacgggtcagaactagcggaattactggaggaagagagagagagactggagttgaagttaaggctcatttcaaggtttttagcctcaacatgtgcaggaatggagtcgtcacttgctagaatggg

SEQ ID NO: 452918 - DNA, 3882 bp, Homo sapiens
tgcgcactctggggaaagcggagctgcaccccgccccgtattgctgctcagctcctcagctgtgcgtgcgagggacgtcgggggtggcgccgcagcagttgcccctggtaacgggggaggcagcaggaggaggaggaggaggagggactcggcgggaggatgggcttgctctcaattttgcgcaagttgaaaagtgcaccagaccaggaggtgagaatacttctcctgggcttggataatgctggcaagaccactcttctgaagcagcttgcatctgaagacatcagccacatcacacctacacagggtttcaacatcaaaagtgtacaatcacaaggttttaaactgaatgtatgggacattggtggacagaggaaaatcagaccatactggaagaattattttgaaaataccgatattcttatatatgtaatcgacagtgcagacagaaaaagatttgaagagacgggtcaggaactagcggaattactggaggaagaaaaactaagttgtgtgccagtgctcatctttgctaataagcaggatttgctcacagcagcccctgcctctgaaattgcagaaggactgaacctgcataccatccgcgaccgagtctggcagatccagtcttgctcagctctcacaggagagggcgttcaggatggcatgaactgggtctgcaaaaatgtcaatgcaaagaagaaataaaatctagacgaatggagatgcaggagctgcgggagccgaattcggtcctgaaaaacactaatttgctgctttctgaccaaatgtttttccatctgtgtacagctccagctgtttgaagagagggaacaacacggtttagaaagaatccccattccagcagtagatttaactgatctctgaggttcagtatcatttttcaaataaaggaattatattatttcctctgcataattgaaatagtattaaatgtctcaaagcacatgattagaaaatgagatcttttaaatgagcaagagattgcattgcagtttagacaattccagtgggcttttttttcctctcaaaaaaaaaaaaagaaaaagaaaaagaggaagaagcagctttgctgagttcatttatttactgacccgtcccttgcattccctccatggttttgaaaccacagacagtgtttgctggtgctgtcagtgatttttaccgtcactagcccagccaggcttcagtctgtccgacaggaagctgctgggtgggggtggggggagaaaaggcagataattaaaccatctcatcgtcttgcaggtcggagactacgtatgtaatcctcactctttggacagaaaaaaaaaaaaagtctttcttgcagacaagtcactacagaaacataccccatcccacccacccctgcctctgccccagccagccacacagagaagcaaattcttatgacttttgactgtaatgacatctggaatgtaaggagaggtgggaggtttaattccagaaaaattacaaggtccttaaaaagctctcacatcgagggctcaggctagcgtaaacaggctttctccagctcagtggagcagtgagcagccgactctgagattagctggcttctccacggccatcctatagacaggatttctaaagctcaaagaattctgtgtttaaacgatcacaataggccgctgctatcagattttagaaataaatgcagctttaccatgaacctgctccactgagaaaagccaggcagatcgatttttagatcaatttttacagtgctggcaacttggtggtgtgggatgctcctggatggagagggtttgctgctggggaggacatgggtgtgtgtgtgactgcaggggtcgtgtccaaggaatcaagagtcaccccagctgctgggctcctctgcctctctgcagcagaatgtccgtcctctgttgattgattggagaggaatagcagaacatttctcctgcccctcgttgcaaaacgagcttgtttccctgaacctcagaaatcctcagcttcaaacatggggaaacaggccagagcattgcccggctcctgaattaaactctgttctggtgcctgagctcaggggttttcagagaatgaataagagactgtccagtgactggtgggtccctgggggccagctgccttctcatcctgggaggtggcccttcccaagcccatcagggcgtgtgagcagactgaaggggccgctgcagcccctggccctcaatacccagctgcttctggctaagagtgcagcagagactgaggcatagccagcttcaaaagcgatctgacatgaaagtcattaacaaagccagccgtgaaaaggtgccccagagttgctgtggacagacctgtaaggacttgcaaaacaaaagaaagtgaggggtttttttaacctcagagctagctgctctctgcagcctcctccactggcttctctggctcacccaagctctcccttacagaggcaacacagaattataaggaatcagaaatcccccttctaccaggctgcaaatgtggctctagcacttgcaaattgttttttcttccgaatagttcagcagggacaagttatctgaggggcaaaatgcctgcttggaggtctgcaattttggaacactgcagtatggaactttggcattggagggtctgtaaaatatttttgttcttttaccaccaacttaggggactgttttaaagagccatcccaaggcctctcctagcaggcagaagccactcctctgataacggcctctgtaaatgttctgatttgctctcagctgcagagacacagagacactgcagatgtcacacgctttcatcttccctttgagcccttttgaaccctcctggggctctggggtagatgagagaagcctgaaaaaggcagagtttgaaagctcccatttaaaaacaaaatactttttaaagccctcttgcctcttccctgcccactcctgccccctgaccagaagacagaatttgaagctggaaagggaagaccccttttcccctcctcctgtccccagtgagtcttagcgagacttttgccctgcgcacaattgcatctgaatgtgcgggggagagggctgggggccggagggcaggcaaggcctggggggtgctcgtgatatgtgctcaagccagttgtgggaaaaactcgagtcctcccctcctcccgacctaccccgtgtggctgcttttggctggattccctgcacccagtgcaacacaccctttccccttcactctcccttggttactatggaaacaagggtgtcattgatgtgggctgagctggggaacatgtcggtgcacagctgaaagtcagcgattatgccggcggttagaaatgtgccagggttaaaggagtccgcagctcccacggctgctgggaggacatggtcctgcccccttccttcctccctccctccgtctccacttctctctccttgcttttgacaaatttctttattcccctctggactaaagtagtggctatttttgtgccactctgcgccccaccctcactgttggccgctccttatccggcctggcctggagggtgacaccatgtcaccctcaccaggactcgtctctccattcccgtcagagtttgctttgatttccctttcctttccttctcggggaccagttcttacttccttttatttttagctctgcactccatgtggtttcagggttcagtctgatccatcaaaaggttctttttttataatcccttttgaaaatgataatcaaaggaagagatgtggtgtttggtcatgtggaaaactcaatgtataatttagacgtctgtcaaaaatccgacaaataaaatttagctggaacgaaaaaaaaaaggaa

SEQ ID NO: 452919 - DNA, 3499 bp, Homo sapiens
ttagccttagctatgtgctccgagggtcgtggggagtcctcgcaatatcaatcgccagtgcagacagataagcattgaagagacgggtcaggaactagcggaattactggaggaagaaaaactaagttgtgtgccagtgctcatctttgctaataagcaggatttgctcacagcagcccctgcctctgaaattgcagaaggactgaacctgcataccatccgcgaccgagtctggcagatccagtcttgctcagctctcacaggagagggcgttcaggatggcatgaactgggtctgcaaaaatgtcaatgcaaagaagaaataaaatctagacgaatggagatgcaggagctgcgggagccgaattcggtcctgaaaaacactaatttgctgctttctgaccaaatgtttttccatctgtgtacagctccagctgtttgaagagagggaacaacacggtttagaaagaatccccattccagcagtagatttaactgatctctgaggttcagtatcatttttcaaataaaggaattatattatttcctctgcataattgaaatagtattaaatgtctcaaagcacatgattagaaaatgagatcttttaaatgagcaagagattgcattgcagtttagacaattccagtgggcttttttttcctctcaaaaaaaaaaaaagaaaaagaaaaagaggaagaagcagctttgctgagttcatttatttactgacccgtcccttgcattccctccatggttttgaaaccacagacagtgtttgctggtgctgtcagtgatttttaccgtcactagcccagccaggcttcagtctgtccgacaggaagctgctgggtgggggtggggggagaaaaggcagataattaaaccatctcatcgtcttgcaggtcggagactacgtatgtaatcctcactctttggacagaaaaaaaaaaaaagtctttcttgcagacaagtcactacagaaacataccccatcccacccacccctgcctctgccccagccagccacacagagaagcaaattcttatgacttttgactgtaatgacatctggaatgtaaggagaggtgggaggtttaattccagaaaaattacaaggtccttaaaaagctctcacatcgagggctcaggctagcgtaaacaggctttctccagctcagtggagcagtgagcagccgactctgagattagctggcttctccacggccatcctatagacaggatttctaaagctcaaagaattctgtgtttaaacgatcacaataggccgctgctatcagattttagaaataaatgcagctttaccatgaacctgctccactgagaaaagccaggcagatcgatttttagatcaatttttacagtgctggcaacttggtggtgtgggatgctcctggatggagagggtttgctgctggggaggacatgggtgtgtgtgtgactgcaggggtcgtgtccaaggaatcaagagtcaccccagctgctgggctcctctgcctctctgcagcagaatgtccgtcctctgttgattgattggagaggaatagcagaacatttctcctgcccctcgttgcaaaacgagcttgtttccctgaacctcagaaatcctcagcttcaaacatggggaaacaggccagagcattgcccggctcctgaattaaactctgttctggtgcctgagctcaggggttttcagagaatgaataagagactgtccagtgactggtgggtccctgggggccagctgccttctcatcctgggaggtggcccttcccaagcccatcagggcgtgtgagcagactgaaggggccgctgcagcccctggccctcaatacccagctgcttctggctaagagtgcagcagagactgaggcatagccagcttcaaaagcgatctgacatgaaagtcattaacaaagccagccgtgaaaaggtgccccagagttgctgtggacagacctgtaaggacttgcaaaacaaaagaaagtgaggggtttttttaacctcagagctagctgctctctgcagcctcctccactggcttctctggctcacccaagctctcccttacagaggcaacacagaattataaggaatcagaaatcccccttctaccaggctgcaaatgtggctctagcacttgcaaattgttttttcttccgaatagttcagcagggacaagttatctgaggggcaaaatgcctgcttggaggtctgcaattttggaacactgcagtatggaactttggcattggagggtctgtaaaatatttttgttcttttaccaccaacttaggggactgttttaaagagccatcccaaggcctctcctagcaggcagaagccactcctctgataacggcctctgtaaatgttctgatttgctctcagctgcagagacacagagacactgcagatgtcacacgctttcatcttccctttgagcccttttgaaccctcctggggctctggggtagatgagagaagcctgaaaaaggcagagtttgaaagctcccatttaaaaacaaaatactttttaaagccctcttgcctcttccctgcccactcctgccccctgaccagaagacagaatttgaagctggaaagggaagaccccttttcccctcctcctgtccccagtgagtcttagcgagacttttgccctgcgcacaattgcatctgaatgtgcgggggagagggctgggggccggagggcaggcaaggcctggggggtgctcgtgatatgtgctcaagccagttgtgggaaaaactcgagtcctcccctcctcccgacctaccccgtgtggctgcttttggctggattccctgcacccagtgcaacacaccctttccccttcactctcccttggttactatggaaacaagggtgtcattgatgtgggctgagctggggaacatgtcggtgcacagctgaaagtcagcgattatgccggcggttagaaatgtgccagggttaaaggagtccgcagctcccacggctgctgggaggacatggtcctgcccccttccttcctccctccctccgtctccacttctctctccttgcttttgacaaatttctttattcccctctggactaaagtagtggctatttttgtgccactctgcgccccaccctcactgttggccgctccttatccggcctggcctggagggtgacaccatgtcaccctcaccaggactcgtctctccattcccgtcagagtttgctttgatttccctttcctttccttctcggggaccagttcttacttccttttatttttagctctgcactccatgtggtttcagggttcagtctgatccatcaaaaggttctttttttataatcccttttgaaaatgataatcaaaggaagagatgtggtgtttggtcatgtggaaaactcaatgtataatttagacgtctgtcaaaaatccgacaaataaaatttagctggaacgaaaaaaaaaaggaa

SEQ ID NO: 452920 - DNA, 3368 bp, Homo sapiens
ggtgggcccctgagccaagcaaactccctaaagctggcggtctgggagggagggcctgggacccccactgcccgcccctccaggctagagtgtgtggtgcttttcttataactaacactgcctttctctgcccatttccctcaaaggatggcatgaactgggtctgcaaaaatgtcaatgcaaagaagaaataaaatctagacgaatggagatgcaggagctgcgggagccgaattcggtcctgaaaaacactaatttgctgctttctgaccaaatgtttttccatctgtgtacagctccagctgtttgaagagagggaacaacacggtttagaaagaatccccattccagcagtagatttaactgatctctgaggttcagtatcatttttcaaataaaggaattatattatttcctctgcataattgaaatagtattaaatgtctcaaagcacatgattagaaaatgagatcttttaaatgagcaagagattgcattgcagtttagacaattccagtgggcttttttttcctctcaaaaaaaaaaaaagaaaaagaaaaagaggaagaagcagctttgctgagttcatttatttactgacccgtcccttgcattccctccatggttttgaaaccacagacagtgtttgctggtgctgtcagtgatttttaccgtcactagcccagccaggcttcagtctgtccgacaggaagctgctgggtgggggtggggggagaaaaggcagataattaaaccatctcatcgtcttgcaggtcggagactacgtatgtaatcctcactctttggacagaaaaaaaaaaaaagtctttcttgcagacaagtcactacagaaacataccccatcccacccacccctgcctctgccccagccagccacacagagaagcaaattcttatgacttttgactgtaatgacatctggaatgtaaggagaggtgggaggtttaattccagaaaaattacaaggtccttaaaaagctctcacatcgagggctcaggctagcgtaaacaggctttctccagctcagtggagcagtgagcagccgactctgagattagctggcttctccacggccatcctatagacaggatttctaaagctcaaagaattctgtgtttaaacgatcacaataggccgctgctatcagattttagaaataaatgcagctttaccatgaacctgctccactgagaaaagccaggcagatcgatttttagatcaatttttacagtgctggcaacttggtggtgtgggatgctcctggatggagagggtttgctgctggggaggacatgggtgtgtgtgtgactgcaggggtcgtgtccaaggaatcaagagtcaccccagctgctgggctcctctgcctctctgcagcagaatgtccgtcctctgttgattgattggagaggaatagcagaacatttctcctgcccctcgttgcaaaacgagcttgtttccctgaacctcagaaatcctcagcttcaaacatggggaaacaggccagagcattgcccggctcctgaattaaactctgttctggtgcctgagctcaggggttttcagagaatgaataagagactgtccagtgactggtgggtccctgggggccagctgccttctcatcctgggaggtggcccttcccaagcccatcagggcgtgtgagcagactgaaggggccgctgcagcccctggccctcaatacccagctgcttctggctaagagtgcagcagagactgaggcatagccagcttcaaaagcgatctgacatgaaagtcattaacaaagccagccgtgaaaaggtgccccagagttgctgtggacagacctgtaaggacttgcaaaacaaaagaaagtgaggggtttttttaacctcagagctagctgctctctgcagcctcctccactggcttctctggctcacccaagctctcccttacagaggcaacacagaattataaggaatcagaaatcccccttctaccaggctgcaaatgtggctctagcacttgcaaattgttttttcttccgaatagttcagcagggacaagttatctgaggggcaaaatgcctgcttggaggtctgcaattttggaacactgcagtatggaactttggcattggagggtctgtaaaatatttttgttcttttaccaccaacttaggggactgttttaaagagccatcccaaggcctctcctagcaggcagaagccactcctctgataacggcctctgtaaatgttctgatttgctctcagctgcagagacacagagacactgcagatgtcacacgctttcatcttccctttgagcccttttgaaccctcctggggctctggggtagatgagagaagcctgaaaaaggcagagtttgaaagctcccatttaaaaacaaaatactttttaaagccctcttgcctcttccctgcccactcctgccccctgaccagaagacagaatttgaagctggaaagggaagaccccttttcccctcctcctgtccccagtgagtcttagcgagacttttgccctgcgcacaattgcatctgaatgtgcgggggagagggctgggggccggagggcaggcaaggcctggggggtgctcgtgatatgtgctcaagccagttgtgggaaaaactcgagtcctcccctcctcccgacctaccccgtgtggctgcttttggctggattccctgcacccagtgcaacacaccctttccccttcactctcccttggttactatggaaacaagggtgtcattgatgtgggctgagctggggaacatgtcggtgcacagctgaaagtcagcgattatgccggcggttagaaatgtgccagggttaaaggagtccgcagctcccacggctgctgggaggacatggtcctgcccccttccttcctccctccctccgtctccacttctctctccttgcttttgacaaatttctttattcccctctggactaaagtagtggctatttttgtgccactctgcgccccaccctcactgttggccgctccttatccggcctggcctggagggtgacaccatgtcaccctcaccaggactcgtctctccattcccgtcagagtttgctttgatttccctttcctttccttctcggggaccagttcttacttccttttatttttagctctgcactccatgtggtttcagggttcagtctgatccatcaaaaggttctttttttataatcccttttgaaaatgataatcaaaggaagagatgtggtgtttggtcatgtggaaaactcaatgtataatttagacgtctgtcaaaaatccgacaaataaaatttagctggaacgaaaaaaaaaaggaa

SEQ ID NO: 452921 - DNA, 887 bp, Homo sapiens
tgcgcactctggggaaagcggagctgcaccccgccccgtattgctgctcagctcctcagctgtgcgtgcgagggacgtcgggggtggcgccgcagcagttgcccctggtaacgggggaggcagcaggaggaggaggaggaggagggactcggcgggaggatgggcttgctctcaattttgcgcaagttgaaaagtgcaccagaccaggaggtgagaatacttctcctgggcttggataatgctggcaagaccactcttctgaagcagcttgcatctgaagacatcagccacatcacacctacacagggtttcaacatcaaaagtgtacaatcacaaggttttaaactgaatgtatgggacattggtggacagaggaaaatcagaccatactggaagaattattttgaaaataccgatattcttgaactagcggaattactggaggaagaaaaactaagttgtgtgccagtgctcatctttgctaataagcaggatttgctcacagcagcccctgcctctgaaattgcagaaggactgaacctgcataccatccgcgaccgagtctggcagatccagtcttgctcagctctcacaggagagggcgttcaggatggcatgaactgggtctgcaaaaatgtcaatgcaaagaagaaataaaatctagacgaatggagatgcaggagctgcgggagccgaattcggtcctgaaaaacactaatttgctgctttctgaccaaatgtttttccatctgtgtacagctccagctgtttgaagagagggaacaacacggtttagaaagaatccccattccagcagtagatttaactgatctctgaggttcagtatcatttttcaaataaaggaattatattatttcctctgcata

SEQ ID NO: 452922 - DNA, 516 bp, Homo sapiens
acggagaaaacaagcgccgcaaaagaagtgaactatacagcagtcattaagaaaaggaagagcacaatcattcacccaccaaccgtctcaattctctctccttgcttttgacaaatttctttattcccctctggactaaagtagtggctatttttgtgccactctgcgccccaccctcactgttggccgctccttatccggcctggcctggagggtgacaccatgtcaccctcaccaggactcgtctctccattcccgtcagagtttgctttgatttccctttcctttccttctcggggaccagttcttacttccttttatttttagctctgcactccatgtggtttcagggttcagtctgatccatcaaaaggttctttttttataatcccttttgaaaatgataatcaaaggaagagatgtggtgtttggtcatgtggaaaactcaatgtataatttagacgtctgtcaaaaatccgacaaataaaatttagctggaacgaaaaaaaaaaggaa

SEQ ID NO: 452923 - DNA, 938 bp, Homo sapiens
tgcgcactctggggaaagcggagctgcaccccgccccgtattgctgctcagctcctcagctgtgcgtgcgagggacgtcgggggtggcgccgcagcagttgcccctggtaacgggggaggcagcaggaggaggaggaggaggagggactcggcgggaggatgggcttgctctcaattttgcgcaagttgaaaagtgcaccagaccaggaggtgagaatacttctcctgggcttggataatgctggcaagaccactcttctgaagcagcttgcatctgaagacatcagccacatcacacctacacagggtttcaacatcaaaagtgtacaatcacaaggttttaaactgaatgtatgggacattggtggacagaggaaaatcagaccatactggaagaattattttgaaaataccgatattcttatatatgtaatcgacagtgcagacagaaaaagatttgaagagacgggtcaggaactagcggaattactggaggaagaaaaactaagttgtgtgccagtgctcatctttgctaataagcaggatttgctcacagcagcccctgcctctgaaattgcagaaggactgaacctgcataccatccgcgaccgagtctggcagatccagtcttgctcagctctcacaggagagggcgttcaggatggcatgaactgggtctgcaaaaatgtcaatgcaaagaagaaataaaatctagacgaatggagatgcaggagctgcgggagccgaattcggtcctgaaaaacactaatttgctgctttctgaccaaatgtttttccatctgtgtacagctccagctgtttgaagagagggaacaacacggtttagaaagaatccccattccagcagtagatttaactgatctctgaggttcagtatcatttttcaaataaaggaattatattatttcctctgcata

SEQ ID NO: 452924 - DNA, 999 bp, Homo sapiens
  misc_feature (658)..(658): n is a, c, g, or t
tgcgcactctggggaaagcggagctgcaccccgccccgtattgctgctcagctcctcagctgtgcgtgcgagggacgtcgggggtggcgccgcagcagttgcccctggtaacgggggaggcagcaggaggaggaggaggaggagggactcggcgggaggatgggcttgctctcaattttgcgcaagttgaaaagtgcaccagaccaggaggtgagatgtatttgcgtcctagggctaagtgattattagctaggtcgaaatgaaccagcttcgtactgaagtcaatcatagtcttggtgtatgacaacgtggccgcggaggacactcttacttgtagtatatacagtgctggacggaagtgttagtagactgagtgactgtgggaaaaaagagctatatgaaagatagattgctagaattgattacatgaaatatagatgctatatcgaaacattggataagaatattattcaacgagcgcagtaaaggagaaagtaaatttaattcgatcatgttagttgtgcgttattctgatgagtatggattacggctatctgtaagctaatcaagatgaatctatgaaaaagaaaggatgctggccagaaaaatgcgcaaagctataatcgaaagcgtgaaatgggggtgaatatggcactgnggagtcccagccgactataaaaagaggggaataatcataaccagcggatgcattcgcaagcatggacaacaatgccaaacttagcgcaagacacgcattgagagacttaacatggggatgaaatggcgggaatgtcaacaaggaaattagaaagctattggaatgagttaaatttcgatagtcgattattgagatacctgggatctcaatggagagcccgaaattccctcctggaaggttcgacgagggggaactaatctatcataagcgggatttaacgaacctggagaagcggtaccatcgggaaagtgaggaaaacagcccgaatataaggagacccg

SEQ ID NO: 452925 - DNA, 3749 bp, Homo sapiens
gtaatctgtctcctttgtggttgttgaagggcttgctctcaattttgcgcaagttgaaaagtgcaccagaccaggaggtgagaatacttctcctgggcttggataatgctggcaagaccactcttctgaagcagcttgcatctgaagacatcagccacatcacacctacacagggtttcaacatcaaaagtgtacaatcacaaggttttaaactgaatgtatgggacattggtggacagaggaaaatcagaccatactggaagaattattttgaaaataccgatattcttatatatgtaatcgacagtgcagacagaaaaagatttgaagagacgggtcaggaactagcggaattactggaggaagaaaaactaagttgtgtgccagtgctcatctttgctaataagcaggatttgctcacagcagcccctgcctctgaaattgcagaaggactgaacctgcataccatccgcgaccgagtctggcagatccagtcttgctcagctctcacaggagagggcgttcaggatggcatgaactgggtctgcaaaaatgtcaatgcaaagaagaaataaaatctagacgaatggagatgcaggagctgcgggagccgaattcggtcctgaaaaacactaatttgctgctttctgaccaaatgtttttccatctgtgtacagctccagctgtttgaagagagggaacaacacggtttagaaagaatccccattccagcagtagatttaactgatctctgaggttcagtatcatttttcaaataaaggaattatattatttcctctgcataattgaaatagtattaaatgtctcaaagcacatgattagaaaatgagatcttttaaatgagcaagagattgcattgcagtttagacaattccagtgggcttttttttcctctcaaaaaaaaaaaaagaaaaagaaaaagaggaagaagcagctttgctgagttcatttatttactgacccgtcccttgcattccctccatggttttgaaaccacagacagtgtttgctggtgctgtcagtgatttttaccgtcactagcccagccaggcttcagtctgtccgacaggaagctgctgggtgggggtggggggagaaaaggcagataattaaaccatctcatcgtcttgcaggtcggagactacgtatgtaatcctcactctttggacagaaaaaaaaaaaaagtctttcttgcagacaagtcactacagaaacataccccatcccacccacccctgcctctgccccagccagccacacagagaagcaaattcttatgacttttgactgtaatgacatctggaatgtaaggagaggtgggaggtttaattccagaaaaattacaaggtccttaaaaagctctcacatcgagggctcaggctagcgtaaacaggctttctccagctcagtggagcagtgagcagccgactctgagattagctggcttctccacggccatcctatagacaggatttctaaagctcaaagaattctgtgtttaaacgatcacaataggccgctgctatcagattttagaaataaatgcagctttaccatgaacctgctccactgagaaaagccaggcagatcgatttttagatcaatttttacagtgctggcaacttggtggtgtgggatgctcctggatggagagggtttgctgctggggaggacatgggtgtgtgtgtgactgcaggggtcgtgtccaaggaatcaagagtcaccccagctgctgggctcctctgcctctctgcagcagaatgtccgtcctctgttgattgattggagaggaatagcagaacatttctcctgcccctcgttgcaaaacgagcttgtttccctgaacctcagaaatcctcagcttcaaacatggggaaacaggccagagcattgcccggctcctgaattaaactctgttctggtgcctgagctcaggggttttcagagaatgaataagagactgtccagtgactggtgggtccctgggggccagctgccttctcatcctgggaggtggcccttcccaagcccatcagggcgtgtgagcagactgaaggggccgctgcagcccctggccctcaatacccagctgcttctggctaagagtgcagcagagactgaggcatagccagcttcaaaagcgatctgacatgaaagtcattaacaaagccagccgtgaaaaggtgccccagagttgctgtggacagacctgtaaggacttgcaaaacaaaagaaagtgaggggtttttttaacctcagagctagctgctctctgcagcctcctccactggcttctctggctcacccaagctctcccttacagaggcaacacagaattataaggaatcagaaatcccccttctaccaggctgcaaatgtggctctagcacttgcaaattgttttttcttccgaatagttcagcagggacaagttatctgaggggcaaaatgcctgcttggaggtctgcaattttggaacactgcagtatggaactttggcattggagggtctgtaaaatatttttgttcttttaccaccaacttaggggactgttttaaagagccatcccaaggcctctcctagcaggcagaagccactcctctgataacggcctctgtaaatgttctgatttgctctcagctgcagagacacagagacactgcagatgtcacacgctttcatcttccctttgagcccttttgaaccctcctggggctctggggtagatgagagaagcctgaaaaaggcagagtttgaaagctcccatttaaaaacaaaatactttttaaagccctcttgcctcttccctgcccactcctgccccctgaccagaagacagaatttgaagctggaaagggaagaccccttttcccctcctcctgtccccagtgagtcttagcgagacttttgccctgcgcacaattgcatctgaatgtgcgggggagagggctgggggccggagggcaggcaaggcctggggggtgctcgtgatatgtgctcaagccagttgtgggaaaaactcgagtcctcccctcctcccgacctaccccgtgtggctgcttttggctggattccctgcacccagtgcaacacaccctttccccttcactctcccttggttactatggaaacaagggtgtcattgatgtgggctgagctggggaacatgtcggtgcacagctgaaagtcagcgattatgccggcggttagaaatgtgccagggttaaaggagtccgcagctcccacggctgctgggaggacatggtcctgcccccttccttcctccctccctccgtctccacttctctctccttgcttttgacaaatttctttattcccctctggactaaagtagtggctatttttgtgccactctgcgccccaccctcactgttggccgctccttatccggcctggcctggagggtgacaccatgtcaccctcaccaggactcgtctctccattcccgtcagagtttgctttgatttccctttcctttccttctcggggaccagttcttacttccttttatttttagctctgcactccatgtggtttcagggttcagtctgatccatcaaaaggttctttttttataatcccttttgaaaatgataatcaaaggaagagatgtggtgtttggtcatgtggaaaactcaatgtataatttagacgtctgtcaaaaatccgacaaataaaatttagctggaacgaaaaaaaaaaggaa

SEQ ID NO: 452926 - DNA, 1701 bp, Homo sapiens
ccacctactgcaactgttcccataaactgggtgacagagtcagaaaactccccagctaaacacccgtaagacttcatacaacacaatactctatactgtgatgatcacagctgccaaggctacctaaaagaagacagttatctcatatttggctgccagctttttatctttctctcgaccacttaaaacttcagacttcctgtcctgctggtatcatggagaaagtccaatacctcactcgctcagctataagaagagcctcaaccattgaaatgcctcaacaagcacgtcaaaagctacagaatctatttatcaatttctgtctcatcttaatatgtctcttgctgatctgtatcatcgtgatgcttctctgaagttctgctacaacctctagatctgcagcttgccacatcagcttaaaatctgtcatcccatgcagacaggaaaacaatattgtataacagaccacttcctgagtagaagagtttctttgtgaaaaggtcaagattaagactaaaacttattgttaccatatgtattcatctgttggatcttgtaaacatgaaaagggctttattttcaaaaattaacttcaaaataagtgtataaaatgcaactgttgatttcctcaacatggctcacaaatttctatcccaaatcttttctgaagatgaagagtttagttttaaaactgcactgccaacaagttcacttcatatataaagcattatttttactcttttgaggtgaatataatttatattacaatgtaaaagcttctttaatactaagtatttttcaggtcttcaccaagtatcaaagtaataacacaaatgaagtgtcattattcaaaatagtccactgactcctcacatctgttatcttattataaagaactatttgtagtaactatcagaatctacattctaaaacagaaattgtattttttctatgccacattaacatcttttaaagttgatgagaatcaagtatggaaaagtaaggccatactcttacataataaaattccttttaagtaattttttcaaagaatcacagaattctagtacatgtaggtaaatcataaatctgttctaagacatatgatcaacagatgagaactggtggttaatatgtgacagtgagattagtcatatcactaatatactaacaacagaatctaatcttcatttaaggcactgtagtgaattatctgagctagagttacctagcttaccatactatatctttggaatcatttgcgtgttatatgtattatacactatattcctacaataaagtaagctagagaaaatgttatttagaaaatcataagaaagagaaaatatatttactattcattaaatggaagtgggtcagccaaaaaaacaaaaaaaagaacaccagaaaacaaacaacgtggtgtgcgggcggccgccgcgcgcccacggggaaaaaagttttcaaaaacccatctccgttggggggccgcgggccccacgtctggtgttacgtcgagaccgtgtcgtcactagcgtggtctcccaagagaaacctggggtcgtgacaacgtgtgcgtgggcttctctccaccaataaaaacagcgccgggcgcaaacggcagcgttctggaaccaactccgactgggctctggcggcatgacggcctcatcacggggggtccaagcgaggccatccaat

SEQ ID NO: 452927 - DNA, 1771 bp, Homo sapiens
tgctgttcagaggatcccgacactgaaaccttaagacttcagaatgattttgcaggttgtcttccattccagcctaacatccaatgcaggcaaggaaaataaaagatttccagtgacagaaaaatatattatctcaagtattttttaaaaatatatgaattctctctccaaatattaactaattattagattatattttgaaatgaacttgttggcccatctattacatctacagctgacccttgaacatgggggttaggggagctgacaattcgtgggtccgcaaaatcttaactacctaatagcctactattgaccataaaccttactgataacataaacagtaaattaacacatattttgcgtgttatatgtattatacactatattcctacaataaagtaagctagagaaaatgttatttagaaaatcataagaaagagaaaatatatttactattcattaaatggaagtgggtcaacataaaagtcttcattctcattgtcttcacattgagtaggcagaggaggagaaagatggggaggaagagaaggcgttggtcttgcagtcttgtcttaggggtgtggggagtgggggaaagaatattcatgtataagtggacccttgcaattcaagcccttgttgttcaagggtcaactgtaataggatatagctatttttcttcctctatcaaccaaatggtaagcatctattttgtagtccactctactgagctaaattatagatccagctatgctatttataattattttcttgatgaataaattttcaatttctcctctgaccatttcagaacatcttccaataactcataaaacaactgaagtaaaattgagtgctggaaaatatattcaccaaactttggtaatttaagttgactaaagtttaaaattaagtctaaaatagtttacacctatactgcataatccaacaattttaatttcagttgaagacatgttactaatataactattattaaaagagtagaggatgtgtaattaaccatatcttctaaaacatggttactaaaagaatatgtaacatcaatattgaccttggtttcttacacaagtgttgctaactcaatagtgaaggagacactattaaattttctgaacccatgagagatactagagatggggagtggaaagtgtttggttcagggatatctgaagaacagaagggcagagatttcttaagtgacgcctcatctacaagctggaaattcctaaaaacaagtagaaagcttataaacaacaggtgatacactcacctcactggttttagtaaattaccaatacagaaagtatccctagtcttaaaaacaagtggaaaatttgaactgattagtcatattcctttgattacactgtttgttacaatatttttctcagtaaacagaaataactaatttttttgttcttcattctttgatagaaattaaaatcttattctgtgaggattacagaatactataactcaaattataaagtagaataaactctttaaataattattcttcatcataaagtgtaaagaataagatataagaaaacaatttatttttaaaatttaatatactaaatgctcaaatatgttctactatagaataagttcttatcttaatttacagggcactaaaaacaattttaaaatgcttaatgttgccttttatattttaattggttaagaatatatatttgtttaatgcaaatcagaatcactatattaaaatgaatgttcttgaaaa

SEQ ID NO: 452928 - DNA, 3080 bp, Homo sapiens
acacacacacacacacacacacacacacagagagagagagagagagagagagagagggagagagactatagaaacatgatgttataaataacaatagtgctgaggaagatgaattagtgtaaaattgtattttttgttctgaggataggttacatagatgattctaatccatttattatttttacattccaggctacctaaaagaagacagttatctcatatttggctgccagctttttatctttctctcgaccacttaaaacttcagacttcctgtcctgctggtatcatggagaaagtccaatacctcactcgctcagctataagaagagcctcaaccattgaaatgcctcaacaagcacgtcaaaagctacagaatctatttatcaatttctgtctcatcttaatatgtctcttgctgatctgtatcatcgtgatgcttctctgaagttctgctacaacctctagatctgcagcttgccacatcagcttaaaatctgtcatcccatgcagacaggaaaacaatattgtataacagaccacttcctgagtagaagagtttctttgtgaaaaggtcaagattaagactaaaacttattgttaccatatgtattcatctgttggatcttgtaaacatgaaaagggctttattttcaaaaattaacttcaaaataagtgtataaaatgcaactgttgatttcctcaacatggctcacaaatttctatcccaaatcttttctgaagatgaagagtttagttttaaaactgcactgccaacaagttcacttcatatataaagcattatttttactcttttgaggtgaatataatttatattacaatgtaaaagcttctttaatactaagtatttttcaggtcttcaccaagtatcaaagtaataacacaaatgaagtgtcattattcaaaatagtccactgactcctcacatctgttatcttattataaagaactatttgtagtaactatcagaatctacattctaaaacagaaattgtattttttctatgccacattaacatcttttaaagttgatgagaatcaagtatggaaaagtaaggccatactcttacataataaaattccttttaagtaattttttcaaagaatcacagaattctagtacatgtaggtaaatcataaatctgttctaagacatatgatcaacagatgagaactggtggttaatatgtgacagtgagattagtcatatcactaatatactaacaacagaatctaatcttcatttaaggcactgtagtgaattatctgagctagagttacctagcttaccatactatatctttggaatcatgaaaccttaagacttcagaatgattttgcaggttgtcttccattccagcctaacatccaatgcaggcaaggaaaataaaagatttccagtgacagaaaaatatattatctcaagtattttttaaaaatatatgaattctctctccaaatattaactaattattagattatattttgaaatgaacttgttggcccatctattacatctacagctgacccttgaacatgggggttaggggagctgacaattcgtgggtccgcaaaatcttaactacctaatagcctactattgaccataaaccttactgataacataaacagtaaattaacacatattttgcgtgttatatgtattatacactatattcctacaataaagtaagctagagaaaatgttatttagaaaatcataagaaagagaaaatatatttactattcattaaatggaagtgggtcaacataaaagtcttcattctcattgtcttcacattgagtaggcagaggaggagaaagatggggaggaagagaaggcgttggtcttgcagtcttgtcttaggggtgtggggagtgggggaaagaatattcatgtataagtggacccttgcaattcaagcccttgttgttcaagggtcaactgtaataggatatagctatttttcttcctctatcaaccaaatggtaagcatctattttgtagtccactctactgagctaaattatagatccagctatgctatttataattattttcttgatgaataaattttcaatttctcctctgaccatttcagaacatcttccaataactcataaaacaactgaagtaaaattgagtgctggaaaatatattcaccaaactttggtaatttaagttgactaaagtttaaaattaagtctaaaatagtttacacctatactgcataatccaacaattttaatttcagttgaagacatgttactaatataactattattaaaagagtagaggatgtgtaattaaccatatcttctaaaacatggttactaaaagaatatgtaacatcaatattgaccttggtttcttacacaagtgttgctaactcaatagtgaaggagacactattaaattttctgaacccatgagagatactagagatggggagtggaaagtgtttggttcagggatatctgaagaacagaagggcagagatttcttaagtgacgcctcatctacaagctggaaattcctaaaaacaagtagaaagcttataaacaacaggtgatacactcacctcactggttttagtaaattaccaatacagaaagtatccctagtcttaaaaacaagtggaaaatttgaactgattagtcatattcctttgattacactgtttgttacaatatttttctcagtaaacagaaataactaatttttttgttcttcattctttgatagaaattaaaatcttattctgtgaggattacagaatactataactcaaattataaagtagaataaactctttaaataattattcttcatcataaagtgtaaagaataagatataagaaaacaatttatttttaaaatttaatatactaaatgctcaaatatgttctactatagaataagttcttatcttaatttacagggcactaaaaacaattttaaaatgcttaatgttgccttttatattttaattggttaagaatatatatttgtttaatgcaaatcagaatcactatattaaaatgaatgttcttgaaaa

SEQ ID NO: 452929 - DNA, 3006 bp, Homo sapiens
ccacctactgcaactgttcccataaactgggtgacagagtcagaaaactccccagctaaacacccgtaagacttcatacaacacaatactctatactgtgatgatcacagctgccaaggctacctaaaagaagacagttatctcatatttggctgccagctttttatctttctctcgaccacttaaaacttcagacttcctgtcctgctggtatcatggagaaagtccaatacctcactcgctcagctataagaagagcctcaaccattgaaatgcctcaacaagcacgtcaaaagctacagaatctatttatcaatttctgtctcatcttaatatgtctcttgctgatctgtatcatcgtgatgcttctctgaagttctgctacaacctctagatctgcagcttgccacatcagcttaaaatctgtcatcccatgcagacaggaaaacaatattgtataacagaccacttcctgagtagaagagtttctttgtgaaaaggtcaagattaagactaaaacttattgttaccatatgtattcatctgttggatcttgtaaacatgaaaagggctttattttcaaaaattaacttcaaaataagtgtataaaatgcaactgttgatttcctcaacatggctcacaaatttctatcccaaatcttttctgaagatgaagagtttagttttaaaactgcactgccaacaagttcacttcatatataaagcattatttttactcttttgaggtgaatataatttatattacaatgtaaaagcttctttaatactaagtatttttcaggtcttcaccaagtatcaaagtaataacacaaatgaagtgtcattattcaaaatagtccactgactcctcacatctgttatcttattataaagaactatttgtagtaactatcagaatctacattctaaaacagaaattgtattttttctatgccacattaacatcttttaaagttgatgagaatcaagtatggaaaagtaaggccatactcttacataataaaattccttttaagtaattttttcaaagaatcacagaattctagtacatgtaggtaaatcataaatctgttctaagacatatgatcaacagatgagaactggtggttaatatgtgacagtgagattagtcatatcactaatatactaacaacagaatctaatcttcatttaaggcactgtagtgaattatctgagctagagttacctagcttaccatactatatctttggaatcatgaaaccttaagacttcagaatgattttgcaggttgtcttccattccagcctaacatccaatgcaggcaaggaaaataaaagatttccagtgacagaaaaatatattatctcaagtattttttaaaaatatatgaattctctctccaaatattaactaattattagattatattttgaaatgaacttgttggcccatctattacatctacagctgacccttgaacatgggggttaggggagctgacaattcgtgggtccgcaaaatcttaactacctaatagcctactattgaccataaaccttactgataacataaacagtaaattaacacatattttgcgtgttatatgtattatacactatattcctacaataaagtaagctagagaaaatgttatttagaaaatcataagaaagagaaaatatatttactattcattaaatggaagtgggtcaacataaaagtcttcattctcattgtcttcacattgagtaggcagaggaggagaaagatggggaggaagagaaggcgttggtcttgcagtcttgtcttaggggtgtggggagtgggggaaagaatattcatgtataagtggacccttgcaattcaagcccttgttgttcaagggtcaactgtaataggatatagctatttttcttcctctatcaaccaaatggtaagcatctattttgtagtccactctactgagctaaattatagatccagctatgctatttataattattttcttgatgaataaattttcaatttctcctctgaccatttcagaacatcttccaataactcataaaacaactgaagtaaaattgagtgctggaaaatatattcaccaaactttggtaatttaagttgactaaagtttaaaattaagtctaaaatagtttacacctatactgcataatccaacaattttaatttcagttgaagacatgttactaatataactattattaaaagagtagaggatgtgtaattaaccatatcttctaaaacatggttactaaaagaatatgtaacatcaatattgaccttggtttcttacacaagtgttgctaactcaatagtgaaggagacactattaaattttctgaacccatgagagatactagagatggggagtggaaagtgtttggttcagggatatctgaagaacagaagggcagagatttcttaagtgacgcctcatctacaagctggaaattcctaaaaacaagtagaaagcttataaacaacaggtgatacactcacctcactggttttagtaaattaccaatacagaaagtatccctagtcttaaaaacaagtggaaaatttgaactgattagtcatattcctttgattacactgtttgttacaatatttttctcagtaaacagaaataactaatttttttgttcttcattctttgatagaaattaaaatcttattctgtgaggattacagaatactataactcaaattataaagtagaataaactctttaaataattattcttcatcataaagtgtaaagaataagatataagaaaacaatttatttttaaaatttaatatactaaatgctcaaatatgttctactatagaataagttcttatcttaatttacagggcactaaaaacaattttaaaatgcttaatgttgccttttatattttaattggttaagaatatatatttgtttaatgcaaatcagaatcactatattaaaatgaatgttcttgaaaa

SEQ ID NO: 452930 - DNA, 4728 bp, Homo sapiens
agtggcaagttgtttgttacagcgaacaccagctgctccccgcgccgggcgccgcgcgccgctgctccgccgctcggcccctcggctgctgctccgccggcgctgcctccctcgccccgcggctcccccttgcaacttggcgggcctcctcccttttgtccggcccggcccggccgccgccgccccccgcgcccggcgccgagctcccgggtctccgggccggctgtcggtgccggcagggcgcggagggggcgggggccgcggctcgtccccccgcggatgagccgccgcggacggggcgcgggcggacgatggaactccacatcctggagcaccggctgcaagttgccagcgtcgccaaggagagtatcccgctgttcacctacggcctgatcaaacttgccttcctgtcctccaagaccagatgatgattattctccaccgtctaagagaccaaaggccaatgagctaccgcagccaccagtcccggaacccgccaatgctgggaagcggaaagtgagggagttcaacttcgagaaatggaatgctcgcatcactgatctacgtaaacaagttgaagaattgtttgaaaggaaatatgctcaagccataaaagccaaaggtccggtgacgatcccgtaccctcttttctagtctcatgttgaagatctttatgtagaaggacttcctgaaggaattccttttagaaggccatctacttacggaattcctcgcctggagaggatattacttgcaaaggaaaggattcgttttgtgattaagaaacatgagcttctgagttcaacacgtgaagatttacagcttgataagccagcttcaggagtaaaggaagaatggtatgccagaatcactaaattaagaaagatggtggatcagcttttctgcaaaaaatttgcggaagccttggggagcactgaagccaaggctgtaccgtaccaaaaatttgaggcacacccgaatgatctgtacgtggaaggactgccagaaaacattcctttccgaagtccctcatggtatggaatcccaaggctggaaaaaatcattcaagtgggcaatcgaattaaatttgttattaaaagaccagaacttctgactcacagtaccactgaagttactcagccaagaacgaatacaccagtcaaagaagattggaatgtcagaattaccaagctacggaagcaagtggaagagatttttaatttgaaatttgctcaagctcttggactcaccgaggcagtaaaagtaccatatcctgtgtttgaatcaaacccggagttcttgtatgtggaaggcttgccagaggggattcccttccgaagccctacctggtttggaattccacgacttgaaaggatcgtccacgggagtaataaaatcaagttcgttgttaaaaaacctgaactagttatttcctacttgcctcctgggatggctagtaaaataaacactaaagctttgcagtcccccaaaagaccacgaagtcctgggagtaattcaaaggttcctgaaattgaggtcaccgtggaaggccctaataacaacaatcctcaaacctcagctgttcgaaccccgacccagactaacggttctaacgttcccttcaagccacgagggagagagttttcctttgaggcctggaatgccaaaatcacggacctaaaacagaaagttgaaaatctcttcaatgagaaatgtggggaagctcttggccttaaacaagctgtgaaggtgccgttcgcgttatttgagtctttcccggaagacttttatgtggaaggcttacctgagggtgtgccattccgaagaccatcgacttttggcattccgaggctggagaagatactcagaaacaaagccaaaattaagttcatcattaaaaagcccgaaatgtttgagacggcgattaaggagagcacctcctctaagagccctcccagaaaaataaattcatcacccaatgttaatactactgcatcaggtgttgaagaccttaacatcattcaggtgacaattccagatgatgataatgaaagactctcgaaagttgaaaaagctagacagctaagagaacaagtgaatgacctctttagtcggaaatttggtgaagctattggtatgggttttcctgtgaaagttccctacaggaaaatcacaattaaccctggctgtgtggtggttgatggcatgcccccgggggtgtccttcaaagcccccagctacctggaaatcagctccatgagaaggatcttagactctgccgagtttatcaaattcacggtcattagaccatttccaggacttgtgattaataaccagctggttgatcagagtgaccaccttgcccagccaagacttttttatcaggacaaaggattgtgcatttaaactatttcactagaactgggtggtggttttgctctctttcttctgggtgaattggatttgcaggttatgctgttgagtgatgacgcatagctgcttttgctccattttccccagatgacttggtaaattctccgtgaatgactctgctacataacctagataacctaagtgtgtcctttaaatgcatgtaagccagaagatgtatgttactttgaaaacataagtaacaaaattttgaatgtattgctaaagagatgtctctctgaagctcttttgatgtttggtgtcttgtccttcttattaaaccatatcttagtaaatagtttggtacgaatggatttatcactgagcaggtctgcaaaataattaatcggtaccgttttgtttctgttgatagaaataaaagagactgatggaagctctcagatcaagcaagaaccagaccccacgtggtagacctcttccctcctaggagggtaaatcagcttctgtgtcagggatgctgtgtggcgtccatctgaaccccctgcatacgcgtagctaatgtgatctccccactttcacataagatggtggccctgccttcagggaatgtgggagccaggtgggagccttcccggatatttaagctagaagattctacagggagattctccttggatcaatatatgtctctcagtcaaagatgtaaaagcacttttgccttaaaaagaatgttctgtttctaaatagagtcaacgttgtcctcctcattggaattcactatgagtcagaatcattagactgacttttttttttccatagtaatagtattttgcagagtctcacagagctgcagatcttttgttcatcttgcagagttaacaagtctgatcctgttagtccagatttcttaaatttggccaagttataataggagcagtagcttgagacccgaagtcaggaaactttgacaatggattttttttttttaatccagagacttgtactggaatttgccttaccctgtcagctcatggacttaaggtttcatcccgctttatgagtgcttctgaatccaagtcattgttacctgaatttgcaaattaagttgtgatattcgtgactgttaaattcctgtaattagattaacctctttgcttgcttgtttgttttctctcctattttagcttaaagtatcagtggttgagaagagcttttcggacctgttactacccccaagctgtgtaatatacttgtataacagaaataccttcctatacaaacctttttttcctacttttagatagaaatgtcctactttttcagcagttctgtgaattaaagagcagagtgactgtgggtctggaatggctggtgtacttgggaatgtactatcaggattttacagcaatgctgggaaatgacagggaaaatgacaggaatgaatctcaccagattttttatgtactcagcagagccttgagttacggtgtttattttccaatcaagtgaagatatctcctacttctcctactggaacatctcagcttctgcagtgaagaaaaattcctgtgatagttcagttctttagtttttctatttgaaaaaaaaaaatcatttaaatgatcctttgttcacggctctccttaatgactgagtgaacagttcctatctgtatatttgactaaaccttttcctaagctatctctcatggttcctatgtttttttatcataattaaaagcaaaaccatctggatcacctaacagtcagaggtcagtatctcagcgtgtgaattatagaggaaatacagagagaacctcttccacttttacttttcgtccaaataaaatgcatggtgtaccagaagttgaagatcgggttgaggattggggctagctcgatgacactaaggccccaacatcgcgggacctgctgtggcgcggattcttaggaacgctgttctagccggccccctctccaggggtcgccgtggccggcattatttcctagttcttcttgtaaccctgaggtgccagcgcggggagtgaggaggggtcagggggctaaggatgcaacctctgacgttctgcgccttcctaggagagtcttacatgtgttgagatttcacaagcaatgcgagttgtaaaataccagctctacaagaagctaggctctgtgacggcatagttttcagtagctttatcacaatattcacaatggagaattatatgacatggtagcagaaataggcccttttatgtgttgcttctattttacctcaaattgtagatatagggtaatcaataaaatccatccatgcctttcacacactaagtca

SEQ ID NO: 452931 - DNA, 4201 bp, Homo sapiens
agtggcaagttgtttgttacagcgaacaccagctgctccccgcgccgggcgccgcgcgccgctgctccgccgctcggcccctcggctgctgctccgccggcgctgcctccctcgccccgcggctcccccttgcaacttggcgggcctcctcccttttgtccggcccggcccggccgccgccgccccccgcgcccggcgccgagctcccgggtctccgggccggctgtcggtgccggcagggcgcggagggggcgggggccgcggctcgtccccccgcggatgagccgccgcggacggggcgcgggcggacgatggaactccacatcctggagcaccggctgcaagttgccagcgtcgccaaggagagtatcccgctgttcacctacggcctgatcaaacttgccttcctgtcctccaagaccagatgatgattattctccaccgtctaagagaccaaaggccaatgagctaccgcagccaccagtcccggaacccgccaatgctgggaagcggaaagtgagggagttcaacttcgagaaatggaatgctcgcatcactgatctacgtaaacaagttgaagaattgtttgaaaggaaatatgctcaagccataaaagccaaaggtccggtgacgatcccgtaccctcttttctagtctcatgttgaagatctttatgtagaaggacttcctgaaggaattccttttagaaggccatctacttacggaattcctcgcctggagaggatattacttgcaaaggaaaggattcgttttgtgattaagaaacatgagcttctgagttcaacacgtgaagatttacagcttgataagccagcttcaggagtaaaggaagaatggtatgccagaatcactaaattaagaaagatggtggatcagcttttctgcaaaaaatttgcggaagccttggggagcactgaagccaaggctgtaccgtaccaaaaatttgaggcacacccgaatgatctgtacgtggaaggactgccagaaaacattcctttccgaagtccctcatggtatggaatcccaaggctggaaaaaatcattcaagtgggcaatcgaattaaatttgttattaaaagaccagaacttctgactcacagtaccactgaagttactcagccaagaacgaatacaccagtcaaagaagattggaatgtcagaattaccaagctacggaagcaagtggaagagatttttaatttgaaatttgctcaagctcttggactcaccgaggcagtaaaagtaccatatcctgtgtttgaatcaaacccggagttcttgtatgtggaaggcttgccagaggggattcccttccgaagccctacctggtttggaattccacgacttgaaaggatcgtccacgggagtaataaaatcaagttcgttgttaaaaaacctgaactagttatttcctacttgcctcctgggatggctagtaaaataaacactaaagctttgcagtcccccaaaagaccacgaagtcctgggagtaattcaaaggttcctgaaattgaggtcaccgtggaaggccctaataacaacaatcctcaaacctcagctgttcgaaccccgacccagactaacggttctaacgttcccttcaagccacgagggagagagttttcctttgaggcctggaatgccaaaatcacggacctaaaacagaaagttgaaaatctcttcaatgagaaatgtggggaagctcttggccttaaacaagctgtgaaggtgccgttcgcgttatttgagtctttcccggaagacttttatgtggaaggcttacctgagggtgtgccattccgaagaccatcgacttttggcattccgaggctggagaagatactcagaaacaaagccaaaattaagttcatcattaaaaagcccgaaatgtttgagacggcgattaaggagagcacctcctctaagagccctcccagaaaaataaattcatcacccaatgttaatactactgcatcaggtgttgaagaccttaacatcattcaggtgacaattccagcctggctgtgtggtggttgatggcatgcccccgggggtgtccttcaaagcccccagctacctggaaatcagctccatgagaaggatcttagactctgccgagtttatcaaattcacggtcattagaccatttccaggacttgtgattaataaccagctggttgatcagagtgagtcaaaaggccccgtgatacaagaatcagctgaaccaagccagttggaagttccagccacagaagaaataaaagagactgatggaagctctcagatcaagcaagaaccagaccccacgtggtagacctcttccctcctaggagggtaaatcagcttctgtgtcagggatgctgtgtggcgtccatctgaaccccctgcatacgcgtagctaatgtgatctccccactttcacataagatggtggccctgccttcagggaatgtgggagccaggtgggagccttcccggatatttaagctagaagattctacagggagattctccttggatcaatatatgtctctcagtcaaagatgtaaaagcacttttgccttaaaaagaatgttctgtttctaaatagagtcaacgttgtcctcctcattggaattcactatgagtcagaatcattagactgacttttttttttccatagtaatagtattttgcagagtctcacagagctgcagatcttttgttcatcttgcagagttaacaagtctgatcctgttagtccagatttcttaaatttggccaagttataataggagcagtagcttgagacccgaagtcaggaaactttgacaatggattttttttttttaatccagagacttgtactggaatttgccttaccctgtcagctcatggacttaaggtttcatcccgctttatgagtgcttctgaatccaagtcattgttacctgaatttgcaaattaagttgtgatattcgtgactgttaaattcctgtaattagattaacctctttgcttgcttgtttgttttctctcctattttagcttaaagtatcagtggttgagaagagcttttcggacctgttactacccccaagctgtgtaatatacttgtataacagaaataccttcctatacaaacctttttttcctacttttagatagaaatgtcctactttttcagcagttctgtgaattaaagagcagagtgactgtgggtctggaatggctggtgtacttgggaatgtactatcaggattttacagcaatgctgggaaatgacagggaaaatgacaggaatgaatctcaccagattttttatgtactcagcagagccttgagttacggtgtttattttccaatcaagtgaagatatctcctacttctcctactggaacatctcagcttctgcagtgaagaaaaattcctgtgatagttcagttctttagtttttctatttgaaaaaaaaaaatcatttaaatgatcctttgttcacggctctccttaatgactgagtgaacagttcctatctgtatatttgactaaaccttttcctaagctatctctcatggttcctatgtttttttatcataattaaaagcaaaaccatctggatcacctaacagtcagaggtcagtatctcagcgtgtgaattatagaggaaatacagagagaacctcttccacttttacttttcgtccaaataaaatgcatggtgtaccagaagttgaagatcgggttgaggattggggctagctcgatgacactaaggccccaacatcgcgggacctgctgtggcgcggattcttaggaacgctgttctagccggccccctctccaggggtcgccgtggccggcattatttcctagttcttcttgtaaccctgaggtgccagcgcggggagtgaggaggggtcagggggctaaggatgcaacctctgacgttctgcgccttcctaggagagtcttacatgtgttgagatttcacaagcaatgcgagttgtaaaataccagctctacaagaagctaggctctgtgacggcatagttttcagtagctttatcacaatattcacaatggagaattatatgacatggtagcagaaataggcccttttatgtgttgcttctattttacctcaaattgtagatatagggtaatcaataaaatccatccatgcctttcacacactaagtca

SEQ ID NO: 452932 - DNA, 4300 bp, Homo sapiens
agtggcaagttgtttgttacagcgaacaccagctgctccccgcgccgggcgccgcgcgccgctgctccgccgctcggcccctcggctgctgctccgccggcgctgcctccctcgccccgcggctcccccttgcaacttggcgggcctcctcccttttgtccggcccggcccggccgccgccgccccccgcgcccggcgccgagctcccgggtctccgggccggctgtcggtgccggcagggcgcggagggggcgggggccgcggctcgtccccccgcggatgagccgccgcggacggggcgcgggcggacgatggaactccacatcctggagcaccggctgcaagttgccagcgtcgccaaggagagtatcccgctgttcacctacggcctgatcaaacttgccttcctgtcctccaagaccagatgatgattattctccaccgtctaagagaccaaaggccaatgagctaccgcagccaccagtcccggaacccgccaatgctgggaagcggaaagtgagggagttcaacttcgagaaatggaatgctcgcatcactgatctacgtaaacaagttgaagaattgtttgaaaggaaatatgctcaagccataaaagccaaaggtccggtgacgatcccgtaccctcttttctagtctcatgttgaagatctttatgtagaaggacttcctgaaggaattccttttagaaggccatctacttacggaattcctcgcctggagaggatattacttgcaaaggaaaggattcgttttgtgattaagaaacatgagcttctgagttcaacacgtgaagatttacagcttgataagccagcttcaggagtaaaggaagaatggtatgccagaatcactaaattaagaaagatggtggatcagcttttctgcaaaaaatttgcggaagccttggggagcactgaagccaaggctgtaccgtaccaaaaatttgaggcacacccgaatgatctgtacgtggaaggactgccagaaaacattcctttccgaagtccctcatggtatggaatcccaaggctggaaaaaatcattcaagtgggcaatcgaattaaatttgttattaaaagaccagaacttctgactcacagtaccactgaagttactcagccaagaacgaatacaccagtcaaagaagattggaatgtcagaattaccaagctacggaagcaagtggaagagatttttaatttgaaatttgctcaagctcttggactcaccgaggcagtaaaagtaccatatcctgtgtttgaatcaaacccggagttcttgtatgtggaaggcttgccagaggggattcccttccgaagccctacctggtttggaattccacgacttgaaaggatcgtccacgggagtaataaaatcaagttcgttgttaaaaaacctgaactagttatttcctacttgcctcctgggatggctagtaaaataaacactaaagctttgcagtcccccaaaagaccacgaagtcctgggagtaattcaaaggttcctgaaattgaggtcaccgtggaaggccctaataacaacaatcctcaaacctcagctgttcgaaccccgacccagactaacggttctaacgttcccttcaagccacgagggagagagttttcctttgaggcctggaatgccaaaatcacggacctaaaacagaaagttgaaaatctcttcaatgagaaatgtggggaagctcttggccttaaacaagctgtgaaggtgccgttcgcgttatttgagtctttcccggaagacttttatgtggaaggcttacctgagggtgtgccattccgaagaccatcgacttttggcattccgaggctggagaagatactcagaaacaaagccaaaattaagttcatcattaaaaagcccgaaatgtttgagacggcgattaaggagagcacctcctctaagagccctcccagaaaaataaattcatcacccaatgttaatactactgcatcaggtgttgaagaccttaacatcattcaggtgacaattccagatgatgataatgaaagactctcgaaagttgaaaaagctagacagctaagagaacaagtgaatgacctctttagtcggaaatttggtgaagctattggtatgggttttcctgtgaaagttccctacaggaaaatcacaattaaccctggctgtgtggtggttgatggcatgcccccgggggtgtccttcaaagcccccagctacctggaaatcagctccatgagaaggatcttagactctgccgagtttatcaaattcacggtcattagaccatttccaggacttgtgattaataaccagctggttgatcagagtgaccaccttgcccagccaagacttttttatcaggacaaaggattgtgcatttaaactatttcactagaactgggtggtggttttgctctctttcttctgggtgaattggatttgcaggttatgctgttgagtgatgacgcatagctgcttttgctccattttccccagatgacttggtaaattctccgtgaatgactctgctacataacctagataacctaagtgtgtcctttaaatgcatgtaagccagaagatgtatgttactttgaaaacataagtaacaaaattttgaatgtattgctaaagagatgtctctctgaagctcttttgatgtttggtgtcttgtccttcttattaaaccatatcttagtaaatagtttggtacgaatggatttatcactgagcaggtctgcaaaataattaatcggtaccgttttgtttctgttgatagaaataaaagagactgatggaagctctcagatcaagcaagaaccagaccccacgtggtagacctcttccctcctaggagggtaaatcagcttctgtgtcagggatgctgtgtggcgtccatctgaaccccctgcatacgcgtagctaatgtgatctccccactttcacataagatggtggccctgccttcagggaatgtgggagccaggtgggagccttcccggatatttaagctagaagattctacagggagattctccttggatcaatatatgtctctcagtcaaagatgtaaaagcacttttgccttaaaaagaatgttctgtttctaaatagagtcaacgttgtcctcctcattggaattcactatgagtcagaatcattagactgacttttttttttccatagtaatagtattttgcagagtctcacagagctgcagatcttttgttcatcttgcagagttaacaagtctgatcctgttagtccagatttcttaaatttggccaagttataataggagcagtagcttgagacccgaagtcaggaaactttgacaatggattttttttttttaatccagagacttgtactggaatttgccttaccctgtcagctcatggacttaaggtttcatcccgctttatgagtgcttctgaatccaagtcattgttacctgaatttgcaaattaagttgtgatattcgtgactgttaaattcctgtaattagattaacctctttgcttgcttgtttgttttctctcctattttagcttaaagtatcagtggttgagaagagcttttcggacctgttactacccccaagctgtgtaatatacttgtataacagaaataccttcctatacaaacctttttttcctacttttagatagaaatgtcctactttttcagcagttctgtgaattaaagagcagagtgactgtgggtctggaatggctggtgtacttgggaatgtactatcaggattttacagcaatgctgggaaatgacagggaaaatgacaggaatgaatctcaccagattttttatgtactcagcagagccttgagttacggtgtttattttccaatcaagtgaagatatctcctacttctcctactggaacatctcagcttctgcagtgaagaaaaattcctgtgatagttcagttctttagtttttctatttgaaaaaaaaaaatcatttaaatgatcctttgttcacggctctccttaatgactgagtgaacagttcctatctgtatatttgactaaaccttttcctaagctatctctcatggttcctatgtttttttatcataattaaaagcaaaaccatctggatcacctaagttcagcgccaggcctggctctgaacttaggatgggggaagaggagaggcacattcaaggaagagaatgccagatgagctagccttgaaagtgtgaacaaggcctgatgggagaatttcaaatatttgtctgggatgcagggtgcag

SEQ ID NO: 452933 - DNA, 4268 bp, Homo sapiens
agtggcaagttgtttgttacagcgaacaccagctgctccccgcgccgggcgccgcgcgccgctgctccgccgctcggcccctcggctgctgctccgccggcgctgcctccctcgccccgcggctcccccttgcaacttggcgggcctcctcccttttgtccggcccggcccggccgccgccgccccccgcgcccggcgccgagctcccgggtctccgggccggctgtcggtgccggcagggcgcggagggggcgggggccgcggctcgtccccccgcggatgagccgccgcggacggggcgcgggcggacgatggaactccacatcctggagcaccggctgcaagttgccagcgtcgccaaggagagtatcccgctgttcacctacggcctgatcaaacttgccttcctgtcctccaagaccagatgatgattattctccaccgtctaagagaccaaaggccaatgagctaccgcagccaccagtcccggaacccgccaatgctgggaagcggaaagtgagggagttcaacttcgagaaatggaatgctcgcatcactgatctacgtaaacaagttgaagaattgtttgaaaggaaatatgctcaagccataaaagccaaaggtccggtgacgatcccgtaccctcttttctagtctcatgttgaagatctttatgtagaaggacttcctgaaggaattccttttagaaggccatctacttacggaattcctcgcctggagaggatattacttgcaaaggaaaggattcgttttgtgattaagaaacatgagcttctgagttcaacacgtgaagatttacagcttgataagccagcttcaggagtaaaggaagaatggtatgccagaatcactaaattaagaaagatggtggatcagcttttctgcaaaaaatttgcggaagccttggggagcactgaagccaaggctgtaccgtaccaaaaatttgaggcacacccgaatgatctgtacgtggaaggactgccagaaaacattcctttccgaagtccctcatggtatggaatcccaaggctggaaaaaatcattcaagtgggcaatcgaattaaatttgttattaaaagaccagaacttctgactcacagtaccactgaagttactcagccaagaacgaatacaccagtcaaagaagattggaatgtcagaattaccaagctacggaagcaagtggaagagatttttaatttgaaatttgctcaagctcttggactcaccgaggcagtaaaagtaccatatcctgtgtttgaatcaaacccggagttcttgtatgtggaaggcttgccagaggggattcccttccgaagccctacctggtttggaattccacgacttgaaaggatcgtccacgggagtaataaaatcaagttcgttgttaaaaaacctgaactagttatttcctacttgcctcctgggatggctagtaaaataaacactaaagctttgcagtcccccaaaagaccacgaagtcctgggagtaattcaaaggttcctgaaattgaggtcaccgtggaaggccctaataacaacaatcctcaaacctcagctgttcgaaccccgacccagactaacggttctaacgttcccttcaagccacgagggagagagttttcctttgaggcctggaatgccaaaatcacggacctaaaacagaaagttgaaaatctcttcaatgagaaatgtggggaagctcttggccttaaacaagctgtgaaggtgccgttcgcgttatttgagtctttcccggaagacttttatgtggaaggcttacctgagggtgtgccattccgaagaccatcgacttttggcattccgaggctggagaagatactcagaaacaaagccaaaattaagttcatcattaaaaagcccgaaatgtttgagacggcgattaaggagagcacctcctctaagagccctcccagaaaaataaattcatcacccaatgttaatactactgcatcaggtgttgaagaccttaacatcattcaggtgacaattccagatgatgataatgaaagactctcgaaagttgaaaaagctagacagctaagagaacaagtgaatgacctctttagtcggaaatttggtgaagctattggtatgggttttcctgtgaaagttccctacaggaaaatcacaattaaccctggctgtgtggtggttgatggcatgcccccgggggtgtccttcaaagcccccagctacctggaaatcagctccatgagaaggatcttagactctgccgagtttatcaaattcacggtcattagaccatttccaggacttgtgattaataaccagctggttgatcagagtgagtcaaaaggccccgtgatacaagaatcagctgaaccaagccagttggaagttccagccacagaagagggtaaatcagcttctgtgtcagggatgctgtgtggcgtccatctgaaccccctgcatacgcgtagctaatgtgatctccccactttcacataagatggtggccctgccttcagggaatgtgggagccaggtgggagccttcccggatatttaagctagaagattctacagggagattctccttggatcaatatatgtctctcagtcaaagatgtaaaagcacttttgccttaaaaagaatgttctgtttctaaatagagtcaacgttgtcctcctcattggaattcactatgagtcagaatcattagactgacttttttttttccatagtaatagtattttgcagagtctcacagagctgcagatcttttgttcatcttgcagagttaacaagtctgatcctgttagtccagatttcttaaatttggccaagttataataggagcagtagcttgagacccgaagtcaggaaactttgacaatggattttttttttttaatccagagacttgtactggaatttgccttaccctgtcagctcatggacttaaggtttcatcccgctttatgagtgcttctgaatccaagtcattgttacctgaatttgcaaattaagttgtgatattcgtgactgttaaattcctgtaattagattaacctctttgcttgcttgtttgttttctctcctattttagcttaaagtatcagtggttgagaagagcttttcggacctgttactacccccaagctgtgtaatatacttgtataacagaaataccttcctatacaaacctttttttcctacttttagatagaaatgtcctactttttcagcagttctgtgaattaaagagcagagtgactgtgggtctggaatggctggtgtacttgggaatgtactatcaggattttacagcaatgctgggaaatgacagggaaaatgacaggaatgaatctcaccagattttttatgtactcagcagagccttgagttacggtgtttattttccaatcaagtgaagatatctcctacttctcctactggaacatctcagcttctgcagtgaagaaaaattcctgtgatagttcagttctttagtttttctatttgaaaaaaaaaaatcatttaaatgatcctttgttcacggctctccttaatgactgagtgaacagttcctatctgtatatttgactaaaccttttcctaagctatctctcatggttcctatgtttttttatcataattaaaagcaaaaccatctggatcacctaacagtcagaggtcagtatctcagcgtgtgaattatagaggaaatacagagagaacctcttccacttttacttttcgtccaaataaaatgcatggtgtaccagaagttgaagatcgggttgaggattggggctagctcgatgacactaaggccccaacatcgcgggacctgctgtggcgcggattcttaggaacgctgttctagccggccccctctccaggggtcgccgtggccggcattatttcctagttcttcttgtaaccctgaggtgccagcgcggggagtgaggaggggtcagggggctaaggatgcaacctctgacgttctgcgccttcctaggagagtcttacatgtgttgagatttcacaagcaatgcgagttgtaaaataccagctctacaagaagctaggctctgtgacggcatagttttcagtagctttatcacaatattcacaatggagaattatatgacatggtagcagaaataggcccttttatgtgttgcttctattttacctcaaattgtagatatagggtaatcaataaaatccatccatgcctttcacacactaagtca

SEQ ID NO: 452934 - DNA, 3473 bp, Homo sapiens
gaggccaaggcaggcagatcacctgaggtcaggagttccagaccagcctggccaacatggtgaaatcccatctctacaaaaataaaacagttagctgggcatgatggcgggtgcctgtaatcccagctactcgggaggctgaggcaggatagtcgcttgaacccaggaggtggaggttgcaatgagccaagatcatgccactgcactccagcctggacgacagagtgagactccatcacaagaaaaaaagaactttgtcaacctctgtcttagggcgccttgtcacaggcttcgggtcagacggattcaacctcgcatcagccatttgttagccaggtcactctgttctttgtctgtaaatgagattgatcgttgttcccactgagagtgtcagctccttcccatagagcaggcatgatgattgtactcacctctgacaccattgtgagtgccacattccttcccacgtccttgtcaccgtaagagatgcccacctgagcaccaaccccaggttatcttcccctttgtcttccagccccccagaaacagctacgactcaacctacccaatcatttcatcatcagattgccactgtctctagttcaggtctcttgggactggcactcagaaatctcataataaatcctcttgaggcttctcatacactcgtcttcttccaatcttctttccctcaaaatctcatattttggttccacttcacccacggtcattctccatatcactcccaggagttaggcaaaaagccccttccgttcttccgtatgttaaacttagaatcactctgttccctgctctgcgtttctattttttgtttttcctccatttactagtagcttaacactttctaacagtgttcttattattgatacgtatctatctcttccataagcttataaggtcatggataatacttctcattgtagtacgtaaatgacgtgggctagatatgagttgaataaacagttatacctgtaaattcttacagagtgaaaataaattgttatactttacaatttgtttctctctttagaccatttccaggacttgtgattaataaccagctggttgatcagagtgaccaccttgcccagccaagacttttttatcaggacaaaggattgtgcatttaaactatttcactagaactgggtggtggttttgctctctttcttctgggtgaattggatttgcaggttatgctgttgagtgatgacgcatagctgcttttgctccattttccccagatgacttggtaaattctccgtgaatgactctgctacataacctagataacctaagtgtgtcctttaaatgcatgtaagccagaagatgtatgttactttgaaaacataagtaacaaaattttgaatgtattgctaaagagatgtctctctgaagctcttttgatgtttggtgtcttgtccttcttattaaaccatatcttagtaaatagtttggtacgaatggatttatcactgagcaggtctgcaaaataattaatcggtaccgttttgtttctgttgatagaaataaaagagactgatggaagctctcagatcaagcaagaaccagaccccacgtggtagacctcttccctcctaggagggtaaatcagcttctgtgtcagggatgctgtgtggcgtccatctgaaccccctgcatacgcgtagctaatgtgatctccccactttcacataagatggtggccctgccttcagggaatgtgggagccaggtgggagccttcccggatatttaagctagaagattctacagggagattctccttggatcaatatatgtctctcagtcaaagatgtaaaagcacttttgccttaaaaagaatgttctgtttctaaatagagtcaacgttgtcctcctcattggaattcactatgagtcagaatcattagactgacttttttttttccatagtaatagtattttgcagagtctcacagagctgcagatcttttgttcatcttgcagagttaacaagtctgatcctgttagtccagatttcttaaatttggccaagttataataggagcagtagcttgagacccgaagtcaggaaactttgacaatggattttttttttttaatccagagacttgtactggaatttgccttaccctgtcagctcatggacttaaggtttcatcccgctttatgagtgcttctgaatccaagtcattgttacctgaatttgcaaattaagttgtgatattcgtgactgttaaattcctgtaattagattaacctctttgcttgcttgtttgttttctctcctattttagcttaaagtatcagtggttgagaagagcttttcggacctgttactacccccaagctgtgtaatatacttgtataacagaaataccttcctatacaaacctttttttcctacttttagatagaaatgtcctactttttcagcagttctgtgaattaaagagcagagtgactgtgggtctggaatggctggtgtacttgggaatgtactatcaggattttacagcaatgctgggaaatgacagggaaaatgacaggaatgaatctcaccagattttttatgtactcagcagagccttgagttacggtgtttattttccaatcaagtgaagatatctcctacttctcctactggaacatctcagcttctgcagtgaagaaaaattcctgtgatagttcagttctttagtttttctatttgaaaaaaaaaaatcatttaaatgatcctttgttcacggctctccttaatgactgagtgaacagttcctatctgtatatttgactaaaccttttcctaagctatctctcatggttcctatgtttttttatcataattaaaagcaaaaccatctggatcacctaacagtcagaggtcagtatctcagcgtgtgaattatagaggaaatacagagagaacctcttccacttttacttttcgtccaaataaaatgcatggtgtaccagaagttgaagatcgggttgaggattggggctagctcgatgacactaaggccccaacatcgcgggacctgctgtggcgcggattcttaggaacgctgttctagccggccccctctccaggggtcgccgtggccggcattatttcctagttcttcttgtaaccctgaggtgccagcgcggggagtgaggaggggtcagggggctaaggatgcaacctctgacgttctgcgccttcctaggagagtcttacatgtgttgagatttcacaagcaatgcgagttgtaaaataccagctctacaagaagctaggctctgtgacggcatagttttcagtagctttatcacaatattcacaatggagaattatatgacatggtagcagaaataggcccttttatgtgttgcttctattttacctcaaattgtagatatagggtaatcaataaaatccatccatgcctttcacacactaagtca

SEQ ID NO: 452935 - DNA, 3693 bp, Homo sapiens
  misc_feature (31)..(31): n is a, c, g, or t
  misc_feature (34)..(34): n is a, c, g, or t
  misc_feature (39)..(41): n is a, c, g, or t
  misc_feature (51)..(51): n is a, c, g, or t
  misc_feature (53)..(53): n is a, c, g, or t
  misc_feature (56)..(56): n is a, c, g, or t
ttacaacagctccagttacaacagctcattntantgggnnntcgaattaantntgntattaaaagaccagaacttctgactcacagtaccactgaagttactcagccaagaacgaatacaccagtcaaagaagattggaatgtcagaattaccaagctacggaagcaagtggaagagatttttaatttgaaatttgctcaagctcttggactcaccgaggcagtaaaagtaccatatcctgtgtttgaatcaaacccggagttcttgtatgtggaaggcttgccagaggggattcccttccgaagccctacctggtttggaattccacgacttgaaaggatcgtccacgggagtaataaaatcaagttcgttgttaaaaaacctgaactagttatttcctacttgcctcctgggatggctagtaaaataaacactaaagctttgcagtcccccaaaagaccacgaagtcctgggagtaattcaaaggttcctgaaattgaggtcaccgtggaaggccctaataacaacaatcctcaaacctcagctgttcgaaccccgacccagactaacggttctaacgttcccttcaagccacgagggagagagttttcctttgaggcctggaatgccaaaatcacggacctaaaacagaaagttgaaaatctcttcaatgagaaatgtggggaagctcttggccttaaacaagctgtgaaggtgccgttcgcgttatttgagtctttcccggaagacttttatgtggaaggcttacctgagggtgtgccattccgaagaccatcgacttttggcattccgaggctggagaagatactcagaaacaaagccaaaattaagttcatcattaaaaagcccgaaatgtttgagacggcgattaaggagagcacctcctctaagagccctcccagaaaaataaattcatcacccaatgttaatactactgcatcaggtgttgaagaccttaacatcattcaggtgacaattccagatgatgataatgaaagactctcgaaagttgaaaaagctagacagctaagagaacaagtgaatgacctctttagtcggaaatttggtgaagctattggtatgggttttcctgtgaaagttccctacaggaaaatcacaattaaccctggctgtgtggtggttgatggcatgcccccgggggtgtccttcaaagcccccagctacctggaaatcagctccatgagaaggatcttagactctgccgagtttatcaaattcacggtcattagaccatttccaggacttgtgattaataaccagctggttgatcagagtgaccaccttgcccagccaagacttttttatcaggacaaaggattgtgcatttaaactatttcactagaactgggtggtggttttgctctctttcttctgggtgaattggatttgcaggttatgctgttgagtgatgacgcatagctgcttttgctccattttccccagatgacttggtaaattctccgtgaatgactctgctacataacctagataacctaagtgtgtcctttaaatgcatgtaagccagaagatgtatgttactttgaaaacataagtaacaaaattttgaatgtattgctaaagagatgtctctctgaagctcttttgatgtttggtgtcttgtccttcttattaaaccatatcttagtaaatagtttggtacgaatggatttatcactgagcaggtctgcaaaataattaatcggtaccgttttgtttctgttgatagaaataaaagagactgatggaagctctcagatcaagcaagaaccagaccccacgtggtagacctcttccctcctaggagggtaaatcagcttctgtgtcagggatgctgtgtggcgtccatctgaaccccctgcatacgcgtagctaatgtgatctccccactttcacataagatggtggccctgccttcagggaatgtgggagccaggtgggagccttcccggatatttaagctagaagattctacagggagattctccttggatcaatatatgtctctcagtcaaagatgtaaaagcacttttgccttaaaaagaatgttctgtttctaaatagagtcaacgttgtcctcctcattggaattcactatgagtcagaatcattagactgacttttttttttccatagtaatagtattttgcagagtctcacagagctgcagatcttttgttcatcttgcagagttaacaagtctgatcctgttagtccagatttcttaaatttggccaagttataataggagcagtagcttgagacccgaagtcaggaaactttgacaatggattttttttttttaatccagagacttgtactggaatttgccttaccctgtcagctcatggacttaaggtttcatcccgctttatgagtgcttctgaatccaagtcattgttacctgaatttgcaaattaagttgtgatattcgtgactgttaaattcctgtaattagattaacctctttgcttgcttgtttgttttctctcctattttagcttaaagtatcagtggttgagaagagcttttcggacctgttactacccccaagctgtgtaatatacttgtataacagaaataccttcctatacaaacctttttttcctacttttagatagaaatgtcctactttttcagcagttctgtgaattaaagagcagagtgactgtgggtctggaatggctggtgtacttgggaatgtactatcaggattttacagcaatgctgggaaatgacagggaaaatgacaggaatgaatctcaccagattttttatgtactcagcagagccttgagttacggtgtttattttccaatcaagtgaagatatctcctacttctcctactggaacatctcagcttctgcagtgaagaaaaattcctgtgatagttcagttctttagtttttctatttgaaaaaaaaaaatcatttaaatgatcctttgttcacggctctccttaatgactgagtgaacagttcctatctgtatatttgactaaaccttttcctaagctatctctcatggttcctatgtttttttatcataattaaaagcaaaaccatctggatcacctaacagtcagaggtcagtatctcagcgtgtgaattatagaggaaatacagagagaacctcttccacttttacttttcgtccaaataaaatgcatggtgtaccagaagttgaagatcgggttgaggattggggctagctcgatgacactaaggccccaacatcgcgggacctgctgtggcgcggattcttaggaacgctgttctagccggccccctctccaggggtcgccgtggccggcattatttcctagttcttcttgtaaccctgaggtgccagcgcggggagtgaggaggggtcagggggctaaggatgcaacctctgacgttctgcgccttcctaggagagtcttacatgtgttgagatttcacaagcaatgcgagttgtaaaataccagctctacaagaagctaggctctgtgacggcatagttttcagtagctttatcacaatattcacaatggagaattatatgacatggtagcagaaataggcccttttatgtgttgcttctattttacctcaaattgtagatatagggtaatcaataaaatccatccatgcctttcacacactaagtca

SEQ ID NO: 452936 - DNA, 3089 bp, Homo sapiens
gaggccaaggcaggcagatcacctgaggtcaggagttccagaccagcctggccaacatggtgaaatcccatctctacaaaaataaaacagttagctgggcatgatggcgggtgcctgtaatcccagctactcgggaggctgaggcaggatagtcgcttgaacccaggaggtggaggttgcaatgagccaagatcatgccactgcactccagcctggacgacagagtgagactccatcacaagaaaaaaagaactttgtcaacctctgtcttagggcgccttgtcacaggcttcgggtcagacggattcaacctcgcatcagccatttgttagccaggtcactctgttctttgtctgtaaatgagattgatcgttgttcccactgagagtgtcagctccttcccatagagcaggcatgatgattgtactcacctctgacaccattgtgagtgccacattccttcccacgtccttgtcaccgtaagagatgcccacctgagcaccaaccccaggttatcttcccctttgtcttccagccccccagaaacagctacgactcaacctacccaatcatttcatcatcagattgccactgtctctagttcaggtctcttgggactggcactcagaaatctcataataaatcctcttgaggcttctcatacactcgtcttcttccaatcttctttccctcaaaatctcatattttggttccacttcacccacggtcattctccatatcactcccaggagttaggcaaaaagccccttccgttcttccgtatgttaaacttagaatcactctgttccctgctctgcgtttctattttttgtttttcctccatttactagtagcttaacactttctaacagtgttcttattattgatacgtatctatctcttccataagcttataaggtcatggataatacttctcattgtagtacgtaaatgacgtgggctagatatgagttgaataaacagttatacctgtaaattcttacagagtgaaaataaattgttatactttacaatttgtttctctctttagaccatttccaggacttgtgattaataaccagctggttgatcagagtgagtcaaaaggccccgtgatacaagaatcagctgaaccaagccagttggaagttccagccacagaagaaataaaagagactgatggaagctctcagatcaagcaagaaccagaccccacgtggtagacctcttccctcctaggagggtaaatcagcttctgtgtcagggatgctgtgtggcgtccatctgaaccccctgcatacgcgtagctaatgtgatctccccactttcacataagatggtggccctgccttcagggaatgtgggagccaggtgggagccttcccggatatttaagctagaagattctacagggagattctccttggatcaatatatgtctctcagtcaaagatgtaaaagcacttttgccttaaaaagaatgttctgtttctaaatagagtcaacgttgtcctcctcattggaattcactatgagtcagaatcattagactgacttttttttttccatagtaatagtattttgcagagtctcacagagctgcagatcttttgttcatcttgcagagttaacaagtctgatcctgttagtccagatttcttaaatttggccaagttataataggagcagtagcttgagacccgaagtcaggaaactttgacaatggattttttttttttaatccagagacttgtactggaatttgccttaccctgtcagctcatggacttaaggtttcatcccgctttatgagtgcttctgaatccaagtcattgttacctgaatttgcaaattaagttgtgatattcgtgactgttaaattcctgtaattagattaacctctttgcttgcttgtttgttttctctcctattttagcttaaagtatcagtggttgagaagagcttttcggacctgttactacccccaagctgtgtaatatacttgtataacagaaataccttcctatacaaacctttttttcctacttttagatagaaatgtcctactttttcagcagttctgtgaattaaagagcagagtgactgtgggtctggaatggctggtgtacttgggaatgtactatcaggattttacagcaatgctgggaaatgacagggaaaatgacaggaatgaatctcaccagattttttatgtactcagcagagccttgagttacggtgtttattttccaatcaagtgaagatatctcctacttctcctactggaacatctcagcttctgcagtgaagaaaaattcctgtgatagttcagttctttagtttttctatttgaaaaaaaaaaatcatttaaatgatcctttgttcacggctctccttaatgactgagtgaacagttcctatctgtatatttgactaaaccttttcctaagctatctctcatggttcctatgtttttttatcataattaaaagcaaaaccatctggatcacctaacagtcagaggtcagtatctcagcgtgtgaattatagaggaaatacagagagaacctcttccacttttacttttcgtccaaataaaatgcatggtgtaccagaagttgaagatcgggttgaggattggggctagctcgatgacactaaggccccaacatcgcgggacctgctgtggcgcggattcttaggaacgctgttctagccggccccctctccaggggtcgccgtggccggcattatttcctagttcttcttgtaaccctgaggtgccagcgcggggagtgaggaggggtcagggggctaaggatgcaacctctgacgttctgcgccttcctaggagagtcttacatgtgttgagatttcacaagcaatgcgagttgtaaaataccagctctacaagaagctaggctctgtgacggcatagttttcagtagctttatcacaatattcacaatggagaattatatgacatggtagcagaaataggcccttttatgtgttgcttctattttacctcaaattgtagatatagggtaatcaataaaatccatccatgcctttcacacactaagtca

SEQ ID NO: 452937 - DNA, 2469 bp, Homo sapiens
caaatgtatgttaaaatgcttttccaagggaacaacacatccttacattatttaaaccaatctgcttcattttcagagctggttgatcagagtgaccaccttgcccagccaagacttttttatcaggacaaaggattgtgcatttaaactatttcactagaactgggtggtggttttgctctctttcttctgggtgaattggatttgcaggttatgctgttgagtgatgacgcatagctgcttttgctccattttccccagatgacttggtaaattctccgtgaatgactctgctacataacctagataacctaagtgtgtcctttaaatgcatgtaagccagaagatgtatgttactttgaaaacataagtaacaaaattttgaatgtattgctaaagagatgtctctctgaagctcttttgatgtttggtgtcttgtccttcttattaaaccatatcttagtaaatagtttggtacgaatggatttatcactgagcaggtctgcaaaataattaatcggtaccgttttgtttctgttgatagaaataaaagagactgatggaagctctcagatcaagcaagaaccagaccccacgtggtagacctcttccctcctaggagggtaaatcagcttctgtgtcagggatgctgtgtggcgtccatctgaaccccctgcatacgcgtagctaatgtgatctccccactttcacataagatggtggccctgccttcagggaatgtgggagccaggtgggagccttcccggatatttaagctagaagattctacagggagattctccttggatcaatatatgtctctcagtcaaagatgtaaaagcacttttgccttaaaaagaatgttctgtttctaaatagagtcaacgttgtcctcctcattggaattcactatgagtcagaatcattagactgacttttttttttccatagtaatagtattttgcagagtctcacagagctgcagatcttttgttcatcttgcagagttaacaagtctgatcctgttagtccagatttcttaaatttggccaagttataataggagcagtagcttgagacccgaagtcaggaaactttgacaatggattttttttttttaatccagagacttgtactggaatttgccttaccctgtcagctcatggacttaaggtttcatcccgctttatgagtgcttctgaatccaagtcattgttacctgaatttgcaaattaagttgtgatattcgtgactgttaaattcctgtaattagattaacctctttgcttgcttgtttgttttctctcctattttagcttaaagtatcagtggttgagaagagcttttcggacctgttactacccccaagctgtgtaatatacttgtataacagaaataccttcctatacaaacctttttttcctacttttagatagaaatgtcctactttttcagcagttctgtgaattaaagagcagagtgactgtgggtctggaatggctggtgtacttgggaatgtactatcaggattttacagcaatgctgggaaatgacagggaaaatgacaggaatgaatctcaccagattttttatgtactcagcagagccttgagttacggtgtttattttccaatcaagtgaagatatctcctacttctcctactggaacatctcagcttctgcagtgaagaaaaattcctgtgatagttcagttctttagtttttctatttgaaaaaaaaaaatcatttaaatgatcctttgttcacggctctccttaatgactgagtgaacagttcctatctgtatatttgactaaaccttttcctaagctatctctcatggttcctatgtttttttatcataattaaaagcaaaaccatctggatcacctaacagtcagaggtcagtatctcagcgtgtgaattatagaggaaatacagagagaacctcttccacttttacttttcgtccaaataaaatgcatggtgtaccagaagttgaagatcgggttgaggattggggctagctcgatgacactaaggccccaacatcgcgggacctgctgtggcgcggattcttaggaacgctgttctagccggccccctctccaggggtcgccgtggccggcattatttcctagttcttcttgtaaccctgaggtgccagcgcggggagtgaggaggggtcagggggctaaggatgcaacctctgacgttctgcgccttcctaggagagtcttacatgtgttgagatttcacaagcaatgcgagttgtaaaataccagctctacaagaagctaggctctgtgacggcatagttttcagtagctttatcacaatattcacaatggagaattatatgacatggtagcagaaataggcccttttatgtgttgcttctattttacctcaaattgtagatatagggtaatcaataaaatccatccatgcctttcacacactaagtca

SEQ ID NO: 452938 - DNA, 1303 bp, Homo sapiens
  misc_feature (7)..(7): n is a, c, g, or t
  misc_feature (73)..(73): n is a, c, g, or t
agaaaanctaaagaactgaactatcacaggaatttttcttcactgcagaagctgagatgttccagccacagangaaataaaagagactgatggaagctctcagatcaagcaagaaccagaccccacgtggtagacctcttccctcctaggcttaaagtatcagtggttgagaagagcttttcggacctgttactacccccaagctgtgtaatatacttgtataacagaaataccttcctatacaaacctttttttcctacttttagatagaaatgtcctactttttcagcagttctgtgaattaaagagcagagtgactgtgggtctggaatggctggtgtacttgggaatgtactatcaggattttacagcaatgctgggaaatgacagggaaaatgacaggaatgaatctcaccagattttttatgtactcagcagagccttgagttacggtgtttattttccaatcaagtgaagatatctcctacttctcctactggaacatctcagcttctgcagtgaagaaaaattcctgtgatagttcagttctttagtttttctatttgaaaaaaaaaaatcatttaaatgatcctttgttcacggctctccttaatgactgagtgaacagttcctatctgtatatttgactaaaccttttcctaagctatctctcatggttcctatgtttttttatcataattaaaagcaaaaccatctggatcacctaacagtcagaggtcagtatctcagcgtgtgaattatagaggaaatacagagagaacctcttccacttttacttttcgtccaaataaaatgcatggtgtaccagaagttgaagatcgggttgaggattggggctagctcgatgacactaaggccccaacatcgcgggacctgctgtggcgcggattcttaggaacgctgttctagccggccccctctccaggggtcgccgtggccggcattatttcctagttcttcttgtaaccctgaggtgccagcgcggggagtgaggaggggtcagggggctaaggatgcaacctctgacgttctgcgccttcctaggagagtcttacatgtgttgagatttcacaagcaatgcgagttgtaaaataccagctctacaagaagctaggctctgtgacggcatagttttcagtagctttatcacaatattcacaatggagaattatatgacatggtagcagaaataggcccttttatgtgttgcttctattttacctcaaattgtagatatagggtaatcaataaaatccatccatgcctttcacacactaagtca

SEQ ID NO: 452939 - DNA, 3360 bp, Homo sapiens
agtggcaagttgtttgttacagcgaacaccagctgctccccgcgccgggcgccgcgcgccgctgctccgccgctcggcccctcggctgctgctccgccggcgctgcctccctcgccccgcggctcccccttgcaacttggcgggcctcctcccttttgtccggcccggcccggccgccgccgccccccgcgcccggcgccgagctcccgggtctccgggccggctgtcggtgccggcagggcgcggagggggcgggggccgcggctcgtccccccgcggatgagccgccgcggacggggcgcgggcggacgatggaactccacatcctggagcaccggctgcaagttgccagcgtcgccaaggagagtatcccgctgttcacctacggcctgatcaaacttgccttcctgtcctccaagaccagatgatgattattctccaccgtctaagagaccaaaggccaatgagctaccgcagccaccagtcccggaacccgccaatgctgggaagcggaaagtgagggagttcaacttcgagaaatggaatgctcgcatcactgatctacgtaaacaagttgaagaattgtttgaaaggaaatatgctcaagccataaaagccaaaggtccggtgacgatcccgtaccctcttttctagtctcatgttgaagatctttatgtagaaggacttcctgaaggaattccttttagaaggccatctacttacggaattcctcgcctggagaggatattacttgcaaaggaaaggattcgttttgtgattaagaaacatgagcttctgagttcaacacgtgaagatttacagcttgataagccagcttcaggagtaaaggaagaatggtatgccagaatcactaaattaagaaagatggtggatcagcttttctgcaaaaaatttgcggaagccttggggagcactgaagccaaggctgtaccgtaccaaaaatttgaggcacacccgaatgatctgtacgtggaaggactgccagaaaacattcctttccgaagtccctcatggtatggaatcccaaggctggaaaaaatcattcaagtgggcaatcgaattaaatttgttattaaaagaccagaacttctgactcacagtaccactgaagttactcagccaagaacgaatacaccagtcaaagaagattggaatgtcagaattaccaagctacggaagcaagtggaagagatttttaatttgaaatttgctcaagctcttggactcaccgaggcagtaaaagtaccatatcctgtgtttgaatcaaacccggagttcttgtatgtggaaggcttgccagaggggattcccttccgaagccctacctggtttggaattccacgacttgaaaggatcgtccacgggagtaataaaatcaagttcgttgttaaaaaacctgaactagttatttcctacttgcctcctgggatggctagtaaaataaacactaaagctttgcagtcccccaaaagaccacgaagtcctgggagtaattcaaaggttcctgaaattgaggtcaccgtggaaggccctaataacaacaatcctcaaacctcagctgttcgaaccccgacccagactaacggttctaacgttcccttcaagccacgagggagagagttttcctttgaggcctggaatgccaaaatcacggacctaaaacagaaagttgaaaatctcttcaatgagaaatgtggggaagctcttggccttaaacaagctgtgaaggtgccgttcgcgttatttgagtctttcccggaagacttttatgtggaaggcttacctgagggtgtgccattccgaagaccatcgacttttggcattccgaggctggagaagatactcagaaacaaagccaaaattaagttcatcattaaaaagcccgaaatgtttgagacggcgattaaggagagcacctcctctaagagccctcccagaaaaataaattcatcacccaatgttaatactactgcatcaggtgttgaagaccttaacatcattcaggtgacaattccagatgatgataatgaaagactctcgaaagttgaaaaagctagacagctaagagaacaagtgaatgacctctttagtcggaaatttggtgaagctattggtatgggttttcctgtgaaagttccctacaggaaaatcacaattaaccctggctgtgtggtggttgatggcatgcccccgggggtgtccttcaaagcccccagctacctggaaatcagctccatgagaaggatcttagactctgccgagtttatcaaattcacggtcattagaccatttccaggacttgtgattaataaccagctggttgatcagagtgagtcaaaaggccccgtgatacaagaatcagctgaaccaagccagttggaagttccagccacagaagaaataaaagagactgatggaagctctcagatcaagcaagaaccagaccccacgtggtagacctcttccctcctaggagccttgagttacggtgtttattttccaatcaagtgaagatatctcctacttctcctactggaacatctcagcttctgcagtgaagaaaaattcctgtgatagttcagttctttagtttttctatttgaaaaaaaaaaatcatttaaatgatcctttgttcacggctctccttaatgactgagtgaacagttcctatctgtatatttgactaaaccttttcctaagctatctctcatggttcctatgtttttttatcataattaaaagcaaaaccatctggatcacctaacagtcagaggtcagtatctcagcgtgtgaattatagaggaaatacagagagaacctcttccacttttacttttcgtccaaataaaatgcatggtgtaccagaagttgaagatcgggttgaggattggggctagctcgatgacactaaggccccaacatcgcgggacctgctgtggcgcggattcttaggaacgctgttctagccggccccctctccaggggtcgccgtggccggcattatttcctagttcttcttgtaaccctgaggtgccagcgcggggagtgaggaggggtcagggggctaaggatgcaacctctgacgttctgcgccttcctaggagagtcttacatgtgttgagatttcacaagcaatgcgagttgtaaaataccagctctacaagaagctaggctctgtgacggcatagttttcagtagctttatcacaatattcacaatggagaattatatgacatggtagcagaaataggcccttttatgtgttgcttctattttacctcaaattgtagatatagggtaatcaataaaatccatccatgcctttcacacactaagtca

SEQ ID NO: 452940 - DNA, 1342 bp, Homo sapiens
gagtgtagctggtagtgccagtctgagcggaacctctggaggataatcccggatgctcagtatgagaggtccttgggatcttactggtcccagatagtagaagtcttcgagtataatgagcaaacctgagattaggtagtgtccaaaagagaaaactctgccatgacaaaaatactggtacaggtcaagacagcttttagctctcctgctcttgaatccatggagaaagcttgttagcctgtgatcagtaagccatgggagtcgtggaaatgttttctgcgggctggctgggcattgctggtggtgaagctggatgttggctgcctgaccgttctgtgaattaaagagcagagtgactgtgggtctggaatggctggtgtacttgggaatgtactatcaggattttacagcaatgctgggaaatgacagggaaaatgacaggaatgaatctcaccagattttttatgtactcagcagagccttgagttacggtgtttattttccaatcaagtgaagatatctcctacttctcctactggaacatctcagcttctgcagtgaagaaaaattcctgtgatagttcagttctttagtttttctatttgaaaaaaaaaaatcatttaaatgatcctttgttcacggctctccttaatgactgagtgaacagttcctatctgtatatttgactaaaccttttcctaagctatctctcatggttcctatgtttttttatcataattaaaagcaaaaccatctggatcacctaacagtcagaggtcagtatctcagcgtgtgaattatagaggaaatacagagagaacctcttccacttttacttttcgtccaaataaaatgcatggtgtaccagaagttgaagatcgggttgaggattggggctagctcgatgacactaaggccccaacatcgcgggacctgctgtggcgcggattcttaggaacgctgttctagccggccccctctccaggggtcgccgtggccggcattatttcctagttcttcttgtaaccctgaggtgccagcgcggggagtgaggaggggtcagggggctaaggatgcaacctctgacgttctgcgccttcctaggagagtcttacatgtgttgagatttcacaagcaatgcgagttgtaaaataccagctctacaagaagctaggctctgtgacggcatagttttcagtagctttatcacaatattcacaatggagaattatatgacatggtagcagaaataggcccttttatgtgttgcttctattttacctcaaattgtagatatagggtaatcaataaaatccatccatgcctttcacacactaagtca

SEQ ID NO: 452941 - DNA, 1537 bp, Homo sapiens
agtggcaagttgtttgttacagcgaacaccagctgctccccgcgccgggcgccgcgcgccgctgctccgccgctcggcccctcggctgctgctccgccggcgctgcctccctcgccccgcggctcccccttgcaacttggcgggcctcctcccttttgtccggcccggcccggccgccgccgccccccgcgcccggcgccgagctcccgggtctccgggccggctgtcggtgccggcagggcgcggagggggcgggggccgcggctcgtccccccgcggatgagccgccgcggacggggcgcgggcggacgatggaactccacatcctggagcaccggctgcaagttgccagcgtcgccaaggagagtatcccgctgttcacctacggcctgatcaaacttgccttcctgtcctccaagaccagatgatgattattctccaccgtctaagagaccaaaggccaatgagctaccgcagccaccagtcccggaacccgccaatgctgggaagcggaaagtgagggagttcaacttcgagaaatggaatgctcgcatcactgatctacgtaaacaagttgaagaattgtttgaaaggaaatatgctcaagccataaaagccaaaggtccggtgacgatcccgtaccctcttttctagtctcatgttgaagatctttatgtagaaggacttcctgaaggaattccttttagaaggccatctacttacggaattcctcgcctggagaggatattacttgcaaaggaaaggattcgttttgtgattaagaaacatgagcttctgagttcaacacgtgaagatttacagcttgataagccagcttcaggagtaaaggaagaatggtatgccagaatcactaaattaagaaagatggtggatcagcttttctgcaaaaaatttgcggaagccttggggagcactgaagccaaggctgtaccgtaccaaaaatttgaggcacacccgaatgatctgtacgtggaaggactgccagaaaacattcctttccgaagtccctcatggtatggaatcccaaggctggaaaaaatcattcaagtgggcaatcgaattaaatttgttattaaaagaccagaacttctgactcacagtaccactgaagttactcagccaagaacgaatacaccagtcaaagaagattggaatgtcagaattaccaagctacggaagcaagtggaagagatttttaatttgaaatttgctcaagctcttggactcaccgaggcagtaaaagtaccatatcctgtgtttgaatcaaacccggagttcttgtatgtggaaggcttgccagaggggattcccttccgaagccctacctggtttggaattccacgacttgaaaggatcgtccacgggagtaataaaatcaagttcgttgttaaaaaaccgtgaactagattgttctcctagcttgcctcctgtggatggcttagtaaaactaaacaactaaagcgtttgctagtccccgcaaaatagaccacgtaagtccgtggtgagataagttcaa

SEQ ID NO: 452942 - DNA, 1433 bp, Homo sapiens
agtggcaagttgtttgttacagcgaacaccagctgctccccgcgccgggcgccgcgcgccgctgctccgccgctcggcccctcggctgctgctccgccggcgctgcctccctcgccccgcggctcccccttgcaacttggcgggcctcctcccttttgtccggcccggcccggccgccgccgccccccgcgcccggcgccgagctcccgggtctccgggccggctgtcggtgccggcagggcgcggagggggcgggggccgcggctcgtccccccgcggatgagccgccgcggacggggcgcgggcggacgatggaactccacatcctggagcaccggctgcaagttgccagcgtcgccaaggagagtatcccgctgttcacctacggcctgatcaaacttgccttcctgtcctccaagaccagatgatgattattctccaccgtctaagagaccaaaggccaatgagctaccgcagccaccagtcccggaacccgccaatgctgggaagcggaaagtgagggagttcaacttcgagaaatggaatgctcgcatcactgatctacgtaaacaagttgaagaattgtttgaaaggaaatatgctcaagccataaaagccaaaggtccggtgacgatcccgtaccctcttttctagtctcatgttgaagatctttatgtagaaggacttcctgaaggaattccttttagaaggccatctacttacggaattcctcgcctggagaggatattacttgcaaaggaaaggatggtcatggatccagagatctccaggaaccatggagggtgtagaagagaagaagaaggaggttcctgctgtgccagaaacccttaagaaaaagcgaaggaatttcgcagagctgaagatcaagcgcctgagaaagaagtttgcccaaaagatgcttcgaaaggcaaggaggaagcttatctatgaaaaagcaaagcactatcacaaggaatataggcagatgtacagaactgaaattcgaatggcgaggatggcaagaaaagctggcaacttctatgtacctgcagaacccaaattggcgtttgtcatcagaatcagaggtatcaatggagtgagcccaaaggttcgaaaggtgttgcagcttcttcgccttcgtcaatcttcaatggaacctttgtgaagctcaacaagcttcgatttaacatgctgaggatttgtagaagccatatattggcctgggggggtaccccattctgaaatcccgttacatgaacttatctaacaagacgtggtcttgggcaaattccatagaagcgaattggtttgacacgtaaacgcttgattggccaactcctgggaacaaccgggtcactgctggagcgatcgggcacaaactttagcggggacaccccccaaggcgaaaaccggtgcgccacaattttccccaa

SEQ ID NO: 452943 - DNA, 588 bp, Homo sapiens
gaggccaaggcaggcagatcacctgaggtcaggagttccagaccagcctggccaacatggtgaaatcccatctctacaaaaataaaacagttagctgggcatgatggcgggtgcctgtaatcccagctactcgggaggctgaggcaggatagtcgcttgaacccaggaggtggaggttgcaatgagccaagatcatgccactgcactccagcctggacgacagagtgagactccatcacaagaaaaaaagaactttgtcaacctctgtcttagggcgccttgtcacaggcttcgggtcagacggattcaacctcgcatcagccatttgttagccaggtcactctgttctttgtctgtaaatgagattgatcgttgttcccactgagagtgtcagctccttcccatagagcaggcatgatgattgtactcacctctgacaccattgtgagtgccacattccttcccacgtccttgtcaccgtaagagatgcccacctgagcaccaaccccaggttatcttcccctattctcaggctacaccctagaccaacctacgccaaatccatttcactatcatattcatcggcgt

SEQ ID NO: 452944 - DNA, 732 bp, Homo sapiens
aacggggtttcaccatgttggccaggctagtctcagacttctgacctcaagtgatctgccagccttggcctccaaagtgctcggattacaggcgcgagccaccttgcccagccaagacttttttatcaggacaaaggattgtgcatttaaactatttcactagaactgggtggtggttttgctctctttcttctgggtgaattggatttgcaggttatgctgttgagtgatgacgcatagctgcttttgctccattttccccagatgacttggtaaattctccgtgaatgactctgctacataacctagataacctaagtgtgtcctttaaatgcatgtaagccagaagatgtatgttactttgaaaacataagtaacaaaattttgaatgtattgctaaagagatgtctctctgaagctcttttgatgtttggtgtcttgtccttcttattaaaccatatcttagtaaatagtttggtacgaatggatttatcactgagcaggtctgcaaaataattaatcggtaccgttttgtttctgttgatagaaataaaagagactgatggaagctctcagatcaagcaagaaccagaccccacgtggtagacctcttccctcctaggagggtaaatcagcttctgtgtcagggatgctgtgtggcgtccatctgaaccccctgcatacgcgtagctaatgtgatctccccactttcacataagatggtggccctgc

SEQ ID NO: 452945 - DNA, 434 bp, Homo sapiens
aatgaaaatagtcacttatttactcttcataaaatggcttaccagtcatgggaaggaaaagtcagggtcttttgtccacaacactaggaattattgtgttacaggatgattctgtgaatgcctttagaaaaaaaaaccctgatcacatcacgaccgttttactagctgtgaggccaccactgtactggctactgtaacacttcttggttttctttctagacctgaactagttatttcctacttgcctcctgggatggctagtaaaataaacactaaaggtaagagactacgtgtactccgtatcctatttgagcgcattaagacactctttatccgcattccttaaatcatacggaatcggccaatatctctgtggggcttggagttgtttactttgctttctaaggtattttatttaatggaactatttttct

SEQ ID NO: 452946 - DNA, 3648 bp, Homo sapiens
agtggcaagttgtttgttacagcgaacaccagctgctccccgcgccgggcgccgcgcgccgctgctccgccgctcggcccctcggctgctgctccgccggcgctgcctccctcgccccgcggctcccccttgcaacttggcgggcctcctcccttttgtccggcccggcccggccgccgccgccccccgcgcccggcgccgagctcccgggtctccgggccggctgtcggtgccggcagggcgcggagggggcgggggccgcggctcgtccccccgcggatgagccgccgcggacggggcgcgggcggacgatggaactccacatcctggagcaccggctgcaagttgccagcgtcgccaaggagagtatcccgctgttcacctacggcctgatcaaacttgccttcctgtcctccaagaccagatgatgattattctccaccgtctaagagaccaaaggccaatgagctaccgcagccaccagtcccggaacccgccaatgctgggaagcggaaagtgagggagttcaacttcgagaaatggaatgctcgcatcactgatctacgtaaacaagttgaagaattgtttgaaaggaaatatgctcaagccataaaagccaaaggtccggtgacgatcccgtaccctcttttctagtctcatgttgaagatctttatgtagaaggacttcctgaaggaattccttttagaaggccatctacttacggaattcctcgcctggagaggatattacttgcaaaggaaaggattcgttttgtgattaagaaacatgagcttctgagttcaacacgtgaagatttacagcttgataagccagcttcaggagtaaaggaagaatggtatgccagaatcactaaattaagaaagatggtggatcagcttttctgcaaaaaatttgcggaagccttggggagcactgaagccaaggctgtaccgtaccaaaaatttgaggcacacccgaatgatctgtacgtggaaggactgccagaaaacattcctttccgaagtccctcatggtatggaatcccaaggctggaaaaaatcattcaagtgggcaatcgaattaaatttgttattaaaagaccagaacttctgactcacagtaccactgaagttactcagccaagaacgaatacaccagtcaaagaagattggaatgtcagaattaccaagctacggaagcaagtggaagagatttttaatttgaaatttgctcaagctcttggactcaccgaggcagtaaaagtaccatatcctgtgtttgaatcaaacccggagttcttgtatgtggaaggcttgccagaggggattcccttccgaagccctacctggtttggaattccacgacttgaaaggatcgtccacgggagtaataaaatcaagttcgttgttaaaaaacctgaactagttatttcctacttgcctcctgggatggctagtaaaataaacactaaagctttgcagtcccccaaaagaccacgaagtcctgggagtaattcaaaggttcctgaaattgaggtcaccgtggaaggccctaataacaacaatcctcaaacctcagctgttcgaaccccgacccagactaacggttctaacgttcccttcaagccacgagggagagagttttcctttgaggcctggaatgccaaaatcacggacctaaaacagaaagttgaaaatctcttcaatgagaaatgtggggaagctcttggccttaaacaagctgtgaaggtgccgttcgcgttatttgagtctttcccggaagacttttatgtggaaggcttacctgagggtgtgccattccgaagaccatcgacttttggcattccgaggctggagaagatactcagaaacaaagccaaaattaagttcatcattaaaaagcccgaaatgtttgagacggcgattaaggagagcacctcctctaagagccctcccagaaaaataaattcatcacccaatgttaatactactgcatcaggtgttgaagaccttaacatcattcaggtgacaattccagatgatgataatgaaagactctcgaaagttgaaaaagctagacagctaagagaacaagtgaatgacctctttagtcggaaatttggtgaagctattggtatgggttttcctgtgaaagttccctacaggaaaatcacaattaaccctggctgtgtggtggttgatggcatgcccccgggggtgtccttcaaagcccccagctacctggaaatcagctccatgagaaggatcttagactctgccgagtttatcaaattcacggtcattagaccatttccaggacttgtgattaataaccagctggttgatcagagtgagtcaaaaggccccgtgatacaagaatcagctgaaccaagccagttggaagttccagccacagaagaaataaaagagactgatggaagctctcagatcaagcaagaaccagaccccacgtggtagacctcttccctcctaggcttaaagtatcagtggttgagaagagcttttcggacctgttactacccccaagctgtgtaatatacttgtataacagaaataccttcctatacaaacctttttttcctacttttagatagaaatgtcctactttttcagcagttctgtgaattaaagagcagagtgactgtgggtctggaatggctggtgtacttgggaatgtactatcaggattttacagcaatgctgggaaatgacagggaaaatgacaggaatgaatctcaccagattttttatgtactcagcagagccttgagttacggtgtttattttccaatcaagtgaagatatctcctacttctcctactggaacatctcagcttctgcagtgaagaaaaattcctgtgatagttcagttctttagtttttctatttgaaaaaaaaaaatcatttaaatgatcctttgttcacggctctccttaatgactgagtgaacagttcctatctgtatatttgactaaaccttttcctaagctatctctcatggttcctatgtttttttatcataattaaaagcaaaaccatctggatcacctaacagtcagaggtcagtatctcagcgtgtgaattatagaggaaatacagagagaacctcttccacttttacttttcgtccaaataaaatgcatggtgtaccagaagttgaagatcgggttgaggattggggctagctcgatgacactaaggccccaacatcgcgggacctgctgtggcgcggattcttaggaacgctgttctagccggccccctctccaggggtcgccgtggccggcattatttcctagttcttcttgtaaccctgaggtgccagcgcggggagtgaggaggggtcagggggctaaggatgcaacctctgacgttctgcgccttcctaggagagtcttacatgtgttgagatttcacaagcaatgcgagttgtaaaataccagctctacaagaagctaggctctgtgacggcatagttttcagtagctttatcacaatattcacaatggagaattatatgacatggtagcagaaataggcccttttatgtgttgcttctattttacctcaaattgtagatatagggtaatcaataaaatccatccatgcctttcacacactaagtca

SEQ ID NO: 452947 - DNA, 4344 bp, Homo sapiens
agtggcaagttgtttgttacagcgaacaccagctgctccccgcgccgggcgccgcgcgccgctgctccgccgctcggcccctcggctgctgctccgccggcgctgcctccctcgccccgcggctcccccttgcaacttggcgggcctcctcccttttgtccggcccggcccggccgccgccgccccccgcgcccggcgccgagctcccgggtctccgggccggctgtcggtgccggcagggcgcggagggggcgggggccgcggctcgtccccccgcggatgagccgccgcggacggggcgcgggcggacgatggaactccacatcctggagcaccggctgcaagttgccagcgtcgccaaggagagtatcccgctgttcacctacggcctgatcaaacttgccttcctgtcctccaagaccagatgatgattattctccaccgtctaagagaccaaaggccaatgagctaccgcagccaccagtcccggaacccgccaatgctgggaagcggaaagtgagggagttcaacttcgagaaatggaatgctcgcatcactgatctacgtaaacaagttgaagaattgtttgaaaggaaatatgctcaagccataaaagccaaaggtccggtgacgatcccgtaccctcttttctagtctcatgttgaagatctttatgtagaaggacttcctgaaggaattccttttagaaggccatctacttacggaattcctcgcctggagaggatattacttgcaaaggaaaggattcgttttgtgattaagaaacatgagcttctgagttcaacacgtgaagatttacagcttgataagccagcttcaggagtaaaggaagaatggtatgccagaatcactaaattaagaaagatggtggatcagcttttctgcaaaaaatttgcggaagccttggggagcactgaagccaaggctgtaccgtaccaaaaatttgaggcacacccgaatgatctgtacgtggaaggactgccagaaaacattcctttccgaagtccctcatggtatggaatcccaaggctggaaaaaatcattcaagtgggcaatcgaattaaatttgttattaaaagaccagaacttctgactcacagtaccactgaagttactcagccaagaacgaatacaccagtcaaagaagattggaatgtcagaattaccaagctacggaagcaagtggaagagatttttaatttgaaatttgctcaagctcttggactcaccgaggcagtaaaagtaccatatcctgtgtttgaatcaaacccggagttcttgtatgtggaaggcttgccagaggggattcccttccgaagccctacctggtttggaattccacgacttgaaaggatcgtccacgggagtaataaaatcaagttcgttgttaaaaaacctgaactagttatttcctacttgcctcctgggatggctagtaaaataaacactaaagctttgcagtcccccaaaagaccacgaagtcctgggagtaattcaaaggttcctgaaattgaggtcaccgtggaaggccctaataacaacaatcctcaaacctcagctgttcgaaccccgacccagactaacggttctaacgttcccttcaagccacgagggagagagttttcctttgaggcctggaatgccaaaatcacggacctaaaacagaaagttgaaaatctcttcaatgagaaatgtggggaagctcttggccttaaacaagctgtgaaggtgccgttcgcgttatttgagtctttcccggaagacttttatgtggaaggcttacctgagggtgtgccattccgaagaccatcgacttttggcattccgaggctggagaagatactcagaaacaaagccaaaattaagttcatcattaaaaagcccgaaatgtttgagacggcgattaaggagagcacctcctctaagagccctcccagaaaaataaattcatcacccaatgttaatactactgcatcaggtgttgaagaccttaacatcattcaggtgacaattccagatgatgataatgaaagactctcgaaagttgaaaaagctagacagctaagagaacaagtgaatgacctctttagtcggaaatttggtgaagctattggtatgggttttcctgtgaaagttccctacaggaaaatcacaattaaccctggctgtgtggtggttgatggcatgcccccgggggtgtccttcaaagcccccagctacctggaaatcagctccatgagaaggatcttagactctgccgagtttatcaaattcacggtcattagaccatttccaggacttgtgattaataaccagctggttgatcagagtgagtcaaaaggccccgtgatacaagaatcagctgaaccaagccagttggaagttccagccacagaagaaataaaagagactgatggaagctctcagatcaagcaagaaccagaccccacgtggtagacctcttccctcctaggagggtaaatcagcttctgtgtcagggatgctgtgtggcgtccatctgaaccccctgcatacgcgtagctaatgtgatctccccactttcacataagatggtggccctgccttcagggaatgtgggagccaggtgggagccttcccggatatttaagctagaagattctacagggagattctccttggatcaatatatgtctctcagtcaaagatgtaaaagcacttttgccttaaaaagaatgttctgtttctaaatagagtcaacgttgtcctcctcattggaattcactatgagtcagaatcattagactgacttttttttttccatagtaatagtattttgcagagtctcacagagctgcagatcttttgttcatcttgcagagttaacaagtctgatcctgttagtccagatttcttaaatttggccaagttataataggagcagtagcttgagacccgaagtcaggaaactttgacaatggattttttttttttaatccagagacttgtactggaatttgccttaccctgtcagctcatggacttaaggtttcatcccgctttatgagtgcttctgaatccaagtcattgttacctgaatttgcaaattaagttgtgatattcgtgactgttaaattcctgtaattagattaacctctttgcttgcttgtttgttttctctcctattttagcttaaagtatcagtggttgagaagagcttttcggacctgttactacccccaagctgtgtaatatacttgtataacagaaataccttcctatacaaacctttttttcctacttttagatagaaatgtcctactttttcagcagttctgtgaattaaagagcagagtgactgtgggtctggaatggctggtgtacttgggaatgtactatcaggattttacagcaatgctgggaaatgacagggaaaatgacaggaatgaatctcaccagattttttatgtactcagcagagccttgagttacggtgtttattttccaatcaagtgaagatatctcctacttctcctactggaacatctcagcttctgcagtgaagaaaaattcctgtgatagttcagttctttagtttttctatttgaaaaaaaaaaatcatttaaatgatcctttgttcacggctctccttaatgactgagtgaacagttcctatctgtatatttgactaaaccttttcctaagctatctctcatggttcctatgtttttttatcataattaaaagcaaaaccatctggatcacctaacagtcagaggtcagtatctcagcgtgtgaattatagaggaaatacagagagaacctcttccacttttacttttcgtccaaataaaatgcatggtgtaccagaagttgaagatcgggttgaggattggggctagctcgatgacactaaggccccaacatcgcgggacctgctgtggcgcggattcttaggaacgctgttctagccggccccctctccaggggtcgccgtggccggcattatttcctagttcttcttgtaaccctgaggtgccagcgcggggagtgaggaggggtcagggggctaaggatgcaacctctgacgttctgcgccttcctaggagagtcttacatgtgttgagatttcacaagcaatgcgagttgtaaaataccagctctacaagaagctaggctctgtgacggcatagttttcagtagctttatcacaatattcacaatggagaattatatgacatggtagcagaaataggcccttttatgtgttgcttctattttacctcaaattgtagatatagggtaatcaataaaatccatccatgcctttcacacactaagtca

SEQ ID NO: 452948 - DNA, 4092 bp, Homo sapiens
agtggcaagttgtttgttacagcgaacaccagctgctccccgcgccgggcgccgcgcgccgctgctccgccgctcggcccctcggctgctgctccgccggcgctgcctccctcgccccgcggctcccccttgcaacttggcgggcctcctcccttttgtccggcccggcccggccgccgccgccccccgcgcccggcgccgagctcccgggtctccgggccggctgtcggtgccggcagggcgcggagggggcgggggccgcggctcgtccccccgcggatgagccgccgcggacggggcgcgggcggacgatggaactccacatcctggagcaccggctgcaagttgccagcgtcgccaaggagagtatcccgctgttcacctacggcctgatcaaacttgccttcctgtcctccaagaccagatgatgattattctccaccgtctaagagaccaaaggccaatgagctaccgcagccaccagtcccggaacccgccaatgctgggaagcggaaagtgagggagttcaacttcgagaaatggaatgctcgcatcactgatctacgtaaacaagttgaagaattgtttgaaaggaaatatgctcaagccataaaagccaaaggtccggtgacgatcccgtaccctcttttctagtctcatgttgaagatctttatgtagaaggacttcctgaaggaattccttttagaaggccatctacttacggaattcctcgcctggagaggatattacttgcaaaggaaaggattcgttttgtgattaagaaacatgagcttctgagttcaacacgtgaagatttacagcttgataagccagcttcaggagtaaaggaagaatggtatgccagaatcactaaattaagaaagatggtggatcagcttttctgcaaaaaatttgcggaagccttggggagcactgaagccaaggctgtaccgtaccaaaaatttgaggcacacccgaatgatctgtacgtggaaggactgccagaaaacattcctttccgaagtccctcatggtatggaatcccaaggctggaaaaaatcattcaagtgggcaatcgaattaaatttgttattaaaagaccagaacttctgactcacagtaccactgaagttactcagccaagaacgaatacaccagtcaaagaagattggaatgtcagaattaccaagctacggaagcaagtggaagagatttttaatttgaaatttgctcaagctcttggactcaccgaggcagtaaaagtaccatatcctgtgtttgaatcaaacccggagttcttgtatgtggaaggcttgccagaggggattcccttccgaagccctacctggtttggaattccacgacttgaaaggatcgtccacgggagtaataaaatcaagttcgttgttaaaaaacctgaactagttatttcctacttgcctcctgggatggctagtaaaataaacactaaagctttgcagtcccccaaaagaccacgaagtcctgggagtaattcaaaggttcctgaaattgaggtcaccgtggaaggccctaataacaacaatcctcaaacctcagctgttcgaaccccgacccagactaacggttctaacgttcccttcaagccacgagggagagagttttcctttgaggcctggaatgccaaaatcacggacctaaaacagaaagttgaaaatctcttcaatgagaaatgtggggaagctcttggccttaaacaagctgtgaaggtgccgttcgcgttatttgagtctttcccggaagacttttatgtggaaggcttacctgagggtgtgccattccgaagaccatcgacttttggcattccgaggctggagaagatactcagaaacaaagccaaaattaagttcatcattaaaaagcccgaaatgtttgagacggcgattaaggagagcacctcctctaagagccctcccagaaaaataaattcatcacccaatgttaatactactgcatcaggtgttgaagaccttaacatcattcaggtgacaattccagatgatgataatgaaagactctcgaaagttgaaaaagctagacagctaagagaacaagtgaatgacctctttagtcggaaatttggtgaagctattggtatgggttttcctgtgaaagttccctacaggaaaatcacaattaaccctggctgtgtggtggttgatggcatgcccccgggggtgtccttcaaagcccccagctacctggaaatcagctccatgagaaggatcttagactctgccgagtttatcaaattcacggtcattagaccatttccaggacttgtgattaataaccagctggttgatcagagtgaccaccttgcccagccaagacttttttatcaggacaaaggattgtgcatttaaactatttcactagaactgggtggtggttttgctctctttcttctgggtgaattggatttgcaggttatgctgttgagtgatgacgcatagctgcttttgctccattttccccagatgacttggtaaattctccgtgaatgactctgctacataacctagataacctaagtgtgtcctttaaatgcatgtaagccagaagatgtatgttactttgaaaacataagtaacaaaattttgaatgtattgctaaagagatgtctctctgaagctcttttgatgtttggtgtcttgtccttcttattaaaccatatcttagtaaatagtttggtacgaatggatttatcactgagcaggtctgcaaaataattaatcggtaccgttttgtttctgttgatagaaataaaagagactgatggaagctctcagatcaagcaagaaccagaccccacgtggtagacctcttccctcctaggagggtaaatcagcttctgtgtcagggatgctgtgtggcgtccatctgaaccccctgcatacgcgtagctaatgtgatctccccactttcacataagatggtggccctgccttcagggaatgtgggagccaggtgggagccttcccggatatttaagctagaagattctacagggagattctccttggatcaatatatgtctctcagtcaaagatgtaaaagcacttttgccttaaaaagaatgttctgtttctaaatagagtcaacgttgtcctcctcattggaattcactatgagtcagaatcattagactgacttttttttttccatagtaatagtattttgcagagtctcacagagctgcagatcttttgttcatcttgcagagttaacaagtctgatcctgttagtccagatttcttaaatttggccaagttataataggagcagtagcttgagacccgaagtcaggaaactttgacaatggattttttttttttaatccagagacttgtactggaatttgccttaccctgtcagctcatggacttaaggtttcatcccgctttatgagtgcttctgaatccaagtcattgttacctgaatttgcaaattaagttgtgatattcgtgactgttaaattcctgtaattagattaacctctttgcttgcttgtttgttttctctcctattttagcttaaagtatcagtggttgagaagagcttttcggacctgttactacccccaagctgtgtaatatacttgtataacagaaataccttcctatacaaacctttttttcctacttttagatagaaatgtcctactttttcagcagttctgtgaattaaagagcagagtgactgtgggtctggaatggctggtgtacttgggaatgtactatcaggattttacagcaatgctgggaaatgacagggaaaatgacaggaatgaatctcaccagattttttatgtactcagcagagccttgagttacggtgtttattttccaatcaagtgaagatatctcctacttctcctactggaacatctcagcttctgcagtgaagaaaaattcctgtgatagttcagttctttagtttttctatttgaaaaaaaaaaatcatttaaatgatcctttgttcacggctctccttaatgactgagtgaacagttcctatctgtatatttgactaaaccttttcctaagcta

SEQ ID NO: 452949 - DNA, 3012 bp, Homo sapiens
agtggcaagttgtttgttacagcgaacaccagctgctccccgcgccgggcgccgcgcgccgctgctccgccgctcggcccctcggctgctgctccgccggcgctgcctccctcgccccgcggctcccccttgcaacttggcgggcctcctcccttttgtccggcccggcccggccgccgccgccccccgcgcccggcgccgagctcccgggtctccgggccggctgtcggtgccggcagggcgcggagggggcgggggccgcggctcgtccccccgcggatgagccgccgcggacggggcgcgggcggacgatggaactccacatcctggagcaccggctgcaagttgccagcgtcgccaaggagagtatcccgctgttcacctacggcctgatcaaacttgccttcctgtcctccaagaccagatgatgattattctccaccgtctaagagaccaaaggccaatgagctaccgcagccaccagtcccggaacccgccaatgctgggaagcggaaagtgagggagttcaacttcgagaaatggaatgctcgcatcactgatctacgtaaacaagttgaagaattgtttgaaaggaaatatgctcaagccataaaagccaaaggtccggtgacgatcccgtaccctcttttctagtctcatgttgaagatctttatgtagaaggacttcctgaaggaattccttttagaaggccatctacttacggaattcctcgcctggagaggatattacttgcaaaggaaaggattcgttttgtgattaagaaacatgagcttctgagttcaacacgtgaagatttacagcttgataagccagcttcaggagtaaaggaagaatggtatgccagaatcactaaattaagaaagatggtggatcagcttttctgcaaaaaatttgcggaagccttggggagcactgaagccaaggctgtaccgtaccaaaaatttgaggcacacccgaatgatctgtacgtggaaggactgccagaaaacattcctttccgaagtccctcatggtatggaatcccaaggctggaaaaaatcattcaagtgggcaatcgaattaaatttgttattaaaagaccagaacttctgactcacagtaccactgaagttactcagccaagaacgaatacaccagtcaaagaagattggaatgtcagaattaccaagctacggaagcaagtggaagagatttttaatttgaaatttgctcaagctcttggactcaccgaggcagtaaaagtaccatatcctgtgtttgaatcaaacccggagttcttgtatgtggaaggcttgccagaggggattcccttccgaagccctacctggtttggaattccacgacttgaaaggatcgtccacgggagtaataaaatcaagttcgttgttaaaaaacctgaactagttatttcctacttgcctcctgggatggctagtaaaataaacactaaagctttgcagtcccccaaaagaccacgaagtcctgggagtaattcaaaggttcctgaaattgaggtcaccgtggaaggccctaataacaacaatcctcaaacctcagctgttcgaaccccgacccagactaacggttctaacgttcccttcaagccacgagggagagagttttcctttgaggcctggaatgccaaaatcacggacctaaaacagaaagttgaaaatctcttcaatgagaaatgtggggaagctcttggccttaaacaagctgtgaaggtgccgttcgcgttatttgagtctttcccggaagacttttatgtggaaggcttacctgagggtgtgccattccgaagaccatcgacttttggcattccgaggctggagaagatactcagaaacaaagccaaaattaagttcatcattaaaaagcccgaaatgtttgagacggcgattaaggagagcacctcctctaagagccctcccagaaaaataaattcatcacccaatgttaatactactgcatcaggtgttgaagaccttaacatcattcaggtgacaattccagatgatgataatgaaagactctcgaaagttgaaaaagctagacagctaagagaacaagtgaatgacctctttagtcggaaatttggtgaagctattggtatgggttttcctgtgaaagttccctacaggaaaatcacaattaaccctggctgtgtggtggttgatggcatgcccccgggggtgtccttcaaagcccccagctacctggaaatcagctccatgagaaggatcttagactctgccgagtttatcaaattcacggtcattagaccatttccaggacttgtgattaataaccagctggttgatcagagtgagtcaaaaggccccgtgatacaagaatcagctgaaccaagccagttggaagttccagccacagaagaaataaaagagactgatggaagctctcagatcaagcaagaaccagaccccacgtggtagacctcttccctcctaggcttaaagtatcagtggttgagaagagcttttcggacctgttactacccccaagctgtgtaatatacttgtataacagaaataccttcctatacaaacctttttttcctacttttagatagaaatgtcctactttttcagcagttctgtgaattaaagagcagagtgactgtgggtctggaatggctggtgtacttgggaatgtactatcaggattttacagcaatgctgggaaatgacagggaaaatgacaggaatgaatctcaccagattttttatgtactcagcagagccttgagttacggtgtttattttccaatcaagtgaagatatctcctacttctcctactggaacatctcagcttctgcagtgaagaaaaattcctgtgatagttcagttctttagtttttctatttgaaaaaaaaaaatcatttaaatgatcctttgttcacggctctccttaatgactgagtgaacagttcctatctgtatatttgactaaaccttttcctaagcta

SEQ ID NO: 452950 - DNA, 4032 bp, Homo sapiens
agtggcaagttgtttgttacagcgaacaccagctgctccccgcgccgggcgccgcgcgccgctgctccgccgctcggcccctcggctgctgctccgccggcgctgcctccctcgccccgcggctcccccttgcaacttggcgggcctcctcccttttgtccggcccggcccggccgccgccgccccccgcgcccggcgccgagctcccgggtctccgggccggctgtcggtgccggcagggcgcggagggggcgggggccgcggctcgtccccccgcggatgagccgccgcggacggggcgcgggcggacgatggaactccacatcctggagcaccggctgcaagttgccagcgtcgccaaggagagtatcccgctgttcacctacggcctgatcaaacttgccttcctgtcctccaagaccagatgatgattattctccaccgtctaagagaccaaaggccaatgagctaccgcagccaccagtcccggaacccgccaatgctgggaagcggaaagtgagggagttcaacttcgagaaatggaatgctcgcatcactgatctacgtaaacaagttgaagaattgtttgaaaggaaatatgctcaagccataaaagccaaaggtccggtgacgatcccgtaccctcttttctagtctcatgttgaagatctttatgtagaaggacttcctgaaggaattccttttagaaggccatctacttacggaattcctcgcctggagaggatattacttgcaaaggaaaggattcgttttgtgattaagaaacatgagcttctgagttcaacacgtgaagatttacagcttgataagccagcttcaggagtaaaggaagaatggtatgccagaatcactaaattaagaaagatggtggatcagcttttctgcaaaaaatttgcggaagccttggggagcactgaagccaaggctgtaccgtaccaaaaatttgaggcacacccgaatgatctgtacgtggaaggactgccagaaaacattcctttccgaagtccctcatggtatggaatcccaaggctggaaaaaatcattcaagtgggcaatcgaattaaatttgttattaaaagaccagaacttctgactcacagtaccactgaagttactcagccaagaacgaatacaccagtcaaagaagattggaatgtcagaattaccaagctacggaagcaagtggaagagatttttaatttgaaatttgctcaagctcttggactcaccgaggcagtaaaagtaccatatcctgtgtttgaatcaaacccggagttcttgtatgtggaaggcttgccagaggggattcccttccgaagccctacctggtttggaattccacgacttgaaaggatcgtccacgggagtaataaaatcaagttcgttgttaaaaaacctgaactagttatttcctacttgcctcctgggatggctagtaaaataaacactaaagctttgcagtcccccaaaagaccacgaagtcctgggagtaattcaaaggttcctgaaattgaggtcaccgtggaaggccctaataacaacaatcctcaaacctcagctgttcgaaccccgacccagactaacggttctaacgttcccttcaagccacgagggagagagttttcctttgaggcctggaatgccaaaatcacggacctaaaacagaaagttgaaaatctcttcaatgagaaatgtggggaagctcttggccttaaacaagctgtgaaggtgccgttcgcgttatttgagtctttcccggaagacttttatgtggaaggcttacctgagggtgtgccattccgaagaccatcgacttttggcattccgaggctggagaagatactcagaaacaaagccaaaattaagttcatcattaaaaagcccgaaatgtttgagacggcgattaaggagagcacctcctctaagagccctcccagaaaaataaattcatcacccaatgttaatactactgcatcaggtgttgaagaccttaacatcattcaggtgacaattccagatgatgataatgaaagactctcgaaagttgaaaaagctagacagctaagagaacaagtgaatgacctctttagtcggaaatttggtgaagctattggtatgggttttcctgtgaaagttccctacaggaaaatcacaattaaccctggctgtgtggtggttgatggcatgcccccgggggtgtccttcaaagcccccagctacctggaaatcagctccatgagaaggatcttagactctgccgagtttatcaaattcacggtcattagaccatttccaggacttgtgattaataaccagctggttgatcagagtgaccaccttgcccagccaagacttttttatcaggacaaaggattgtgcatttaaactatttcactagaactgggtggtggttttgctctctttcttctgggtgaattggatttgcaggttatgctgttgagtgatgacgcatagctgcttttgctccattttccccagatgacttggtaaattctccgtgaatgactctgctacataacctagataacctaagtgtgtcctttaaatgcatgtaagccagaagatgtatgttactttgaaaacataagtaacaaaattttgaatgtattgctaaagagatgtctctctgaagctcttttgatgtttggtgtcttgtccttcttattaaaccatatcttagtaaatagtttggtacgaatggatttatcactgagcaggtctgcaaaataattaatcggtaccgttttgtttctgttgatagaaataaaagagactgatggaagctctcagatcaagcaagaaccagaccccacgtggtagacctcttccctcctaggcttaaagtatcagtggttgagaagagcttttcggacctgttactacccccaagctgtgtaatatacttgtataacagaaataccttcctatacaaacctttttttcctacttttagatagaaatgtcctactttttcagcagttctgtgaattaaagagcagagtgactgtgggtctggaatggctggtgtacttgggaatgtactatcaggattttacagcaatgctgggaaatgacagggaaaatgacaggaatgaatctcaccagattttttatgtactcagcagagccttgagttacggtgtttattttccaatcaagtgaagatatctcctacttctcctactggaacatctcagcttctgcagtgaagaaaaattcctgtgatagttcagttctttagtttttctatttgaaaaaaaaaaatcatttaaatgatcctttgttcacggctctccttaatgactgagtgaacagttcctatctgtatatttgactaaaccttttcctaagctatctctcatggttcctatgtttttttatcataattaaaagcaaaaccatctggatcacctaacagtcagaggtcagtatctcagcgtgtgaattatagaggaaatacagagagaacctcttccacttttacttttcgtccaaataaaatgcatggtgtaccagaagttgaagatcgggttgaggattggggctagctcgatgacactaaggccccaacatcgcgggacctgctgtggcgcggattcttaggaacgctgttctagccggccccctctccaggggtcgccgtggccggcattatttcctagttcttcttgtaaccctgaggtgccagcgcggggagtgaggaggggtcagggggctaaggatgcaacctctgacgttctgcgccttcctaggagagtcttacatgtgttgagatttcacaagcaatgcgagttgtaaaataccagctctacaagaagctaggctctgtgacggcatagttttcagtagctttatcacaatattcacaatggagaattatatgacatggtagcagaaataggcccttttatgtgttgcttctattttacctcaaattgtagatatagggtaatcaataaaatccatccatgcctttcacacactaagtca

SEQ ID NO: 452951 - DNA, 3121 bp, Homo sapiens
agtggcaagttgtttgttacagcgaacaccagctgctccccgcgccgggcgccgcgcgccgctgctccgccgctcggcccctcggctgctgctccgccggcgctgcctccctcgccccgcggctcccccttgcaacttggcgggcctcctcccttttgtccggcccggcccggccgccgccgccccccgcgcccggcgccgagctcccgggtctccgggccggctgtcggtgccggcagggcgcggagggggcgggggccgcggctcgtccccccgcggatgagccgccgcggacggggcgcgggcggacgatggaactccacatcctggagcaccggctgcaagttgccagcgtcgccaaggagagtatcccgctgttcacctacggcctgatcaaacttgccttcctgtcctccaagaccagatgatgattattctccaccgtctaagagaccaaaggccaatgagctaccgcagccaccagtcccggaacccgccaatgctgggaagcggaaagtgagggagttcaacttcgagaaatggaatgctcgcatcactgatctacgtaaacaagttgaagaattgtttgaaaggaaatatgctcaagccataaaagccaaaggtccggtgacgatcccgtaccctcttttctagtctcatgttgaagatctttatgtagaaggacttcctgaaggaattccttttagaaggccatctacttacggaattcctcgcctggagaggatattacttgcaaaggaaaggattcgttttgtgattaagaaacatgagcttctgagttcaacacgtgaagatttacagcttgataagccagcttcaggagtaaaggaagaatggtatgccagaatcactaaattaagaaagatggtggatcagcttttctgcaaaaaatttgcggaagccttggggagcactgaagccaaggctgtaccgtaccaaaaatttgaggcacacccgaatgatctgtacgtggaaggactgccagaaaacattcctttccgaagtccctcatggtatggaatcccaaggctggaaaaaatcattcaagtgggcaatcgaattaaatttgttattaaaagaccagaacttctgactcacagtaccactgaagttactcagccaagaacgaatacaccagtcaaagaagattggaatgtcagaattaccaagctacggaagcaagtggaagagatttttaatttgaaatttgctcaagctcttggactcaccgaggcagtaaaagtaccatatcctgtgtttgaatcaaacccggagttcttgtatgtggaaggcttgccagaggggattcccttccgaagccctacctggtttggaattccacgacttgaaaggatcgtccacgggagtaataaaatcaagttcgttgttaaaaaacctgaactagttatttcctacttgcctcctgggatggctagtaaaataaacactaaagctttgcagtcccccaaaagaccacgaagtcctgggagtaattcaaaggttcctgaaattgaggtcaccgtggaaggccctaataacaacaatcctcaaacctcagctgttcgaaccccgacccagactaacggttctaacgttcccttcaagccacgagggagagagttttcctttgaggcctggaatgccaaaatcacggacctaaaacagaaagttgaaaatctcttcaatgagaaatgtggggaagctcttggccttaaacaagctgtgaaggtgccgttcgcgttatttgagtctttcccggaagacttttatgtggaaggcttacctgagggtgtgccattccgaagaccatcgacttttggcattccgaggctggagaagatactcagaaacaaagccaaaattaagttcatcattaaaaagcccgaaatgtttgagacggcgattaaggagagcacctcctctaagagccctcccagaaaaataaattcatcacccaatgttaatactactgcatcaggtgttgaagaccttaacatcattcaggtgacaattccagatgatgataatgaaagactctcgaaagttgaaaaagctagacagctaagagaacaagtgaatgacctctttagtcggaaatttggtgaagctattggtatgggttttcctgtgaaagttccctacaggaaaatcacaattaaccctggctgtgtggtggttgatggcatgcccccgggggtgtccttcaaagcccccagctacctggaaatcagctccatgagaaggatcttagactctgccgagtttatcaaattcacggtcattagaatcagctgaaccaagccagttggaagttccagccacagaagcaacataaacagcagactgatggcacgctctcagcatcaagtctaatgaacccaggaccccacagatggtaagaacttcttccctcctagggtaaactccagctacatgtgtcacgggaatgctcgtgctgcgtgtcccatcatcgaaacacccactgacaacaacagccagcaacgccataaacagtcgaatctacaacaccaaattccaccacgtaacagcactggatggccccatgcccataagcagcgggcacactgcaagagcgaagcccccaacagaagggacgaagcacacactagccacacgcgaactaagtacagacacagccaccaaggaaaacgcacacacgtaacaccggggaacccaacaaccaaccatagagaccaaccaaacaacacataattggctccaacccataccacgcatacaaccaacagcaagtcgacacacacaccaagcccacactcacaactaggccgcccacacaaaaacaaacacgcaaaacctagccaaacaaagcgacaaccaccacacaccctacagcaacgctacacaccagagagaactgccacacaaaccccaataaccacataaggagcaaacatacaccacccacacctacgaacagtacacagaacaacaacacagaaccgacaaacccagccgacaccaaaaacaagaaaaccaaaaaaagaaaaaaaacagcgacagcaccaagcaaacacacagcgcaaacacaaccacgaccagcaccaccagcgcagaaact

SEQ ID NO: 452952 - DNA, 4112 bp, Homo sapiens
  misc_feature (3)..(5): n is a, c, g, or t
  misc_feature (10)..(11): n is a, c, g, or t
  misc_feature (14)..(16): n is a, c, g, or t
gannncggcnncgnnnggcggcggcggcggcggcggcagctgcggcgggagaagatggtggcgctggaggcagcagcggctggagcggagctttattcccaggcttggcaccagcgctgtcactagcgccgcctgctcccgcgggcccgcggacccagctgtcaggcaagcccagtggagcaaaatgagagcgcagtgagccgggcccagcttctctcctagccgttccgactcccaccatgaaccacttggaggggtctgcggaggtggaggtgaccgacgaggcggcaggtggggaggtgaacgagtcggtggaggccgacctggagcaccccgaggtggaagaggaacagcagcagccgccgcagcagcagcactatgtgggccgccaccagcgcgggcgagccctcgaggacctccgcgcccagctcggccaggaggaagaggagcgcggggaatgcctggcgcgctcagccagcacggagagcggcttccacaaccacacggacaccgccgagggcgacgtgatcgccgcggcccgcgacggctacgatgcggagcgcgcgcaggaccccgaggacgagagcgcctatgctgtgcagtaccggcccgaggccgaggagtacacggagcaggcagaggccgagcacgccgaggccacgcaccgccgcgcgctgcccaaccacctgcacttccactcgctggagcacgaggaagccatgaatgcggcctactcaggctacgtctacacgcaccggctcttccaccgcggtgaggacgagccctactccgagccctatgccgactacggcggcctccaggagcacgtgtacgaggagataggggacgcgcccgagctggacgcacgcgacggcctgcggctctacgagcaggagcgcgacgaggcggccgcgtaccgccaggaggccctgggcgcgcggctgcaccattacgacgagcgctccgacggcgagtccgacagccccgagaaggaggccgagttcgcgccctacccgcgcatggacagctacgagcaggaggaggacatcgaccagatagtggccgaggtgaagcagagcatgagctcgcagagcctcgacaaggcagccgaggacatgcctgaggccgagcaggacctggagcgtccccctaccccggccgggggtcgccccgacagccccgggctgcaggcgccggcggggcagcagcgggcggtgggccccgcgggcggcggcgaggcggggcagcggtacagcaaggagaagcgcgatgccatctcgctggccatcaaggacatcaaggaggccatcgaggaggtgaaaaccaggaccatccgttcgccttacacccccgacgagcccaaagagcccatctgggtcatgcgccaggacattagccccaccagggactgtgacgaccagaggccgatggacggagattctccgtctcctggcagctcctcccccttgggtgcagagtcatcaagcacatctcttcaccccagtgaccctgtggaagcgcccactaataaagagtcaagaaaaagcttggcttcattcccaacctacgttgaagttccgggaccctgcgaccccgaagacttgatcgatggaatcatttttgccgccaattaccttggctccactcagctgctctcagacaaaactccttccaaaaacgtgcgcatgatgcaggcccaggaagccgtaagcaggatcaagatggcccagaaattagccaaaagcaggaagaaggctcctgaaggcgaatctcagccaatgactgaagtggatctcttcatttctacccagagaatcaaagtgctgaacgccgacacacaggagacaatgatggaccaccctctgaggaccatttcctacattgcggacattgggaacatcgttgtgctgatggcccgccggcggatgcctcgctccaactcccaggagaacgtggaagcgtcccacccatcccaggatgggaaaaggcagtacaagatgatctgccacgtcttcgagtctgaggatgctcagctgattgcacagtccatcggacaggcatttagcgtggcataccaggaattcctcagggccaatgggattaaccccgaagatctcagccagaaggagtatagtgacctgctcaatacccaggacatgtacaacgatgacctgatccacttctccaagtcggaaaactgtaaagatgttttcatagagaagcagaaaggagaaatcctaggtgtggtgattgtggagtctggctggggatccatcctccccaccgtgatcattgccaacatgatgcatggtggccctgcggagaaatctgggaagctgaatatcggtgaccagatcatgtccattaatggcaccagcctggtgggcctgcctctgtccacctgccagagcattattaagggcttagagaatcagtcccgagtcaagctgaatatcgtgagatgtcctccggtgaccaccgtgttaatcagaagaccagaccttcgctaccagctcggtttcagcgtccagaatggaattatctgcagcctcatgcgagggggaatagctgagagaggaggcgtccgtgtggggcaccggatcattgaaatcaatggacagagcgtcgtggccaccccccacgagaagatcgtccacattctctccaatgctgttggggagattcatatgaagacaatgccagccgcgatgtacaggctgctgacggcccaggagcagcctgtttacatctgaccgcggccacacgcggtggcatgcatggaggactctcctcttcgtggttgtgtttctcgtgctgcatccctgtgtccactgagactttcccctctcgcgcccagcatttggttttacacaggaagagaagaatccacaaggacctctttactctctccgatttgctttttttttttttttttttcaataccagggaagtttcgtatgcactcccttgaggatggagagcagccagcacccacctggtactgacccaggaccatcctggagggctttctgggtgtgtccagggggtgggctgtcactgcttgagggagaatcctcccttcccaggaggtgcagacttcttaaaaggagctcgcggggcagcaaagcagctgattcagcagtgcctaaaacccagttgctgatccctgctctctgagtttatctgtgggaatgtggtagtacccagggccagcccacgtcattaaggttatgcactgcctgccatgtagttggggcaccatacattatttcttcccagaatctctgagccaaccttaaacctcttctattgctagttctaatttcaacgtatgtgtgttttctaatacgagccttctcaccccaggataaaaggggaaataactgccttgggcaaggacaccatagtgtcacagagagcttggcaattcatggggcatctgaagctttaccaggttgtcctcaagttatcaaccattagataaacacaggcaggtactgtctgcttctctctctctcacacacacacacacacacacagtcccattcggatatcacccttccctgctcccaccaccagtgagacaagctgaagattaggcacacagatcccctggaaacccacctctctggaaggtcccttccctggcaggtggtcaggcaggcgggggctgttcagcctcatcctgagagacctgtcctctctgtgctgaggtccagcccctccagcaccactttggcttatcgtatcctcctcctggacttcccctctctgccgaacacacatcccaggagtctgggaaggagggactgttcccaagaaggcaagctgcaggtgcaattgcgtcttgttttctggcccaaggcaagaccaactttcttctctgctcagggccactaggcggatgtgatattggaaaggccagaatagtacataaaccacaaaattaaggagacaatagcaacctcaagttatgcctcagaatccccagatgtggtccataaacaccctcttgctgccttgtgggcctgagagcatttttggctggtgtggaattgttccgtgttttcatcaggtgccgatgatagcggggatcctctgacagcctcccg

SEQ ID NO: 452953 - DNA, 4079 bp, Homo sapiens
  misc_feature (3)..(5): n is a, c, g, or t
  misc_feature (10)..(11): n is a, c, g, or t
  misc_feature (14)..(16): n is a, c, g, or t
gannncggcnncgnnnggcggcggcggcggcggcggcagctgcggcgggagaagatggtggcgctggaggcagcagcggctggagcggagctttattcccaggcttggcaccagcgctgtcactagcgccgcctgctcccgcgggcccgcggacccagctgtcaggcaagcccagtggagcaaaatgagagcgcagtgagccgggcccagcttctctcctagccgttccgactcccaccatgaaccacttggaggggtctgcggaggtggaggtgaccgacgaggcggcaggtggggaggtgaacgagtcggtggaggccgacctggagcaccccgaggtggaagaggaacagcagcagccgccgcagcagcagcactatgtgggccgccaccagcgcgggcgagccctcgaggacctccgcgcccagctcggccaggaggaagaggagcgcggggaatgcctggcgcgctcagccagcacggagagcggcttccacaaccacacggacaccgccgagggcgacgtgatcgccgcggcccgcgacggctacgatgcggagcgcgcgcaggaccccgaggacgagagcgcctatgctgtgcagtaccggcccgaggccgaggagtacacggagcaggcagaggccgagcacgccgaggccacgcaccgccgcgcgctgcccaaccacctgcacttccactcgctggagcacgaggaagccatgaatgcggcctactcaggctacgtctacacgcaccggctcttccaccgcggtgaggacgagccctactccgagccctatgccgactacggcggcctccaggagcacgtgtacgaggagataggggacgcgcccgagctggacgcacgcgacggcctgcggctctacgagcaggagcgcgacgaggcggccgcgtaccgccaggaggccctgggcgcgcggctgcaccattacgacgagcgctccgacggcgagtccgacagccccgagaaggaggccgagttcgcgccctacccgcgcatggacagctacgagcaggaggaggacatcgaccagatagtggccgaggtgaagcagagcatgagctcgcagagcctcgacaaggcagccgaggacatgcctgaggccgagcaggacctggagcgtccccctaccccggccgggggtcgccccgacagccccgggctgcaggcgccggcggggcagcagcgggcggtgggccccgcgggcggcggcgaggcggggcagcggtacagcaaggagaagcgcgatgccatctcgctggccatcaaggacatcaaggaggccatcgaggaggtgaaaaccaggaccatccgttcgccttacacccccgacgagcccaaagagcccatctgggtcatgcgccaggacattagccccaccagggactgtgacgaccagaggccgatggacggagattctccgtctcctggcagctcctcccccttgggtgcagagtcatcaagcacatctcttcaccccagtgaccctgtggaagcgcccactaataaagagtcaagaaaaagcttggcttcattcccaacctacgttgaagttccgggaccctgcgaccccgaagacttgatcgatggaatcatttttgccgccaattaccttggctccactcagctgctctcagacaaaactccttccaaaaacgtgcgcatgatgcaggcccaggaagccgtaagcaggatcaaggctcctgaaggcgaatctcagccaatgactgaagtggatctcttcatttctacccagagaatcaaagtgctgaacgccgacacacaggagacaatgatggaccaccctctgaggaccatttcctacattgcggacattgggaacatcgttgtgctgatggcccgccggcggatgcctcgctccaactcccaggagaacgtggaagcgtcccacccatcccaggatgggaaaaggcagtacaagatgatctgccacgtcttcgagtctgaggatgctcagctgattgcacagtccatcggacaggcatttagcgtggcataccaggaattcctcagggccaatgggattaaccccgaagatctcagccagaaggagtatagtgacctgctcaatacccaggacatgtacaacgatgacctgatccacttctccaagtcggaaaactgtaaagatgttttcatagagaagcagaaaggagaaatcctaggtgtggtgattgtggagtctggctggggatccatcctccccaccgtgatcattgccaacatgatgcatggtggccctgcggagaaatctgggaagctgaatatcggtgaccagatcatgtccattaatggcaccagcctggtgggcctgcctctgtccacctgccagagcattattaagggcttagagaatcagtcccgagtcaagctgaatatcgtgagatgtcctccggtgaccaccgtgttaatcagaagaccagaccttcgctaccagctcggtttcagcgtccagaatggaattatctgcagcctcatgcgagggggaatagctgagagaggaggcgtccgtgtggggcaccggatcattgaaatcaatggacagagcgtcgtggccaccccccacgagaagatcgtccacattctctccaatgctgttggggagattcatatgaagacaatgccagccgcgatgtacaggctgctgacggcccaggagcagcctgtttacatctgaccgcggccacacgcggtggcatgcatggaggactctcctcttcgtggttgtgtttctcgtgctgcatccctgtgtccactgagactttcccctctcgcgcccagcatttggttttacacaggaagagaagaatccacaaggacctctttactctctccgatttgctttttttttttttttttttcaataccagggaagtttcgtatgcactcccttgaggatggagagcagccagcacccacctggtactgacccaggaccatcctggagggctttctgggtgtgtccagggggtgggctgtcactgcttgagggagaatcctcccttcccaggaggtgcagacttcttaaaaggagctcgcggggcagcaaagcagctgattcagcagtgcctaaaacccagttgctgatccctgctctctgagtttatctgtgggaatgtggtagtacccagggccagcccacgtcattaaggttatgcactgcctgccatgtagttggggcaccatacattatttcttcccagaatctctgagccaaccttaaacctcttctattgctagttctaatttcaacgtatgtgtgttttctaatacgagccttctcaccccaggataaaaggggaaataactgccttgggcaaggacaccatagtgtcacagagagcttggcaattcatggggcatctgaagctttaccaggttgtcctcaagttatcaaccattagataaacacaggcaggtactgtctgcttctctctctctcacacacacacacacacacacagtcccattcggatatcacccttccctgctcccaccaccagtgagacaagctgaagattaggcacacagatcccctggaaacccacctctctggaaggtcccttccctggcaggtggtcaggcaggcgggggctgttcagcctcatcctgagagacctgtcctctctgtgctgaggtccagcccctccagcaccactttggcttatcgtatcctcctcctggacttcccctctctgccgaacacacatcccaggagtctgggaaggagggactgttcccaagaaggcaagctgcaggtgcaattgcgtcttgttttctggcccaaggcaagaccaactttcttctctgctcagggccactaggcggatgtgatattggaaaggccagaatagtacataaaccacaaaattaaggagacaatagcaacctcaagttatgcctcagaatccccagatgtggtccataaacaccctcttgctgccttgtgggcctgagagcatttttggctggtgtggaattgttccgtgttttcatcaggtgccgatgatagcggggatcctctgacagcctcccg

SEQ ID NO: 452954 - DNA, 4115 bp, Homo sapiens
  misc_feature (3)..(5): n is a, c, g, or t
  misc_feature (10)..(11): n is a, c, g, or t
  misc_feature (14)..(16): n is a, c, g, or t
gannncggcnncgnnnggcggcggcggcggcggcggcagctgcggcgggagaagatggtggcgctggaggcagcagcggctggagcggagctttattcccaggcttggcaccagcgctgtcactagcgccgcctgctcccgcgggcccgcggacccagctgtcaggcaagcccagtggagcaaaatgagagcgcagtgagccgggcccagcttctctcctagccgttccgactcccaccatgaaccacttggaggggtctgcggaggtggaggtgaccgacgaggcggcaggtggggaggtgaacgagtcggtggaggccgacctggagcaccccgaggtggaagaggaacagcagcagccgccgcagcagcagcactatgtgggccgccaccagcgcgggcgagccctcgaggacctccgcgcccagctcggccaggaggaagaggagcgcggggaatgcctggcgcgctcagccagcacggagagcggcttccacaaccacacggacaccgccgagggcgacgtgatcgccgcggcccgcgacggctacgatgcggagcgcgcgcaggaccccgaggacgagagcgcctatgctgtgcagtaccggcccgaggccgaggagtacacggagcaggcagaggccgagcacgccgaggccacgcaccgccgcgcgctgcccaaccacctgcacttccactcgctggagcacgaggaagccatgaatgcggcctactcaggctacgtctacacgcaccggctcttccaccgcggtgaggacgagccctactccgagccctatgccgactacggcggcctccaggagcacgtgtacgaggagataggggacgcgcccgagctggacgcacgcgacggcctgcggctctacgagcaggagcgcgacgaggcggccgcgtaccgccaggaggccctgggcgcgcggctgcaccattacgacgagcgctccgacggcgagtccgacagccccgagaaggaggccgagttcgcgccctacccgcgcatggacagctacgagcaggaggaggacatcgaccagatagtggccgaggtgaagcagagcatgagctcgcagagcctcgacaaggcagccgaggacatgcctgaggccgagcaggacctggagcgtccccctaccccggccgggggtcgccccgacagccccgggctgcaggcgccggcggggcagcagcgggcggtgggccccgcgggcggcggcgaggcggggcagcggtacagcaaggagaagcgcgatgccatctcgctggccatcaaggacatcaaggaggccatcgaggaggtgaaaaccaggaccatccgttcgccttacacccccgacgagcccaaagagcccatctgggtcatgcgccaggacattagccccaccagggactgtgacgaccagaggccgatggacggagattctccgtctcctggcagctcctcccccttgggtgcagagtcatcaagcacatctcttcaccccagtgaccctgtggaagcgcccactaataaagagtcaagaaaaagcttggcttcattcccaacctacgttgaagttccgggaccctgcgaccccgaagacttgatcgatggaatcatttttgccgccaattaccttggctccactcagctgctctcagacaaaactccttccaaaaacgtgcgcatgatgcaggcccaggaagccgtaagcaggatcaagatggcccagaaattagccaaaagcaggaagaaggctcctgaaggcgaatctcagccaatgactgaagtggatctcttcatttctacccagagaatcaaagtgctgaacgccgacacacaggagacaatgatggaccaccctctgaggaccatttcctacattgcggacattgggaacatcgttgtgctgatggcccgccggcggatgcctcgctccaactcccaggagaacgtggaagcgtcccacccatcccaggatgggaaaaggcagtacaagatgatctgccacgtcttcgagtctgaggatgctcagctgattgcacagtccatcggacaggcatttagcgtggcataccaggaattcctcagggccaatgggattaaccccgaagatctcagccagaaggagtatagtgacctgctcaatacccaggacatgtacaacgatgacctgatccacttctccaagtcggaaaactgtaaagatgttttcatagagaagcagaaaggagaaatcctaggtgtggtgattgtggagtctggctggggatccatcctccccaccgtgatcattgccaacatgatgcatggtggccctgcggagaaatctgggaagctgaatatcggtgaccagatcatgtccattaatggcaccagcctggtgggcctgcctctgtccacctgccagagcattattaagggcttagagaatcagtcccgagtcaagctgaatatcgtgagatgtcctccggtgaccaccgtgttaatcagaagaccagaccttcgctaccagctcggtttcagcgtccagaatggaattatctgcagcctcatgcgagggggaatagctgagagaggaggcgtccgtgtggggcaccggatcattgaaatcaatggacagagcgtcgtggccaccccccacgagaagatcgtccacattctctccaatgctgttggggagattcatatgaagacaatgccagccgcgatgtacaggctgctgacggcccaggagcagcctgtttacatctgaccgcggccacacgcggtggcatgcatggaggactctcctcttcgtggttgtgtttctcgtgctgcatccctgtgtccactgagactttcccctctcgcgcccagcatttggttttacacaggaagagaagaatccacaaggacctctttactctctccgatttgctttttttttttttttttttcaataccagggaagtttcgtatgcactcccttgaggatggagagcagccagcacccacctggtactgacccaggaccatcctggagggctttctgggtgtgtccagggggtgggctgtcactgcttgagggagaatcctcccttcccaggaggtgcagacttcttaaaaggagctcgcggggcagcaaagcagctgattcagcagtgcctaaaacccagttgctgatccctgctctctgagtttatctgtgggaatgtggtagtacccagggccagcccacgtcattaaggttatgcactgcctgccatgtagttggggcaccatacattatttcttcccagaatctctgagccaaccttaaacctcttctattgctagttctaatttcaacgtatgtgtgttttctaatacgagccttctcaccccaggataaaaggggaaataactgccttgggcaaggacaccatagtgtcacagagagcttggcaattcatggggcatctgaagctttaccaggttgtcctcaagttatcaaccattagataaacacaggcaggtactgtctgcttctctctctctcacacacacacacacacacacagtcccattcggatatcacccttccctgctcccaccaccagtgagacaagctgaagattaggcacacagatcccctggaaacccacctctctggaaggtcccttccctggcaggtggtcaggcaggcgggggctgttcagcctcatcctgagagacctgtcctctctgtgctgaggtccagcccctccagcaccactttggcttatcgtatcctcctcctggacttcccctctctgccgaacacacatcccaggagtctgggaaggagggactgttcccaagaaggcaagctgcaggtgcaattgcgtcttgttttctggcccaaggcaagaccaactttcttctctgctcagggccactaggcggatgtgatattggaaaggccagaatagtacataaaccacaaaattaaggagacaatagcaacctcaagttatgcctcagaatccccagatgtggtccataaacaccctcttgctgccttgtgggcctgagagcatttttggctggtgtggaattgttccgtgttttcatcaggtgcctcatatttatgcttccgtctcagttcagtgtagat

SEQ ID NO: 452955 - DNA, 131 bp, Homo sapiens
ctctattataatcttatggaccaccgccgttatctgcagtccatcattaactgaaccatcattatgcagcctacgactgtacacatatatatgtatagacatatacacatatacatacacttacatatata

SEQ ID NO: 452956 - DNA, 402 bp, Homo sapiens
gtgcctggtggccattcacttaaaaaaaaaaaaaaacagaaataaacacaccgttgctccaagaggtacctcctgctctagttttttggacttggcagtgctccactctactgctaggtcaaaagaacagccagagaaaccccacattcaggctaagttgcaaatggaaaggagctccctgctttcatcattaaaaagcactctgttcatcttaatgcagcccaatggagttgctttagtagcagtggctctccgggcctgtgtgttctcatagttaaaaaaataaaataaaaagcagatgggccggccagccagcctgcagactgtcagcgatgcagctttctgagaagtcagggtggggcaggggagaagggaagaacacaggcacacacacagagacag

SEQ ID NO: 452957 - DNA, 788 bp, Homo sapiens
gccttttctgacgatgcgaacaacatggcggcggaaagtggtagcgattttcagcagagacgtagaaggcgccgggacccggaggaaccggaaaaaacagaactcagcgaaagagagctggcagtagcagtggcggtgtcccaggagaacgatgaggagaacgaagagcgctgggttggacctttacctgtggaggcaacactggccaagaagaggaaagtcttagagtttgaaagagtctatcttgataatctccccagtgcatccatgtatgagcgcagttacatgcatagagatgttatcacccatgtggtatgcaccaagtaagtctatcacatcttttttactttgttctgagtttatttaaaaaaaaaaaaaagcttcaattttgaggtagatttatagagataattttaagattttgtagatttttaatttcttaagttctgaaataaaggcctacatgttctttcctatatcgtacaaataatgcattctctaagatagaacccctgagtttatatgtatgtctttggagataaatgccaagaggggagtgaaccaggtagcgtctgagcttccctgaagaagagggtacattagttaagatatgagtaactggtacctggcctctttggcactagtggagaaaatgtgggctaacataccctaggaatagcaaaggaccttcaaaacagatgagtaggttcgtggagaaggataataatagtacaagttgagcaccccaaatataaaatgctccaaaatccaatagtttttgagtgctg

SEQ ID NO: 452958 - DNA, 880 bp, Homo sapiens
ttctttttttttaatagaacattcacattaagccagaagcactcatttcttaagtcctggggacagttagcatgtatatagtacctgggaacctgttgtaactgactaaataatgacgctattcagtgctctgaaataatagacgttaaaactgagataacatactggattttttaattgtgaattgagaaaaactaaaatccaggagaaaataccaagtagagtgtagacaattttaaataaagaaaatacaaaatagtatttggtttatttgttaaaaatagatcttatactttacttttttttcttcagtcttagagtttgaaagagtctatcttgataatctccccagtgcatccatgtatgagcgcagttacatgcatagagatgttatcacccatgtggtatgcaccaagtaagtctatcacatcttttttactttgttctgagtttatttaaaaaaaaaaaaaagcttcaattttgaggtagatttatagagataattttaagattttgtagatttttaatttcttaagttctgaaataaaggcctacatgttctttcctatatcgtacaaataatgcattctctaagatagaacccctgagtttatatgtatgtctttggagataaatgccaagaggggagtgaaccaggtagcgtctgagcttccctgaagaagagggtacattagttaagatatgagtaactggtacctggcctctttggcactagtggagaaaatgtgggctaacataccctaggaatagcaaaggaccttcaaaacagatgagtaggttcgtggagaaggataataatagtacaagttgagcaccccaaatataaaatgctccaaaatccaatagtttttgagtgctg

SEQ ID NO: 452959 - DNA, 1148 bp, Homo sapiens
agcttgaaatactattttttagtgattggacttacgaagtctatttcatattgtttagaatccttcttaagaagtacaaacagttagtggctcttaatatgtattctgcttctatttaaattctcattgcatatatagatagatgggttgatatagatataggtatatgtatatagagtttttgttactaaatggtttatttcctagatgtttactgaactgcaacagatgaggcaacagttaccagacatggaatttggccgacgaatggctgtagaacgtgagttggagaaggttgatgctgtaagattaattaatatagtttttgatgaaactggacacttcgtgctgtatggaacaatgctgggcattaaagttataaatgtagagacaaaccggtaagctttaatatgaggtatgttttttaaaaatgtgtttgtgggggaccatttcctccatcatgggaacagtgggagtattgtttgttccaagaaaagtggaatggccccaaatgtctaaacttaaccaaatgttttgactggatttttctgtggtctcttggttgtttataatcttatgtagaaagtttccactcatgtttgtaaaagaaatggaaagaagatatgcatagtttcaagttgttgtgtgttttttttaacaagtttgtctgtcttttgcttattgatttaaattagcctggttcatgttaaatgttgccaaagattttaaccacagaattcagcattacttcctgctagacataaaatcaaaagttaaaatgcatgaaaccacagtaagccttttttgtgaaaacagtccatttggtcttagtacaaaatagctacaatcagatactctcactgaatgtaaatgaacagaacttaatattttaaggagaaaaaaatgtcctgtacatttccatgtataaacatatttatattgtagttcttggcaatacaaaatctttgaagttttgcagaacagttaacagacatggaattttaataagaataggttaaaactgtataaacaaatgattgattgtttttaatagaccttacttttttgaacagttttaggttcacagcaaaattaagaggaagatacagagattttccatataccctctgccccaacacatgcatagc

SEQ ID NO: 452960 - DNA, 570 bp, Homo sapiens
aacttacctttagggaagatcttccagttccctttggtctgaaagatgcagatatttaattaaacattatactatgcttctattttttttaacacactggaaataacttttaaaagctgctacatttttattgctgagaaattattgtacttctttttaaatatatgctaaaggggagcgtaaacttaaattctctttaatttgctcaaccagaggatataatttaaagaaattggggtttaccaagattttccatttgtcctccaacacagccttggcttgataataagcatacagtatttggacgagtgactaaaggaatggaagttgtacagaggatctccaacgtcaaagtcaatcccaaaacagataagccctatgaggatgtcagcatcataaatattactgtcaagtaaaataagatttgttttaatgtacttgcaaataaaaatacaatattaaacagattattttacattaggaagcttaggacttgctgaatatacagatcatgtttcaaagatacagtatttttgtattttttattaaaggctattttttaaaaattaa

SEQ ID NO: 452961 - DNA, 758 bp, Homo sapiens
gccttttctgacgatgcgaacaacatggcggcggaaagtggtagcgattttcagcagagacgtagaaggcgccgggacccggaggaaccggaaaaaacagaactcagcgaaagagagctggcagtagcagtggcggtgtcccaggagaacgatgaggagaacgaagagcgctgggttggacctttacctgtggaggcaacactggccaagaagaggaaaggtagctgcagacatagtaccgggacgaattggagtgctgcgtccgctgagtaggagggttcaagccagatccgaagagggatgatgtgtggagttttgtgccctcagaacagagggccgtcctctcacttctggctactccatacttgcatgtcttaacgaaatagtgatttaagcgtagtacaacgtctttttgataatatctaacacttttgatcattgatttgttatgacagatgctaaaactaacattttcctattcttatgtgtttggctcctctcatttactccccacagcagccacatgaagttggaatttcgaactcttatttaggtatgcaaaagggtaccagttctctttaaggctttagttcaggagtggtgttaatgtattaatgtgttggggcgcgagaggaaggcggtgcttatttcgaatcatggtaggtaaagataatttcaactctgacacttccactaataaattttcgcatctagggaaaatgacgtaagcttcctagatcacagatttgttttcatcc

SEQ ID NO: 452962 - DNA, 774 bp, Homo sapiens
tatgtatatagtaccctctatgtattaggcactgttctccaaggacttaatatctattcgtttaatcttcacaactaccttcattgcaaggtatgtactgttatcatcatatatgagtgagggaagagaagaaatgaattcacatccccaaagtcgcagaactggaattcaaatccaaacaatctaaataatgaactgagcaacaaacaggtggcatgttaggccttactagaaggcataagtcgagagctaccacaaatgaaacaattattcttgttaaatgtttgcccaagaaaatttctaaccaaagaaattaaattccatttgaaatcaatgtgttcagtatgttatgtggatccttttcatattagacaatgtaaaaataatttaattgcctgacacatcctgtatgggaagtgattcctgaaataaggattctgatgtgaattcttacatttcttaagtacttcattagaaattctattgttcataaaatttttaccagatgaaaactttaattcgttgactcactttttactttcctccttgagtttaccaaacgagaaccagaagatacgaaaagtgcagattctgatcgagatgtttttaatgagaaaccttctaaagaagaagtcatggcagctactcaagctgaaggacctaaacgagtttcggacagtgccattatccacaccagcatgggagacattcacaccaaactttttcctgttgagtatgtataacaactgtttttattggcttatgtaattaaga

SEQ ID NO: 452963 - DNA, 422 bp, Homo sapiens
gtagtaagaaatacaatggactacgattcaagatacttgagtttcaatctcaactctgcctctactgatgatgtaacctaaaataaattatttcacttctgtgagcctatttccttgtctttagaatacaaagattagagtatatgaattcacaattttgagacaatttcccccacattttagtatctctgaaatcagaatacattagatttgatgaaatacagtataaggtaacctagctctattgctatgccataacacaaaattataaaaattacctagtttttgttttggaattaagcactaagtgatgaagaagggaaaaatgtaactaccatctgccaggcacatagttttatgtagtattcacagtacttctactatcagtatccccagttttcaataatagatgaagaaacagt

SEQ ID NO: 452964 - DNA, 2009 bp, Homo sapiens
gccttttctgacgatgcgaacaacatggcggcggaaagtggtagcgattttcagcagagacgtagaaggcgccgggacccggaggaaccggaaaaaacagaactcagcgaaagagagctggcagtagcagtggcggtgtcccaggagaacgatgaggagaacgaagagcgctgggttggacctttacctgtggaggcaacactggccaagaagaggaaagtcttagagtttgaaagagtctatcttgataatctccccagtgcatccatgtatgagcgcagttacatgcatagagatgttatcacccatgtggtatgcaccaaaacagattttattattactgccagtcatgatggacatgtcaagttctggaaagagttattgagagtattgcagttagctctgagggagcattgttctgttctgtgggtgatgataaagcaatgaaggtgtttgatgtagtgaactttgacatgatcaacatgctgaaacttggctattttcctggacagtgtgagtggatctattgcccaggggatgcaatttcttcagttgctgcttccgaaaagagtacaggaaaaattttcatttatgatggccgaggagataaccagccacttcatatttttgacaaactccatacatcacctcttactcagatacggctaaacccagtttacaaagcagtagtgtcttctgacaaatctgggatgattgaatactggactgggcctcctcatgaatataaattccccaaaaatgtgaactgggaatataaaactgacactgatttatatgaatttgccaagtgtaaggcttatccaaccagcgtatgtttttcaccagatgggaagaaaatagctactattggttctgatagaaaagttagaattttcagatttgtaactggaaaactcatgagagtctttgatgaatcactaagcatgtttactgaactgcaacagatgaggcaacagttaccagacatggaatttggccgacgaatggctgtagaacgtgagttggagaaggttgatgctgtaagattaattaatatagtttttgatgaaactggacacttcgtgctgtatggaacaatgctgggcattaaagttataaatgtagagacaaaccggggatagccaaaaagcatcgtgctgcaactactatagaaatgaaagcttctgaaaatcctgttcttcagaatattcaagctgacccaacaatagtctgtacatcattcaaaaagaatagattttatatgtttaccaaacgagaaccagaagatacgaaaagtgcagattctgatcgagatgtttttaatgagaaaccttctaaagaagaagtcatggcagctactcaagctgaaggacctaaacgagtttcggacagtgccattatccacaccagcatgggagacattcacaccaaactttttcctgttgagtgccctaagacagtggaaaacttctgtgttcacagcagaaatggttattataatgggcatacatttcaccgtataattaagggctttatgattcagactggagatccaacaggtactggtatgggaggagaaagcatatggggaggagaatttgaagatgaatttcattcaacattacgacatgacaggccgtacacactcagcatggctaacgcgggatcaaatactaatggatcccagtttttcataacggtagtaccaacgccttggcttgataataagcatacagtatttggacgagtgactaaaggaatggaagttgtacagaggatctccaacgtcaaagtcaatcccaaaacagataagccctatgaggatgtcagcatcataaatattactgtcaagtaaaataagatttgttttaatgtacttgcaaataaaaatacaatattaaacagattattttacattaggaagcttaggacttgctgaatatacagatcatgtttcaaagatacagtatttttgtattttttattaaaggctattttttaaaaattaa

SEQ ID NO: 452965 - DNA, 2895 bp, Homo sapiens
gccttttctgacgatgcgaacaacatggcggcggaaagtggtagcgattttcagcagagacgtagaaggcgccgggacccggaggaaccggaaaaaacagaactcagcgaaagagagctggcagtagcagtggcggtgtcccaggagaacgatgaggagaacgaagagcgctgggttggacctttacctgtggaggcaacactggccaagaagaggaaagtcttagagtttgaaagagtctatcttgataatctccccagtgcatccatgtatgagcgcagttacatgcatagagatgttatcacccatgtggtatgcaccaaaacagattttattattactgccagtcatgatggacatgtcaagttctggaaaaaaatagaagagggaattgaatttgttaaacattttcgtagtcacctgggagttattgagagtattgcagttagctctgagggagcattgttctgttctgtgggtgatgataaagcaatgaaggtgtttgatgtagtgaactttgacatgatcaacatgctgaaacttggctattttcctggacagtgtgagtggatctattgcccaggggatgcaatttcttcagttgctgcttccgaaaagagtacaggaaaaattttcatttatgatggccgaggagataaccagccacttcatatttttgacaaactccatacatcacctcttactcagatacggctaaacccagtttacaaagcagtagtgtcttctgacaaatctgggatgattgaatactggactgggcctcctcatgaatataaattccccaaaaatgtgaactgggaatataaaactgacactgatttatatgaatttgccaagtgtaaggcttatccaaccagcgtatgtttttcaccagatgggaagaaaatagctactattggttctgatagaaaagttagaattttcagatttgtaactggaaaactcatgagagtctttgatgaatcactaagcatgtttactgaactgcaacagatgaggcaacagttaccagacatggaatttggccgacgaatggctgtagaacgtgagttggagaaggttgatgctgtaagattaattaatatagtttttgatgaaactggacacttcgtgctgtatggaacaatgctgggcattaaagttataaatgtagagacaaaccggggatagccaaaaagcatcgtgctgcaactactatagaaatgaaagcttctgaaaatcctgttcttcagaatattcaagctgacccaacaatagtctgtacatcattcaaaaagaatagattttatatgtttaccaaacgagaaccagaagatacgaaaagtgcagattctgatcgagatgtttttaatgagaaaccttctaaagaagaagtcatggcagctactcaagctgaaggacctaaacgagtttcggacagtgccattatccacaccagcatgggagacattcacaccaaactttttcctgttgagtgccctaagacagtggaaaacttctgtgttcacagcagaaatggttattataatgggcatacatttcaccgtataattaagggctttatgattcagactggagatccaacaggtactggtatgggaggagaaagcatatggggaggagaatttgaagatgaatttcattcaacattacgacatgacaggccgtacacactcagcatggctaacgcgggatcaaatactaatggatcccagtttttcataacggtagtaccaacgccttggcttgataataagcatacagtatttggacgagtgactaaaggaatggaagttgtacagaggatctccaacgtcaaagtcaatcccaaaacagataagccctatgaggatgtcagcatcataaatattactgtcaagtaaaataagatttgttttaatgtacttgcaaataaaaatacaatattaaacagattattttacattaggaagcttaggacttgctgaatatacagatcatgtttcaaagatacagtatttttgtattttttattaaaggctattttttaaaaattaaaaaaaaaaagaaaacaaaaaaaaaaaaaacaaaacagaacacagagaaaaaaaaaaaacacaacacaaagaaaaaaagaacaacaaaaaaagaacaacaacaacaagaagggggcgcgcgcgcgcgccgcggcgcggccccctcgcccgcggccggcgccccaacccgagcgccgcagcgcccaccctcgatctatctgaagcaaaaagagaagaagggggcgccaccacagcaagcgcgacgagcgacattattatcataaaaagaagccagcggcgcagcgcgcgcgcagccgctgcctatacataacacacaaacagacgacagcgcgaggagagcaagaaacagcaggcacaagcaaggtgatccaaactcgctgtcgcggaacaacgacaccaccaccaaaaacacaagggaggagggagggagacgaaacaaaactaagtgtgagtgatagaacagaagagaacatctcctgtctcgatccattaaatatagtatatatcctcaaccagacacatacgcctcgcgagtgccggtatatttgagattagatagtcatgtaatgctagtgcgtgtgatatgctgagtcgcggagcgcggagtggttgagataaaaaactccgcggggccactaagtcactgcttgcagcgattgcggattagataagtagaaagatagtgtagttgacgtagtgcgactaataatggagagaaaagtatgtatattaagctagacatcagtgaacacacaagatactttatctctcatctacagctgagggcgattggctcaatgaggatatggataagacgaaggaagaggagtgggggggt

SEQ ID NO: 452966 - DNA, 2391 bp, Homo sapiens
gccttttctgacgatgcgaacaacatggcggcggaaagtggtagcgattttcagcagagacgtagaaggcgccgggacccggaggaaccggaaaaaacagaactcagcgaaagagagctggcagtagcagtggcggtgtcccaggagaacgatgaggagaacgaagagcgctgggttggacctttacctgtggaggcaacactggccaagaagaggaaaggtagctgcagacatagtaccgggacgaattggagtgctgcgtccgctgagtaggagggttcaagccagatccgaagagggatgatgtgtggagttttgtgccctcagaacagagggccgtcctctcacttctggctactccatacttgcatgtcttaacgaaatagtgatttaagcgtagtacaacgtctttttgataatatctaacacttttgatcattgatttgttatgacagatgctaaaactaacattttcctattcttatgtgtttggctcctctcatttactccccacagcagccacatgaagttggaatttcgaactcttatttagtcttagagtttgaaagagtctatcttgataatctccccagtgcatccatgtatgagcgcagttacatgcatagagatgttatcacccatgtggtatgcaccaaaacagattttattattactgccagtcatgatggacatgtcaagttctggaaaaaaatagaagagggaattgaatttgttaaacattttcgtagtcacctgggagttattgagagtattgcagttagctctgagggagcattgttctgttctgtgggtgatgataaagcaatgaaggtgtttgatgtagtgaactttgacatgatcaacatgctgaaacttggctattttcctggacagtgtgagtggatctattgcccaggggatgcaatttcttcagttgctgcttccgaaaagagtacaggaaaaattttcatttatgatggccgaggagataaccagccacttcatatttttgacaaactccatacatcacctcttactcagatacggctaaacccagtttacaaagcagtagtgtcttctgacaaatctgggatgattgaatactggactgggcctcctcatgaatataaattccccaaaaatgtgaactgggaatataaaactgacactgatttatatgaatttgccaagtgtaaggcttatccaaccagcgtatgtttttcaccagatgggaagaaaatagctactattggttctgatagaaaagttagaattttcagatttgtaactggaaaactcatgagagtctttgatgaatcactaagcatgtttactgaactgcaacagatgaggcaacagttaccagacatggaatttggccgacgaatggctgtagaacgtgagttggagaaggttgatgctgtaagattaattaatatagtttttgatgaaactggacacttcgtgctgtatggaacaatgctgggcattaaagttataaatgtagagacaaaccggggatagccaaaaagcatcgtgctgcaactactatagaaatgaaagcttctgaaaatcctgttcttcagaatattcaagctgacccaacaatagtctgtacatcattcaaaaagaatagattttatatgtttaccaaacgagaaccagaagatacgaaaagtgcagattctgatcgagatgtttttaatgagaaaccttctaaagaagaagtcatggcagctactcaagctgaaggacctaaacgagtttcggacagtgccattatccacaccagcatgggagacattcacaccaaactttttcctgttgagtgccctaagacagtggaaaacttctgtgttcacagcagaaatggttattataatgggcatacatttcaccgtataattaagggctttatgattcagactggagatccaacaggtactggtatgggaggagaaagcatatggggaggagaatttgaagatgaatttcattcaacattacgacatgacaggccgtacacactcagcatggctaacgcgggatcaaatactaatggatcccagtttttcataacggtagtaccaacgccttggcttgataataagcatacagtatttggacgagtgactaaaggaatggaagttgtacagaggatctccaacgtcaaagtcaatcccaaaacagataagccctatgaggatgtcagcatcataaatattactgtcaagtaaaataagatttgttttaatgtacttgcaaataaaaatacaatattaaacagattattttacattaggaagcttaggacttgctgaatatacagatcatgtttcaaagatacagtatttttgtattttttattaaaggctattttttaaaaattaa

SEQ ID NO: 452967 - DNA, 1361 bp, Homo sapiens
actttaagtgctcaaaacccatgtactcttcggccttgtttgctgatgtacttgggtacaagattctcttggttcgtccatttccagctcttagaagtattacatggtaatgaaccgtatgaaataattgcataattttcagttaatattattgagaaagcttcgtactctgagtgtgattgtcatttaaagttgaataaatttagatgtcatttctatgattaaggttttggccaagagtatgtcgctgtagcataacaatgcttttgtaagaaaatgacctttcccaggaacttaacctatactactacatgcagacctataatactatatggagtaaactaacttaagatattgggccaggtacagtggctcaggcctgtaatctcagcactttaggaggctgaggcaggaggatgtcttgagtccagaaagtcaagatcagcctaggcaatatagtgagaccttgtctcttaagaaaaaaacatatttttaaggtgctatggctgtattttttttgactgctaaatgaccttgaaattttaatactgtcaaactcaaatattagttaagcagtcatgttctaaagataactaagttgaacaataagaatatactacttacatgaccctccgtgcttgtcctgagattagagattatgaaaaaaaaaaaaacaactgtccttctgaaacattcagaagacatggaaaggaaacatcattaggaagcagaactgcaaagaaaactgttttaagatgctctgaataggtttcatatttgtaacatatgtcttaataggtgccctaagacagtggaaaacttctgtgttcacagcagaaatggttattataatgggcatacatttcaccgtataattaagggctttatgattcagactggagatccaacaggtactggtatgggaggagaaagcatatggggaggagaatttgaagatgaatttcattcaacattacgacatgacaggccgtacacactcagcatggctaacgcgggatcaaatactaatggatcccagtttttcataacggtagtaccaacgccttggcttgataataagcatacagtatttggacgagtgactaaaggaatggaagttgtacagaggatctccaacgtcaaagtcaatcccaaaacagataagccctatgaggatgtcagcatcataaatattactgtcaagtaaaataagatttgttttaatgtacttgcaaataaaaatacaatattaaacagattattttacattaggaagcttaggacttgctgaatatacagatcatgtttcaaagatacagtatttttgtattttttattaaaggctattttttaaaaattaa

SEQ ID NO: 452968 - DNA, 1440 bp, Homo sapiens
gccttttctgacgatgcgaacaacatggcggcggaaagtggtagcgattttcagcagagacgtagaaggcgccgggacccggaggaaccggaaaaaacagaactcagcgaaagagagctggcagtagcagtggcggtgtcccaggagaacgatgaggagaacgaagagcgctgggttggacctttacctgtggaggcaacactggccaagaagaggaaagtcttagagtttgaaagagtctatcttgataatctccccagtgcatccatgtatgagcgcagttacatgcatagagatgttatcacccatgtggtatgcaccaaaacagattttattattactgccagtcatgatggacatgtcaagttctggaaaaaaatagaagagggaattgaatttgttaaacattttcgtagtcacctgggagttattgagagtattgcagttagctctgagggagcattgttctgttctgtgggtgatgataaagcaatgaaggtgtttgatgtagtgaactttgacatgatcaacatgctgaaacttggctattttcctggacagtgtgagtggatctattgcccaggggatgcaatttcttcagttgctgcttccgaaaagagtacaggaaaaattttcatttatgatggccgaggagataaccagccacttcatatttttgacaaactccatacatcacctcttactcagatacggctaaacccagtttacaaagcagtagtgtcttctgacaaatctgggatgattgaatactggactgggcctcctcatgaatataaattccccaaaaatgtgaactgggaatataaaactgacactgatttatatgaatttgccaagtgtaaggcttatccaaccagcgtatgtttttcaccagatgggaagaaaatagctactattggttctgatagaaaagttagaattttcagatttgtaactggaaaactcatgagagtctttgatgaatcactaagcatgtttactgaactgcaacagatgaggcaacagttaccagacatggaatttggccgacgaatggctgtagaacgtgagttggagaaggttgatgctgtaagattaattaatatagtttttgatgaaactggacacttcgtgctgtatggaacaatgctgggcattaaagttataaatgtagagacaaaccggtgtgtgcggattttaggcaaacaagaaaatattagagtgatgcaattggctttgttccaggggatagccaaaaagcatcgtgctgcaactactatagaaatgaaagcttctgaaaatcctgttcttcagaatattcaagctgacccaacaatagtctgtacatcattcaaaaagaatagattttatatggtatgtgtaagtactaggagattagacggtaatgttccttccagtttggtttgacttttctttgtt

SEQ ID NO: 452969 - DNA, 1264 bp, Homo sapiens
gccttttctgacgatgcgaacaacatggcggcggaaagtggtagcgattttcagcagagacgtagaaggcgccgggacccggaggaaccggaaaaaacagaactcagcgaaagagagctggcagtagcagtggcggtgtcccaggagaacgatgaggagaacgaagagcgctgggttggacctttacctgtggaggcaacactggccaagaagaggaaagtcttagagtttgaaagagtctatcttgataatctccccagtgcatccatgtatgagcgcagttacatgcatagagatgttatcacccatgtggtatgcaccaaaacagattttattattactgccagtcatgatggacatgtcaagttctggaaaaaaatagaagagggaattgaatttgttaaacattttcgtagtcacctgggagttattgagagtattgcagttagctctgagggagcattgttctgttctgtgggtgatgataaagcaatgaaggtgtttgatgtagtgaactttgacatgatcaacatgctgaaacttggctattttcctggacagtgtgagtggatctattgcccaggggatgcaatttcttcagttgctgcttccgaaaagagtacaggaaaaattttcatttatgatggccgaggagataaccagccacttcatatttttgacaaactccatacatcacctcttactcagatacggctaaacccagtttacaaagcagtagtgtcttctgacaaatctgggatgattgaatactggactgggcctcctcatgaatataaattccccaaaaatgtgaactgggaatataaaactgacactgatttatatgaatttgccaagtgtaaggcttatccaaccagcgtatgtttttcaccagatgggaagaaaatagctactattggttctgatagaaaagttagaattttcagatttgtaactggaaaactcatgagagtctttgatgaatcactaagctcttagagtttgatagagtctatcttgattatctccccagtgcatccatgtatgagcgcagttacatgcatagagatgttatcacccatgtggtatgcaccaaacaatggaaggtaatacagagaatattggttttgtggtgtggtagattgagagccactcgagcgatatggaccatgagaacacattttattattagctgccagtcatagatggacatgtcaagttgtggaactataaatagatacgacgggaatgaatttgctacaca

SEQ ID NO: 452970 - DNA, 1192 bp, Homo sapiens
gccttttctgacgatgcgaacaacatggcggcggaaagtggtagcgattttcagcagagacgtagaaggcgccgggacccggaggaaccggaaaaaacagaactcagcgaaagagagctggcagtagcagtggcggtgtcccaggagaacgatgaggagaacgaagagcgctgggttggacctttacctgtggaggcaacactggccaagaagaggaaagtcttagagtttgaaagagtctatcttgataatctccccagtgcatccatgtatgagcgcagttacatgcatagagatgttatcacccatgtggtatgcaccaaaacagattttattattactgccagtcatgatggacatgtcaagttctggaaaaaaatagaagagggaattgaatttgttaaacattttcgtagtcacctgggagttattgagagtattgcagttagctctgagggagcattgttctgttctgtgggtgatgataaagcaatgaaggtgtttgatgtagtgaactttgacatgatcaacatgctgaaacttggctattttcctggacagtgtgagtggatctattgcccaggggatgcaatttcttcagttgctgcttccgaaaagagtacaggaaaaattttcatttatgatggccgaggagataaccagccacttcatatttttgacaaactccatacatcacctcttactcagatacggctaaacccagtttacaaagcagtagtgtcttctgacaaatctgggatgattgaatactggactgggcctcctcatgaatataaattccccaaaaatgtgaactgggaatataaaactgacactgatttatatgaatttgccaagtgtaaggcttatccaaccagcgtatgtttttcaccagatgggaagaaaatagctactattggttctgatagaaaagttagaattttcagatttgtaactggaaaactcatgagagtctttgatgaatcactaagcgtaagtgtaatttaaatttaaccgtactttacttttctaaaaatgctttattttatgccttttcttgaaagatcttttttctacagatagacatttagatagacttatttttttcttagcacattagagatattcaactgtttctgtcttgtagtgttgctctttgaaagtctcttctctaggggtttatgatgtgcgt

SEQ ID NO: 452971 - DNA, 625 bp, Homo sapiens
gcagaaataaaacttcaaagcgtacatatatcgaaaaggacaatgtaatgtttttgtgtactttctgttaagggctttatgattcagactggagatccaacaggtactggtatgggaggagaaagcatatggggaggagaatttgaagatgaatttcattcaacattacgacatgacaggccgtacacactcagcatggctaacgcgggatcaaatactaatggatcccagtttttcataacggtagtaccaacggtaagtacagtatcattgtttataaactacagattgataggttatgatgtaagagagtgaactcagtagaagagctgcattattctgtattttctgcattatttatatcatctagcagaatacaaatatgaaaatgatcaagaatataaaattatgtgactaatcagtttagaattggtaaaacaatactgccactgtagtaagaaatacaatggactacgattcaagatacttgagtttcaatctcaactctgcctctactgatgatgtaacctaaaataaattatttcacttctgtgagcctatttccttgtctttagaatacaaagattagagtatatgaattcacaattttgagacaatttccccc

SEQ ID NO: 452972 - DNA, 2119 bp, Homo sapiens
gccttttctgacgatgcgaacaacatggcggcggaaagtggtagcgattttcagcagagacgtagaaggcgccgggacccggaggaaccggaaaaaacagaactcagcgaaagagagctggcagtagcagtggcggtgtcccaggagaacgatgaggagaacgaagagcgctgggttggacctttacctgtggaggcaacactggccaagaagaggaaagtcttagagtttgaaagagtctatcttgataatctccccagtgcatccatgtatgagcgcagttacatgcatagagatgttatcacccatgtggtatgcaccaaaacagattttattattactgccagtcatgatggacatgtcaagttctggaaaaaaatagaagagggaattgaatttgttaaacattttcgtagtcacctgggagttattgagagtattgcagttagctctgagggagcattgttctgttctgtgggtgatgataaagcaatgaaggtgtttgatgtagtgaactttgacatgatcaacatgctgaaacttggctattttcctggacagtgtgagtggatctattgcccaggggatgcaatttcttcagttgctgcttccgaaaagagtacaggaaaaattttcatttatgatggccgaggagataaccagccacttcatatttttgacaaactccatacatcacctcttactcagatacggctaaacccagtttacaaagcagtagtgtcttctgacaaatctgggatgattgaatactggactgggcctcctcatgaatataaattccccaaaaatgtgaactgggaatataaaactgacactgatttatatgaatttgccaagtgtaaggcttatccaaccagcgtatgtttttcaccagatgggaagaaaatagctactattggttctgatagaaaagttagaattttcagatttgtaactggaaaactcatgagagtctttgatgaatcactaagcatgtttactgaactgcaacagatgaggcaacagttaccagacatggaatttggccgacgaatggctgtagaacgtgagttggagaaggttgatgctgtaagattaattaatatagtttttgatgaaactggacacttcgtgctgtatggaacaatgctgggcattaaagttataaatgtagagacaaaccggtgtgtgcggattttaggcaaacaagaaaatattagagtgatgcaattggctttgttccaggggatagccaaaaagcatcgtgctgcaactactatagaaatgaaagcttctgaaaatcctgttcttcagaatattcaagctgacccaacaatagtctgtacatcattcaaaaagaatagattttatatgtttaccaaacgagaaccagaagatacgaaaagtgcagattctgatcgagatgtttttaatgagaaaccttctaaagaagaagtcatggcagctactcaagctgaaggacctaaacgagtttcggacagtgccattatccacaccagcatgggagacattcacaccaaactttttcctgttgagtgccctaagacagtggaaaacttctgtgttcacagcagaaatggttattataatgggcatacatttcaccgtataattaagggctttatgattcagactggagatccaacaggtactggtatgggaggagaaagcatatggggaggagaatttgaagatgaatttcattcaacattacgacatgacaggccgtacacactcagcatggctaacgcgggatcaaatactaatggatcccagtttttcataacggtagtaccaacgccttggcttgataataagcatacagtatttggacgagtgactaaaggaatggaagttgtacagaggatctccaacgtcaaagtcaatcccaaaacagataagccctatgaggatgtcagcatcataaatattactgtcaagtaaaataagatttgttttaatgtacttgcaaataaaaatacaatattaaacagattattttacattaggaagcttaggacttgctgaatatacagatcatgtttcaaagatacagtatttttgtattttttattaaaggctattttttaaaaattaa

SEQ ID NO: 452973 - DNA, 840 bp, Homo sapiens
ctcaggccaagatttcgcgcccgacgcgtctgcacagcttccgctctgatgcatgcggcaatcacatcatgcgtcggtcgcgagaacgtaggttagcgattttcagcagagacgtagaaggcgccgggacccggaggaaccggaaaaaacagaactcagcgaaagagagctggcagtagcagtggcggtgtcccaggagaacgatgaggagaacgaagagcgctgggttggacctttacctgtggaggcaacactggccaagaagaggaaagtcttagagtttgaaagagtctatcttgataatctccccagtgcatccatgtatgagcgcagttacatgcatagagatgttatcacccatgtggtatgcaccaagtaagtctatcacatcttttttactttgttctgagtttatttaaaaaaaaaaaaaagcttcaattttgaggtagatttatagagataattttaagattttgtagatttttaatttcttaagttctgaaataaaggcctacatgttctttcctatatcgtacaaataatgcattctctaagatagaacccctgagtttatatgtatgtctttggagataaatgccaagaggggagtgaaccaggtagcgtctgagcttccctgaagaagagggtacattagttaagatatgagtaactggtacctggcctctttggcactagtggagaaaatgtgggctaacataccctaggaatagcaaaggaccttcaaaacagatgagtaggttcgtggagaaggataataatagtacaagttgagcaccccaaatataaaatgctccaaaatccaatagtttttgagtgctg

SEQ ID NO: 452974 - DNA, 2058 bp, Homo sapiens
gccttttctgacgatgcgaacaacatggcggcggaaagtggtagcgattttcagcagagacgtagaaggcgccgggacccggaggaaccggaaaaaacagaactcagcgaaagagagctggcagtagcagtggcggtgtcccaggagaacgatgaggagaacgaagagcgctgggttggacctttacctgtggaggcaacactggccaagaagaggaaagtcttagagtttgaaagagtctatcttgataatctccccagtgcatccatgtatgagcgcagttacatgcatagagatgttatcacccatgtggtatgcaccaaaacagattttattattactgccagtcatgatggacatgtcaagttctggaaaaaaatagaagagggaattgaatttgttaaacattttcgtagtcacctgggagttattgagagtattgcagttagctctgagggagcattgttctgttctgtgggtgatgataaagcaatgaaggtgtttgatgtagtgaactttgacatgatcaacatgctgaaacttggctattttcctggacagtgtgagtggatctattgcccaggggatgcaatttcttcagttgctgcttccgaaaagagtacaggaaaaattttcatttatgatggccgaggagataaccagccacttcatatttttgacaaactccatacatcacctcttactcagatacggctaaacccagtttacaaagcagtagtgtcttctgacaaatctgggatgattgaatactggactgggcctcctcatgaatataaattccccaaaaatgtgaactgggaatataaaactgacactgatttatatgaatttgccaagtgtaaggcttatccaaccagcgtatgtttttcaccagatgggaagaaaatagctactattggttctgatagaaaagttagaattttcagatttgtaactggaaaactcatgagagtctttgatgaatcactaagcatgtttactgaactgcaacagatgaggcaacagttaccagacatggaatttggccgacgaatggctgtagaacgtgagttggagaaggttgatgctgtaagattaattaatatagtttttgatgaaactggacacttcgtgctgtatggaacaatgctgggcattaaagttataaatgtagagacaaaccggggatagccaaaaagcatcgtgctgcaactactatagaaatgaaagcttctgaaaatcctgttcttcagaatattcaagctgacccaacaatagtctgtacatcattcaaaaagaatagattttatatgtttaccaaacgagaaccagaagatacgaaaagtgcagattctgatcgagatgtttttaatgagaaaccttctaaagaagaagtcatggcagctactcaagctgaaggacctaaacgagtttcggacagtgccattatccacaccagcatgggagacattcacaccaaactttttcctgttgagtgccctaagacagtggaaaacttctgtgttcacagcagaaatggttattataatgggcatacatttcaccgtataattaagggctttatgattcagactggagatccaacaggtactggtatgggaggagaaagcatatggggaggagaatttgaagatgaatttcattcaacattacgacatgacaggccgtacacactcagcatggctaacgcgggatcaaatactaatggatcccagtttttcataacggtagtaccaacgccttggcttgataataagcatacagtatttggacgagtgactaaaggaatggaagttgtacagaggatctccaacgtcaaagtcaatcccaaaacagataagccctatgaggatgtcagcatcataaatattactgtcaagtaaaataagatttgttttaatgtacttgcaaataaaaatacaatattaaacagattattttacattaggaagcttaggacttgctgaatatacagatcatgtttcaaagatacagtatttttgtattttttattaaaggctattttttaaaaattaa

SEQ ID NO: 452975 - DNA, 2038 bp, Homo sapiens
ctcgagaatcggtcttgtacttttttttcctctggattcctacccagatatggtgtttctaccgggaataatttccctcaactcttccactgaactgacttttggtcaacctttagcacttagctatcatcttctctgggaagcctgtgacttctccagtctggactggatttctgaagcactttgatcataactctgagtcttagagtttgaaagagtctatcttgataatctccccagtgcatccatgtatgagcgcagttacatgcatagagatgttatcacccatgtggtatgcaccaaaacagattttattattactgccagtcatgatggacatgtcaagttctggaaaaaaatagaagagggaattgaatttgttaaacattttcgtagtcacctgggagttattgagagtattgcagttagctctgagggagcattgttctgttctgtgggtgatgataaagcaatgaaggtgtttgatgtagtgaactttgacatgatcaacatgctgaaacttggctattttcctggacagtgtgagtggatctattgcccaggggatgcaatttcttcagttgctgcttccgaaaagagtacaggaaaaattttcatttatgatggccgaggagataaccagccacttcatatttttgacaaactccatacatcacctcttactcagatacggctaaacccagtttacaaagcagtagtgtcttctgacaaatctgggatgattgaatactggactgggcctcctcatgaatataaattccccaaaaatgtgaactgggaatataaaactgacactgatttatatgaatttgccaagtgtaaggcttatccaaccagcgtatgtttttcaccagatgggaagaaaatagctactattggttctgatagaaaagttagaattttcagatttgtaactggaaaactcatgagagtctttgatgaatcactaagcatgtttactgaactgcaacagatgaggcaacagttaccagacatggaatttggccgacgaatggctgtagaacgtgagttggagaaggttgatgctgtaagattaattaatatagtttttgatgaaactggacacttcgtgctgtatggaacaatgctgggcattaaagttataaatgtagagacaaaccggggatagccaaaaagcatcgtgctgcaactactatagaaatgaaagcttctgaaaatcctgttcttcagaatattcaagctgacccaacaatagtctgtacatcattcaaaaagaatagattttatatgtttaccaaacgagaaccagaagatacgaaaagtgcagattctgatcgagatgtttttaatgagaaaccttctaaagaagaagtcatggcagctactcaagctgaaggacctaaacgagtttcggacagtgccattatccacaccagcatgggagacattcacaccaaactttttcctgttgagtgccctaagacagtggaaaacttctgtgttcacagcagaaatggttattataatgggcatacatttcaccgtataattaagggctttatgattcagactggagatccaacaggtactggtatgggaggagaaagcatatggggaggagaatttgaagatgaatttcattcaacattacgacatgacaggccgtacacactcagcatggctaacgcgggatcaaatactaatggatcccagtttttcataacggtagtaccaacgccttggcttgataataagcatacagtatttggacgagtgactaaaggaatggaagttgtacagaggatctccaacgtcaaagtcaatcccaaaacagataagccctatgaggatgtcagcatcataaatattactgtcaagtaaaataagatttgttttaatgtacttgcaaataaaaatacaatattaaacagattattttacattaggaagcttaggacttgctgaatatacagatcatgtttcaaagatacagtatttttgtattttttattaaaggctattttttaaaaattaa

SEQ ID NO: 452976 - DNA, 1296 bp, Homo sapiens
tatgtatatagtaccctctatgtattaggcactgttctccaaggacttaatatctattcgtttaatcttcacaactaccttcattgcaaggtatgtactgttatcatcatatatgagtgagggaagagaagaaatgaattcacatccccaaagtcgcagaactggaattcaaatccaaacaatctaaataatgaactgagcaacaaacaggtggcatgttaggccttactagaaggcataagtcgagagctaccacaaatgaaacaattattcttgttaaatgtttgcccaagaaaatttctaaccaaagaaattaaattccatttgaaatcaatgtgttcagtatgttatgtggatccttttcatattagacaatgtaaaaataatttaattgcctgacacatcctgtatgggaagtgattcctgaaataaggattctgatgtgaattcttacatttcttaagtacttcattagaaattctattgttcataaaatttttaccagatgaaaactttaattcgttgactcactttttactttcctccttgagtttaccaaacgagaaccagaagatacgaaaagtgcagattctgatcgagatgtttttaatgagaaaccttctaaagaagaagtcatggcagctactcaagctgaaggacctaaacgagtttcggacagtgccattatccacaccagcatgggagacattcacaccaaactttttcctgttgagtgccctaagacagtggaaaacttctgtgttcacagcagaaatggttattataatgggcatacatttcaccgtataattaagggctttatgattcagactggagatccaacaggtactggtatgggaggagaaagcatatggggaggagaatttgaagatgaatttcattcaacattacgacatgacaggccgtacacactcagcatggctaacgcgggatcaaatactaatggatcccagtttttcataacggtagtaccaacgccttggcttgataataagcatacagtatttggacgagtgactaaaggaatggaagttgtacagaggatctccaacgtcaaagtcaatcccaaaacagataagccctatgaggatgtcagcatcataaatattactgtcaagtaaaataagatttgttttaatgtacttgcaaataaaaatacaatattaaacagattattttacattaggaagcttaggacttgctgaatatacagatcatgtttcaaagatacagtatttttgtattttttattaaaggctattttttaaaaattaa

SEQ ID NO: 452977 - DNA, 1934 bp, Homo sapiens
gccttttctgacgatgcgaacaacatggcggcggaaagtggtagcgattttcagcagagacgtagaaggcgccgggacccggaggaaccggaaaaaacagaactcagcgaaagagagctggcagtagcagtggcggtgtcccaggagaacgatgaggagaacgaagagcgctgggttggacctttacctgtggaggcaacactggccaagaagaggaaagtcttagagtttgaaagagtctatcttgataatctccccagtgcatccatgtatgagcgcagttacatgcatagagatgttatcacccatgtggtatgcaccaaaacagattttattattactgccagtcatgatggacatgtcaagttctggaaaaaaatagaagagggaattgaatttgttaaacattttcgtagtcacctgggagttattgagagtattgcagttagctctgagggagcattgttctgttctgtgggtgatgataaagcaatgaaggtgtttgatgtagtgaactttgacatgatcaacatgctgaaacttggctattttcctggacagtgtgagtggatctattgcccaggggatgcaatttcttcagttgctgcttccgaaaagagtacaggaaaaattttcatttatgatggccgaggagataaccagccacttcatatttttgacaaactccatacatcacctcttactcagatacggctaaacccagtttacaaagcagtagtgtcttctgacaaatctgggatgattgaatactggactgggcctcctcatgaatataaattccccaaaaatgtgaactgggaatataaaactgacactgatttatatgaatttgccaagtgtaaggcttatccaaccagcgtatgtttttcaccagatgggaagaaaatagctactattggttctgatagaaaagttagaattttcagatttgtaactggaaaactcatgagagtctttgatgaatcactaagcatgtttactgaactgcaacagatgaggcaacagttaccagacatggaatttggccgacgaatggctgtagaacgtgagttggagaaggttgatgctgtaagattaattaatatagtttttgatgaaactggacacttcgtgctgtatggaacaatgctgggcattaaagttataaatgtagagacaaaccggtaagctttaatatgaggtatgttttttaaaaatgtgtttgtgggggaccatttcctccatcatgggaacagtgggagtattgtttgttccaagaaaagtggaatggccccaaatgtctaaacttaaccaaatgttttgactggatttttctgtggtctcttggttgtttataatcttatgtagaaagtttccactcatgtttgtaaaagaaatggaaagaagatatgcatagtttcaagttgttgtgtgttttttttaacaagtttgtctgtcttttgcttattgatttaaattagcctggttcatgttaaatgttgccaaagattttaaccacagaattcagcattacttcctgctagacataaaatcaaaagttaaaatgcatgaaaccacagtaagccttttttgtgaaaacagtccatttggtcttagtacaaaatagctacaatcagatactctcactgaatgtaaatgaacagaacttaatattttaaggagaaaaaaatgtcctgtacatttccatgtataaacatatttatattgtagttcttggcaatacaaaatctttgaagttttgcagaacagttaacagacatggaattttaataagaataggttaaaactgtataaacaaatgattgattgtttttaatagaccttacttttttgaacagttttaggttcacagcaaaattaagaggaagatacagagattttccatataccctctgccccaacacatgcatagc

SEQ ID NO: 452978 - DNA, 622 bp, Homo sapiens
tgagaacagtatggaggaaaccgctccatgattcaattatctcccactgtgtacctcccacaacacatgggaattatgggagctataattcaaaatgaggtttggcgggggacagagccaaaccatattagccacaggaaagctgttgagccttgcagtgcctctgaggatccctggctgtggggtgggcccgggttctagtccaagggctcctgcgtgcaactctgcccagcttccgtggagggttattcttgtgtttaagatatgtgtgtgtgattctgatggcaccttcctgcctcgggccagctgtgtgctgacgggcactgccgctgcctaggtgttggttccggtgagcccagcaactttgtgactgatccttgtcctcctctgttccagggtactgccagggggatggttaccgcatcggctttggccagtgtgctggaaaagtgctgcctgctctcctgccatcatgagattttctctgctcttctggaaacaaagggctcaagcacccctttcaaccctgtgactggggtcctccctcgggctgtaggcctggtccgccattcagtgacaaataaagccattgtgctctgaggcctgcactgccgcagatgca

SEQ ID NO: 452979 - DNA, 624 bp, Homo sapiens
attgtttcacagactctaagtgaaatcatgttggacaatgggaagcttcagccacagaacaattctttttttattttcctccctgatgcatggaattaagttttcatcaatattgcttttctttccaacaggagaaggaatgagccaggcggctaccatatgcaagtccaattttaagtacatgtactggacgatgctgcagcagctcactcaccactctgtcaacggctgcaacctgcggccgggggacctcctggcttctgggaccatcagcgggccggagccagaaaacttcggctccatgttggaactgtcgtggaagggaacgaagcccatagacctggggaatggtcagaccaggaagtttctgctggacggggatgaagtcatcataacagggtactgccagggggatggttaccgcatcggctttggccagtgtgctggaaaagtgctgcctgctctcctgccatcatgagattttctctgctcttctggaaacaaagggctcaagcacccctttcaaccctgtgactggggtcctccctcgggctgtaggcctggtccgccattcagtgacaaataaagccattgtgctctgaggcctgcactgccgcagatgca

SEQ ID NO: 452980 - DNA, 916 bp, Homo sapiens
aacggctaggtacgaggctgggtggtgagtcagcatgtccttcatcccggtggccgaggattccgacttccccatccacaacctgccctacggcgtcttctcgaccagaggcgacccaagaccgaggataggtgtggccattggcgaccagatcctggacctcagcatcatcaagcacctctttactggtcctgtcctctccaaacaccaggatgtcttcaatcagcctacactcaacagcttcatgggcctgggtcaggctgcctggaaggaggcgagagtgttcttgcagaacttgctgtctgtgagccaagccaggctcagagatgacaccgaacttcggaagtgtgcattcatctcccaggcttctgccacgatgcaccttccagccaccataggagactacacagacttctattcctctcggcagcatgctaccaacgtcggaatcatgttcagggacaaggagaatgcgttgatgccaaattggctgcacttaccagtgggctaccatggccgtgcctcctctgtcgtggtgtctggcaccccaatccgaaggcccatgggacagatgaaacctgatgactctaagcctcccgtatatggtgcctgcaagctcttggacatggagctggaaatggctttttttgtaggccctggaaacagattgggagagccgatccccatttccaaggcccatgagcacatttttggaatggtccttatgaacgactggagtgcccgagaccttccgacagtgggcaagtatgtcccctctccgggccatcccttgggacgcggtcttggggaccacctgctcctcggggttggtcccctgggatgctcccttgcccttggtgtgcccagccggagctcgggcccggtcctgtcgcgtctgtcccgcgcgtcctccatt

SEQ ID NO: 452981 - DNA, 807 bp, Homo sapiens
tgtaagggtggcgagactgtggaggacctggagctggcgggggtcagggtaggggggaggggcagggctcggggttcgggggcggggtgttcacggtgagaccaaaagtcaggcccgcagccgtgccgggtgctcttcagcatgtccttcatcccggtggccgaggattccgacttccccatccacaacctgccctacggcgtcttctcgaccagaggcgacccaagaccgaggataggtgtggccattggcgaccagatcctggacctcagcatcatcaagcacctctttactggtcctgtcctctccaaacaccaggatgtcttcaatcagcctacactcaacagcttcatgggcctgggtcaggctgcctggaaggaggcgagagtgttcttgcagaacttgctgtctgtgagccaagccaggctcagagatgacaccgaacttcggaagtgtgcattcatctcccaggcttctgccacgatgcaccttccagccaccataggtgagtgcagtctcttcaccaagataagaacggagcagcttcgtgggccaagagggctggccaggagactacacagacttctattcctctcggcagcatgctaccaacgtcggaatcatgttcagggacaaggagaatgcgttgatgccaaattggtatgaactgggccaaatgtctgcataagttcaaagtctttcttttcatttccagcagcatatttgtctcaggagctgccaagttcttcttaaagtaaactggggaggaaaagcagttatgatgttgcaacctctggaagcagtggt

SEQ ID NO: 452982 - DNA, 1476 bp, Homo sapiens
cgggcgagactgtggaggacctggagctggcgggggtcagggcccgcagccgtgccgggtgctcttcagcatgtccttcatcccggtggccgaggattccgacttccccatccacaacctgccctacggcgtcttctcgaccagaggcgacccaagaccgaggataggtgtggccattggcgaccagatcctggacctcagcatcatcaagcacctctttactggtcctgtcctctccaaacaccaggatgtcttcaatcagcctacactcaacagcttcatgggcctgggtcaggctgcctggaaggaggcgagagtgttcttgcagaacttgctgtctgtgagccaagccaggctcagagatgacaccgaacttcggaagtgtgcattcatctcccaggcttctgccacgatgcaccttccagccaccataggagactacacagacttctattcctctcggcagcatgctaccaacgtcggaatcatgttcagggacaaggagaatgcgttgatgccaaattggctgcacttaccagtgggctaccatggccgtgcctcctctgtcgtggtgtctggcaccccaatccgaaggcccatgggacagatgaaacctgatgactctaagcctcccgtatatggtgcctgcaagctcttggacatggagctggaaatggctttttttgtaggccctggaaacagattgggagagccgatccccatttccaaggcccatgagcacatttttggaatggtccttatgaacgactggagtgcacgagacattcagaagtgggagtatgtccctctcgggccattccttgggaagagttttgggaccactgtctctccgtgggtggtgcccatggatgctctcatgccctttgctgtgcccaacccgaagcaggaccccaggcccctgccgtatctgtgccatgacgagccctacacatttgacatcaacctctctgttaacctgaaaggagaaggaatgagccaggcggctaccatatgcaagtccaattttaagtacatgtactggacgatgctgcagcagctcactcaccactctgtcaacggctgcaacctgcggccgggggacctcctggcttctgggaccatcagcgggccggagccagaaaacttcggctccatgttggaactgtcgtggaagggaacgaagcccatagacctggggaatggtcagaccaggaagtttctgctggacggggatgaagtcatcataacagggtactgccagggggatggttaccgcatcggctttggccagtgtgctggaaaagtgctgcctgctctcctgccatcatgagattttctctgctcttctggaaacaaagggctcaagcacccctttcaaccctgtgactggggtcctccctcgggctgtaggcctggtccgccattcagtgacaaataaagccattgtgctctgaggcctgcactgccgcagatgca

SEQ ID NO: 452983 - DNA, 1547 bp, Homo sapiens
tgtaagggtggcgagactgtggaggacctggagctggcgggggtcagggtaggggggaggggcagggctcggggttcgggggcggggtgttcacggtgagaccaaaagtcaggcccgcagccgtgccgggtgctcttcagcatgtccttcatcccggtggccgaggattccgacttccccatccacaacctgccctacggcgtcttctcgaccagaggcgacccaagaccgaggataggtgtggccattggcgaccagatcctggacctcagcatcatcaagcacctctttactggtcctgtcctctccaaacaccaggatgtcttcaatcagcctacactcaacagcttcatgggcctgggtcaggctgcctggaaggaggcgagagtgttcttgcagaacttgctgtctgtgagccaagccaggctcagagatgacaccgaacttcggaagtgtgcattcatctcccaggcttctgccacgatgcaccttccagccaccataggagactacacagacttctattcctctcggcagcatgctaccaacgtcggaatcatgttcagggacaaggagaatgcgttgatgccaaattggctgcacttaccagtgggctaccatggccgtgcctcctctgtcgtggtgtctggcaccccaatccgaaggcccatgggacagatgaaacctgatgactctaagcctcccgtatatggtgcctgcaagctcttggacatggagctggaaatggctttttttgtaggccctggaaacagattgggagagccgatccccatttccaaggcccatgagcacatttttggaatggtccttatgaacgactggagtgcacgagacattcagaagtgggagtatgtccctctcgggccattccttgggaagagttttgggaccactgtctctccgtgggtggtgcccatggatgctctcatgccctttgctgtgcccaacccgaagcaggaccccaggcccctgccgtatctgtgccatgacgagccctacacatttgacatcaacctctctgttaacctgaaaggagaaggaatgagccaggcggctaccatatgcaagtccaattttaagtacatgtactggacgatgctgcagcagctcactcaccactctgtcaacggctgcaacctgcggccgggggacctcctggcttctgggaccatcagcgggccggagccagaaaacttcggctccatgttggaactgtcgtggaagggaacgaagcccatagacctggggaatggtcagaccaggaagtttctgctggacggggatgaagtcatcataacagggtactgccagggggatggttaccgcatcggctttggccagtgtgctggaaaagtgctgcctgctctcctgccatcatgagattttctctgctcttctggaaacaaagggctcaagcacccctttcaaccctgtgactggggtcctccctcgggctgtaggcctggtccgccattcagtgacaaataaagccattgtgctctgaggcctgcactgccgcagatgca

SEQ ID NO: 452984 - DNA, 1536 bp, Homo sapiens
ccacggattccgacttccccatccacaacctgccctacggcgtcttctcgaccagaggcgacccaagaccgaggataggtgtggccattgggaccagatcctggacctcagcatcatcaagcacctcagcatgtccttcatcccggtggccgaggattccgacttccccatccacaacctgccctacggcgtcttctcgaccagaggcgacccaagaccgaggataggtgtggccattggcgaccagatcctggacctcagcatcatcaagcacctctttactggtcctgtcctctccaaacaccaggatgtcttcaatcagcctacactcaacagcttcatgggcctgggtcaggctgcctggaaggaggcgagagtgttcttgcagaacttgctgtctgtgagccaagccaggctcagagatgacaccgaacttcggaagtgtgcattcatctcccaggcttctgccacgatgcaccttccagccaccataggagactacacagacttctattcctctcggcagcatgctaccaacgtcggaatcatgttcagggacaaggagaatgcgttgatgccaaattggctgcacttaccagtgggctaccatggccgtgcctcctctgtcgtggtgtctggcaccccaatccgaaggcccatgggacagatgaaacctgatgactctaagcctcccgtatatggtgcctgcaagctcttggacatggagctggaaatggctttttttgtaggccctggaaacagattgggagagccgatccccatttccaaggcccatgagcacatttttggaatggtccttatgaacgactggagtgcacgagacattcagaagtgggagtatgtccctctcgggccattccttgggaagagttttgggaccactgtctctccgtgggtggtgcccatggatgctctcatgccctttgctgtgcccaacccgaagcaggaccccaggcccctgccgtatctgtgccatgacgagccctacacatttgacatcaacctctctgttaacctgaaaggagaaggaatgagccaggcggctaccatatgcaagtccaattttaagtacatgtactggacgatgctgcagcagctcactcaccactctgtcaacggctgcaacctgcggccgggggacctcctggcttctgggaccatcagcgggccggagccagaaaacttcggctccatgttggaactgtcgtggaagggaacgaagcccatagacctggggaatggtcagaccaggaagtttctgctggacggggatgaagtcatcataacagggtactgccagggggatggttaccgcatcggctttggccagtgtgctggaaaagtgctgcctgctctcctgccatcatgagattttctctgctcttctggaaacaaagggctcaagcacccctttcaaccctgtgactggggtcctccctcgggctgtaggcctggtccgccattcagtgacaaataaagccattgtgctctgaggcctgcactgccgcagatgca

SEQ ID NO: 452985 - DNA, 1354 bp, Homo sapiens
tacgaggccgggggtgccgacagaggcgaccaagaccgaggataggtgtggccattggcgaccagatcctggacctcagcatcatcaagcacctctttactggtcctgtcctctccaaacaccaggatgtcttcaatcagcctacactcaacagcttcatgggcctgggtcaggctgcctggaaggaggcgagagtgttcttgcagaacttgctgtctgtgagccaagccaggctcagagatgacaccgaacttcggaagtgtgcattcatctcccaggcttctgccacgatgcaccttccagccaccataggagactacacagacttctattcctctcggcagcatgctaccaacgtcggaatcatgttcagggacaaggagaatgcgttgatgccaaattggctgcacttaccagtgggctaccatggccgtgcctcctctgtcgtggtgtctggcaccccaatccgaaggcccatgggacagatgaaacctgatgactctaagcctcccgtatatggtgcctgcaagctcttggacatggagctggaaatggctttttttgtaggccctggaaacagattgggagagccgatccccatttccaaggcccatgagcacatttttggaatggtccttatgaacgactggagtgcacgagacattcagaagtgggagtatgtccctctcgggccattccttgggaagagttttgggaccactgtctctccgtgggtggtgcccatggatgctctcatgccctttgctgtgcccaacccgaagcaggaccccaggcccctgccgtatctgtgccatgacgagccctacacatttgacatcaacctctctgttaacctgaaaggagaaggaatgagccaggcggctaccatatgcaagtccaattttaagtacatgtactggacgatgctgcagcagctcactcaccactctgtcaacggctgcaacctgcggccgggggacctcctggcttctgggaccatcagcgggccggagccagaaaacttcggctccatgttggaactgtcgtggaagggaacgaagcccatagacctggggaatggtcagaccaggaagtttctgctggacggggatgaagtcatcataacagggtactgccagggggatggttaccgcatcggctttggccagtgtgctggaaaagtgctgcctgctctcctgccatcatgagattttctctgctcttctggaaacaaagggctcaagcacccctttcaaccctgtgactggggtcctccctcgggctgtaggcctggtccgccattcagtgacaaataaagccattgtgctctgaggcctgcactgccgcagatgca

SEQ ID NO: 452986 - DNA, 1472 bp, Homo sapiens
caaactcaaggaggaatgcgaggcggtggctcgtgcattcgtgtacttcatccggatggccgctgataccgagtttgacatacacgttaggcgagacctacggctgtattctcaatcagaatcgagccaagaacgatagataggtggtggcacatagggtaccaaatactgatactgaggatgatcaaccacttctcttgaaatgtgtcctgtcctctacaatggaccatgtgaatgttaactcattcactctacacgtctaccagctgcactggtccctgagtgttgcgtgtgtgctggaaggaggcgagagtgttcttgcagaacttgctgtctgtgagccaagccaggctcagagatgacaccgaacttcggaagtgtgcattcatctcccaggcttctgccacgatgcaccttccagccaccataggagactacacagacttctattcctctcggcagcatgctaccaacgtcggaatcatgttcagggacaaggagaatgcgttgatgccaaattggctgcacttaccagtgggctaccatggccgtgcctcctctgtcgtggtgtctggcaccccaatccgaaggcccatgggacagatgaaacctgatgactctaagcctcccgtatatggtgcctgcaagctcttggacatggagctggaaatggctttttttgtaggccctggaaacagattgggagagccgatccccatttccaaggcccatgagcacatttttggaatggtccttatgaacgactggagtgcacgagacattcagaagtgggagtatgtccctctcgggccattccttgggaagagttttgggaccactgtctctccgtgggtggtgcccatggatgctctcatgccctttgctgtgcccaacccgaagcaggaccccaggcccctgccgtatctgtgccatgacgagccctacacatttgacatcaacctctctgttaacctgaaaggagaaggaatgagccaggcggctaccatatgcaagtccaattttaagtacatgtactggacgatgctgcagcagctcactcaccactctgtcaacggctgcaacctgcggccgggggacctcctggcttctgggaccatcagcgggccggagccagaaaacttcggctccatgttggaactgtcgtggaagggaacgaagcccatagacctggggaatggtcagaccaggaagtttctgctggacggggatgaagtcatcataacagggtactgccagggggatggttaccgcatcggctttggccagtgtgctggaaaagtgctgcctgctctcctgccatcatgagattttctctgctcttctggaaacaaagggctcaagcacccctttcaaccctgtgactggggtcctccctcgggctgtaggcctggtccgccattcagtgacaaataaagccattgtgctctgaggcctgcactgccgcagatgca

SEQ ID NO: 452987 - DNA, 1811 bp, Homo sapiens
tgtaagggtggcgagactgtggaggacctggagctggcgggggtcagggtaggggggaggggcagggctcggggttcgggggcggggtgttcacggtgagaccaaaagtcaggtaggagcctccggggtccctgctgtgtcacccggacaggccgtgggggcgggcaggggggcggggccgggcctgaccacagcggccgagttcagtcctgctctccgcacgccaccttaggcccgcagccgtgccgggtgctcttcagcatgtccttcatcccggtggccgaggattccgacttccccatccacaacctgccctacggcgtcttctcgaccagaggcgacccaagaccgaggataggtgtggccattggcgaccagatcctggacctcagcatcatcaagcacctctttactggtcctgtcctctccaaacaccaggatgtcttcaatcagcctacactcaacagcttcatgggcctgggtcaggctgcctggaaggaggcgagagtgttcttgcagaacttgctgtctgtgagccaagccaggctcagagatgacaccgaacttcggaagtgtgcattcatctcccaggcttctgccacgatgcaccttccagccaccataggagactacacagacttctattcctctcggcagcatgctaccaacgtcggaatcatgttcagggacaaggagaatgcgttgatgccaaattggctgcacttaccagtgggctaccatggccgtgcctcctctgtcgtggtgtctggcaccccaatccgaaggcccatgggacagatgaaacctgatgactctaagcctcccgtatatggtgcctgcaagctcttggacatggagctggaaatggctttttttgtaggccctggaaacagattgggagagccgatccccatttccaaggcccatgagcacatttttggaatggtccttatgaacgactggagtgcacgagacattcagaagtgggagtatgtccctctcgggccattccttgggaagagttttgggaccactgtctctccgtgggtggtgcccatggatgctctcatgccctttgctgtgcccaacccgaagcaggaccccaggcccctgccgtatctgtgccatgacgagccctacacatttgacatcaacctctctgttaacctgaaaggagaaggaatgagccaggcggctaccatatgcaagtccaattttaagtacatgtactggacgatgctgcagcagctcactcaccactctgtcaacggctgcaacctgcggccgggggacctcctggcttctgggaccatcagcgggccggagccagaaaacttcggctccatgttggaactgtcgtggaagggaacgaagcccatagacctggggaatggtcagaccaggaagtttctgctggacggggatgaagtcatcataacagggtactgccagggggatggttaccgcatcggctttggccagtgtgctggaaaagtgctgcctgctctcctgccatcatgagattttctctgctcttctggaaacaaagggctcaagcacccctttcaaccctgtgactggggtcctccctcgggctgtaggcctggtccgccattcagtgacaaataaagccattgtgctctgaggcctgcactgccgcagatgcaaaaaaaaaaaaaacaaaacaaagcacacacaaccaccgaaccaaccacacagccagaaaccgccgcgaggcactacacggcggccacacaatagggcgccaaagcgcgcgggcaacagagaccccacacacagccgagagaccg

SEQ ID NO: 452988 - DNA, 1772 bp, Homo sapiens
  misc_feature (1328)..(1328): n is a, c, g, or t
tgtaagggtggcgagactgtggaggacctggagctggcgggggtcagggtaggggggaggggcagggctcggggttcgggggcggggtgttcacggtgagaccaaaagtcaggtaggagcctccggggtccctgctgtgtcacccggacaggccgtgggggcgggcaggggggcggggccgggcctgaccacagcggccgagttcagtcctgctctccgcacgccaccttaggcccgcagccgtgccgggtgctcttcagcatgtccttcatcccggtggccgaggattccgacttccccatccacaacctgccctacggcgtcttctcgaccagaggcgacccaagaccgaggataggtgtggccattggcgaccagatcctggacctcagcatcatcaagcacctctttactggtcctgtcctctccaaacaccaggatgtcttcaatcagcctacactcaacagcttcatgggcctgggtcaggctgcctggaaggaggcgagagtgttcttgcagaacttgctgtctgtgagccaagccaggctcagagatgacaccgaacttcggaagtgtgcattcatctcccaggcttctgccacgatgcaccttccagccaccataggagactacacagacttctattcctctcggcagcatgctaccaacgtcggaatcatgttcagggacaaggagaatgcgttgatgccaaattggctgcacttaccagtgggctaccatggccgtgcctcctctgtcgtggtgtctggcaccccaatccgaaggcccatgggacagatgaaacctgatgactctaagcctcccgtatatggtgcctgcaagctcttggacatggagctggaaatggctttttttgtaggccctggaaacagattgggagagccgatccccatttccaaggcccatgagcacatttttggaatggtccttatgaacgactggagtgcacgagacattcagaagtgggagtatgtccctctcgggccattccttgggaagagttttgggaccactgtctctccgtgggtggtgcccatggatgctctcatgccctttgctgtgcccaacccgaagcaggaccccaggcccctgccgtatctgtgccatgacgagccctacacatttgacatcaacctctctgttaacctgaaaggagaaggaatgagccaggcggctaccatatgcaagtccaattttaagtacatgtactggacgatgctgcagcagctcactcaccactctgtcaacggctgcaacctgcggccgggggacctcctggcttctgggaccatcagcgggccggtgantatctggctgcactgagggctgcccacgcagagcatccctgctccccacacagccccaagggccctcagctcagcctcgagaagagatttcaggcccgaggagccagaaaacttcggctccatgttggaactgtcgtggaagggaacgaagcccatagacctggggaatggtcagaccaggaagtttctgctggacggggatgaagtcatcataacagggtactgccagggggatggttaccgcatcggctttggccagtgtgctggaaaagtgctgcctgctctcctgccatcatgagattttctctgctcttctggaaacaaagggctcaagcacccctttcaaccctgtgactggggtcctccctcgggctgtaggcctggtccgccattcagtgacaaataaagccattgtgctctgaggcctgcactgccgcagatgca

SEQ ID NO: 452989 - DNA, 1565 bp, Homo sapiens
tgtaagggtggcgagactgtggaggacctggagctggcgggggtcagggtaggggggaggggcagggctcggggttcgggggcggggtgttcacggtgagaccaaaagtcaggtaggagcctccggggtccctgctgtgtcacccggacaggccgtgggggcgggcaggggggcggggccgggcctgaccacagcggccgagttcagtcctgctctccgcacgccaccttaggcccgcagccgtgccgggtgctcttcagcatgtccttcatcccggtggccgaggattccgacttccccatccacaacctgccctacggcgtcttctcgaccagaggcgacccaagaccgaggataggtgtggccattggcgaccagatcctggacctcagcatcatcaagcacctctttactggtcctgtcctctccaaacaccaggatgtcttcaatcagcctacactcaacagcttcatgggcctgggtcaggctgcctggaaggaggcgagagtgttcttgcagaacttgctgtctgtgagccaagccaggctcagagatgacaccgaacttcggaagtgtgcattcatctcccaggcttctgccacgatgcaccttccagccaccataggagactacacagacttctattcctctcggcagcatgctaccaacgtcggaatcatgttcagggacaaggagaatgcgttgatgccaaattggctgcacttaccagtgggctaccatggccgtgcctcctctgtcgtggtgtctggcaccccaatccgaaggcccatgggacagatgaaacctgatgactctaagcctcccgtatatggtgcctgcaagctcttggacatggagctggaaatggctttttttgtaggccctggaaacagattgggagagccgatccccatttccaaggcccatgagcacatttttggaatggtccttatgaacgactggagtgcacgagacattcagaagtgggagtatgtccctctcgggccattccttgggaagagttttgggaccactgtctctccgtgggtggtgcccatggatgctctcatgccctttgctgtgcccaacccgaagcaggaccccaggcccctgccgtatctgtgccatgacgagccctacacatttgacatcaacctctctgttaacctgaaaggagaaggaatgagccaggcggctaccatatgcaagtccaattttaaggagccagaaaacttcggctccatgttggaactgtcgtggaagggaacgaagcccatagacctggggaatggtcagaccaggaagtttctgctggacggggatgaagtcatcataacagggtactgccagggggatggttaccgcatcggctttggccagtgtgctggaaaagtgctgcctgctctcctgccatcatgagattttctctgctcttctggaaacaaagggctcaagcacccctttcaaccctgtgactggggtcctccctcgggctgtaggcctggtccgccattcagtgacaaataaagccattgtgctctgaggcctgcactgccgcagatgca

SEQ ID NO: 452990 - DNA, 803 bp, Homo sapiens
  misc_feature (92)..(92): n is a, c, g, or t
cggccgccctcttaaaaacaatgaatccccccgggtttaagtatttgggccagaggcccataaaccaatttttgtgaatggtctcttatgancgcgtgaagtgcacgagacattcagaagtgggagtatgtccctctcgggccattccttgggaagagttttgggaccactgtctctccgtgggtggtgcccatggatgctctcatgccctttgctgtgcccaacccgaagcaggaccccaggcccctgccgtatctgtgccatgacgagccctacacatttgacatcaacctctctgttaacctgaaaggagaaggaatgagccaggcggctaccatatgcaagtccaattttaagtacatgtactggacgatgctgcagcagctcactcaccactctgtcaacggctgcaacctgcggccgggggacctcctggcttctgggaccatcagcgggccggagccagaaaacttcggctccatgttggaactgtcgtggaagggaacgaagcccatagacctggggaatggtcagaccaggaagtttctgctggacggggatgaagtcatcataacagggtactgccagggggatggttaccgcatcggctttggccagtgtgctggaaaagtgctgcctgctctcctgccatcatgagattttctctgctcttctggaaacaaagggctcaagcacccctttcaaccctgtgactggggtcctccctcgggctgtaggcctggtccgccattcagtgacaaataaagccattgtgctctgaggcctgcactgccgcagatgca

SEQ ID NO: 452991 - DNA, 853 bp, Homo sapiens
tgtaagggtggcgagactgtggaggacctggagctggcgggggtcagggtaggggggaggggcagggctcggggttcgggggcggggtgttcacggtgagaccaaaagtcaggcccgcagccgtgccgggtgctcttcagcatgtccttcatcccggtggccgaggattccgacttccccatccacaacctgccctacggcgtcttctcgaccagaggcgacccaagaccgaggataggtgtggccattggcgaccagatcctggacctcagcatcatcaagcacctctttactggtcctgtcctctccaaacaccaggatgtcttcaatcagcctacactcaacagcttcatgggcctgggtcaggctgcctggaaggaggcgagagtgttcttgcagaacttgctgtctgtgagccaagccaggctcagagatgacaccgaacttcggaagtgtgcattcatctcccaggcttctgccacgatgcaccttccagccaccataggagactacacagacttctattcctctcggcagcatgctaccaacgtcggaatcatgttcagggacaaggagaatgcgttgatgccaaattggctgcacttaccagtgggctaccatggccgtgcctcctctgtcgtggtgtctggcaccccaatccgaaggcccatgggacagatgaaacctgatgactctaggctccgttatgggctgggggccctggccttgcggcggaacgggttgtgtggcccggagcacgtgtgggcgcctcccttcaggccgggactttgtgggctttacgacggggcgcgcgcaaaggggggcctcgggcctgggagtggcgctccggcgg

SEQ ID NO: 452992 - DNA, 1667 bp, Homo sapiens
tgtaagggtggcgagactgtggaggacctggagctggcgggggtcagggtaggggggaggggcagggctcggggttcgggggcggggtgttcacggtgagaccaaaagtcaggtaggagcctccggggtccctgctgtgtcacccggacaggccgtgggggcgggcaggggggcggggccgggcctgaccacagcggccgagttcagtcctgctctccgcacgccaccttaggcccgcagccgtgccgggtgctcttcagcatgtccttcatcccggtggccgaggattccgacttccccatccacaacctgccctacggcgtcttctcgaccagaggcgacccaagaccgaggataggtgtggccattggcgaccagatcctggacctcagcatcatcaagcacctctttactggtcctgtcctctccaaacaccaggatgtcttcaatcagcctacactcaacagcttcatgggcctgggtcaggctgcctggaaggaggcgagagtgttcttgcagaacttgctgtctgtgagccaagccaggctcagagatgacaccgaacttcggaagtgtgcattcatctcccaggcttctgccacgatgcaccttccagccaccataggagactacacagacttctattcctctcggcagcatgctaccaacgtcggaatcatgttcagggacaaggagaatgcgttgatgccaaattggctgcacttaccagtgggctaccatggccgtgcctcctctgtcgtggtgtctggcaccccaatccgaaggcccatgggacagatgaaacctgatgactctaagcctcccgtatatggtgcctgcaagctcttggacatggagctggaaatggctttttttgtaggccctggaaacagattgggagagccgatccccatttccaaggcccatgagcacatttttggaatggtccttatgaacgactggagtgcacgagacattcagaagtgggagtatgtccctctcgggccattccttgggaagagttttgggaccactgtctctccgtgggtggtgcccatggatgctctcatgccctttgctgtgcccaacccgaagcaggaccccaggcccctgccgtatctgtgccatgacgagccctacacatttgacatcaacctctctgttaacctgaaaggagaaggaatgagccaggcggctaccatatgcaagtccaattttaagtacatgtactggacgatgctgcagcagctcactcaccactctgtcaacggctgcaacctgcggccgggggacctcctggcttctgggaccatcagcgggccggagccagaaaacttcggctccatgttggaactgtcgtggaagggaacgaagcccatagacctggggaatggtcagaccaggaagtttctgctggacggggatgaagtcatcataacagggtactgccagggggatggttaccgcatcggctttggccagtgtgctggaaaagtgctgcctgctctcctgccatcatgagattttctctgctcttctggaaacaaagggctcaagcacccctttcaaccctgtgactggggtcctccctcgggctgtaggcctggtccgccattcagtgacaaataaagccattgtgctctgaggcctgcactgccgcagatgca

SEQ ID NO: 452993 - DNA, 1440 bp, Homo sapiens
aacggctaggtacgaggctgggtggtgagtcagcatgtccttcatcccggtggccgaggattccgacttccccatccacaacctgccctacggcgtcttctcgaccagaggcgacccaagaccgaggataggtgtggccattggcgaccagatcctggacctcagcatcatcaagcacctctttactggtcctgtcctctccaaacaccaggatgtcttcaatcagcctacactcaacagcttcatgggcctgggtcaggctgcctggaaggaggcgagagtgttcttgcagaacttgctgtctgtgagccaagccaggctcagagatgacaccgaacttcggaagtgtgcattcatctcccaggcttctgccacgatgcaccttccagccaccataggagactacacagacttctattcctctcggcagcatgctaccaacgtcggaatcatgttcagggacaaggagaatgcgttgatgccaaattggctgcacttaccagtgggctaccatggccgtgcctcctctgtcgtggtgtctggcaccccaatccgaaggcccatgggacagatgaaacctgatgactctaagcctcccgtatatggtgcctgcaagctcttggacatggagctggaaatggctttttttgtaggccctggaaacagattgggagagccgatccccatttccaaggcccatgagcacatttttggaatggtccttatgaacgactggagtgcacgagacattcagaagtgggagtatgtccctctcgggccattccttgggaagagttttgggaccactgtctctccgtgggtggtgcccatggatgctctcatgccctttgctgtgcccaacccgaagcaggaccccaggcccctgccgtatctgtgccatgacgagccctacacatttgacatcaacctctctgttaacctgaaaggagaaggaatgagccaggcggctaccatatgcaagtccaattttaagtacatgtactggacgatgctgcagcagctcactcaccactctgtcaacggctgcaacctgcggccgggggacctcctggcttctgggaccatcagcgggccggagccagaaaacttcggctccatgttggaactgtcgtggaagggaacgaagcccatagacctggggaatggtcagaccaggaagtttctgctggacggggatgaagtcatcataacagggtactgccagggggatggttaccgcatcggctttggccagtgtgctggaaaagtgctgcctgctctcctgccatcatgagattttctctgctcttctggaaacaaagggctcaagcacccctttcaaccctgtgactggggtcctccctcgggctgtaggcctggtccgccattcagtgacaaataaagccattgtgctctgaggcctgcactgccgcagatgca

SEQ ID NO: 452994 - DNA, 1366 bp, Homo sapiens
cgggcgagactgtggaggacctggagctggcgggggtcaggccaagaccgaggataggtgtggccattggcgaccagatcctggacctcagcatcatcaagcacctctttactggtcctgtcctctccaaacaccaggatgtcttcaatcagcctacactcaacagcttcatgggcctgggtcaggctgcctggaaggaggcgagagtgttcttgcagaacttgctgtctgtgagccaagccaggctcagagatgacaccgaacttcggaagtgtgcattcatctcccaggcttctgccacgatgcaccttccagccaccataggagactacacagacttctattcctctcggcagcatgctaccaacgtcggaatcatgttcagggacaaggagaatgcgttgatgccaaattggctgcacttaccagtgggctaccatggccgtgcctcctctgtcgtggtgtctggcaccccaatccgaaggcccatgggacagatgaaacctgatgactctaagcctcccgtatatggtgcctgcaagctcttggacatggagctggaaatggctttttttgtaggccctggaaacagattgggagagccgatccccatttccaaggcccatgagcacatttttggaatggtccttatgaacgactggagtgcacgagacattcagaagtgggagtatgtccctctcgggccattccttgggaagagttttgggaccactgtctctccgtgggtggtgcccatggatgctctcatgccctttgctgtgcccaacccgaagcaggaccccaggcccctgccgtatctgtgccatgacgagccctacacatttgacatcaacctctctgttaacctgaaaggagaaggaatgagccaggcggctaccatatgcaagtccaattttaagtacatgtactggacgatgctgcagcagctcactcaccactctgtcaacggctgcaacctgcggccgggggacctcctggcttctgggaccatcagcgggccggagccagaaaacttcggctccatgttggaactgtcgtggaagggaacgaagcccatagacctggggaatggtcagaccaggaagtttctgctggacggggatgaagtcatcataacagggtactgccagggggatggttaccgcatcggctttggccagtgtgctggaaaagtgctgcctgctctcctgccatcatgagattttctctgctcttctggaaacaaagggctcaagcacccctttcaaccctgtgactggggtcctccctcgggctgtaggcctggtccgccattcagtgacaaataaagccattgtgctctgaggcctgcactgccgcagatgca

SEQ ID NO: 452995 - DNA, 1634 bp, Homo sapiens
tgtaagggtggcgagactgtggaggacctggagctggcgggggtcagggtaggggggaggggcagggctcggggttcgggggcggggtgttcacggtgagaccaaaagtcaggtaggagcctccggggtccctgctgtgtcacccggacaggccgtgggggcgggcaggggggcggggccgggcctgaccacagcggccgagttcagtcctgctctccgcacgccaccttaggcccgcagccgtgccgggtgctcttcagcatgtccttcatcccggtggccgaggattccgacttccccatccacaacctgccctacggcgtcttctcgaccagaggcgaccagatcctggacctcagcatcatcaagcacctctttactggtcctgtcctctccaaacaccaggatgtcttcaatcagcctacactcaacagcttcatgggcctgggtcaggctgcctggaaggaggcgagagtgttcttgcagaacttgctgtctgtgagccaagccaggctcagagatgacaccgaacttcggaagtgtgcattcatctcccaggcttctgccacgatgcaccttccagccaccataggagactacacagacttctattcctctcggcagcatgctaccaacgtcggaatcatgttcagggacaaggagaatgcgttgatgccaaattggctgcacttaccagtgggctaccatggccgtgcctcctctgtcgtggtgtctggcaccccaatccgaaggcccatgggacagatgaaacctgatgactctaagcctcccgtatatggtgcctgcaagctcttggacatggagctggaaatggctttttttgtaggccctggaaacagattgggagagccgatccccatttccaaggcccatgagcacatttttggaatggtccttatgaacgactggagtgcacgagacattcagaagtgggagtatgtccctctcgggccattccttgggaagagttttgggaccactgtctctccgtgggtggtgcccatggatgctctcatgccctttgctgtgcccaacccgaagcaggaccccaggcccctgccgtatctgtgccatgacgagccctacacatttgacatcaacctctctgttaacctgaaaggagaaggaatgagccaggcggctaccatatgcaagtccaattttaagtacatgtactggacgatgctgcagcagctcactcaccactctgtcaacggctgcaacctgcggccgggggacctcctggcttctgggaccatcagcgggccggagccagaaaacttcggctccatgttggaactgtcgtggaagggaacgaagcccatagacctggggaatggtcagaccaggaagtttctgctggacggggatgaagtcatcataacagggtactgccagggggatggttaccgcatcggctttggccagtgtgctggaaaagtgctgcctgctctcctgccatcatgagattttctctgctcttctggaaacaaagggctcaagcacccctttcaaccctgtgactggggtcctccctcgggctgtaggcctggtccgccattcagtgacaaataaagccattgtgctctgaggcctgcactgccgcagatgca

SEQ ID NO: 452996 - DNA, 1518 bp, Homo sapiens
  misc_feature (1493)..(1493): n is a, c, g, or t
  misc_feature (1500)..(1500): n is a, c, g, or t
  misc_feature (1508)..(1508): n is a, c, g, or t
tgtaagggtggcgagactgtggaggacctggagctggcgggggtcagggtaggggggaggggcagggctcggggttcgggggcggggtgttcacggtgagaccaaaagtcaggtaggagcctccggggtccctgctgtgtcacccggacaggccgtgggggcgggcaggggggcggggccgggcctgaccacagcggccgagttcagtcctgctctccgcacgccaccttaggcccgcagccgtgccgggtgctcttcagcatgtccttcatcccggtggccgaggattccgacttccccatccacaacctgccctacggcgtcttctcgaccagaggcgacccaagaccgaggataggtgtggccattggcgaccagatcctggacctcagcatcatcaagcacctctttactggtcctgtcctctccaaacaccaggatgtcttcaatcagcctacactcaacagcttcatgggcctgggtcaggctgcctggaaggaggcgagagtgttcttgcagaacttgctgtctgtgagccaagccaggctcagagatgacaccgaacttcggaagtgtgcattcatctcccaggcttctgccacgatgcaccttccagccaccataggagactacacagacttctattcctctcggcagcatgctaccaacgtcggaatcatgttcagggacaaggagaatgcgttgatgccaaattggctgcacttaccagtgggctaccatggccgtgcctcctctgtcgtggtgtctggcaccccaatccgaaggcccatgggacagatgaaacctgatgactctaagcctcccgtatatggtgcctgcaagctcttggacatggagctggaaatggctttttttgtaggccctggaaacagattgggagagccgatccccatttccaaggcccatgagcacatttttggaatggtccttatgaacgactggagtgcacgagacattcagaagtgggagtatgtccctctcgggccattccttgggaagagttttgggaccactgtctctccgtgggtggtgcccatggatgctctcatgccctttgctgtgcccaacccgaagcaggaccccaggcccctgccgtatctgtgccatgacgagccctacacatttgacatcaacctctctgttaacctgaaaggagaaggaatgagccaggcggctaccatatgcaagtccaattttaagtacatgtactggacgatgctgcagcagctcactcaccactctgtcaacggctgcaacctgcggccgggggacctcctggcttctgggaccatcagcgggccggagccagaaaacttcggctccatgttggaactgtcgtggaagggaacgaagcccatagacctggggaatggtcagaccaggaagtttctgctggacggggatgaagtcatcataacagggtactgccagggggatggttaccgcatcggctttggccagtgtgctggggnttaagcncccctttncctgtgactg

SEQ ID NO: 452997 - DNA, 894 bp, Homo sapiens
gtggctgtctagaggatccctcataggttcgcaggatgactctaagcctcccgtatatggtgcctgcaagctcttggacatggagctggaaatggctttttttgtaggccctggaaacagattgggagagccgatccccatttccaaggcccatgagcacatttttggaatggtccttatgaacgactggagtgcacgagacattcagaagtgggagtatgtccctctcgggccattccttgggaagagttttgggaccactgtctctccgtgggtggtgcccatggatgctctcatgccctttgctgtgcccaacccgaagcaggaccccaggcccctgccgtatctgtgccatgacgagccctacacatttgacatcaacctctctgttaacctgaaaggagaaggaatgagccaggcggctaccatatgcaagtccaattttaagtacatgtactggacgatgctgcagcagctcactcaccactctgtcaacggctgcaacctgcggccgggggacctcctggcttctgggaccatcagcgggccggagccagaaaacttcggctccatgttggaactgtcgtggaagggaacgaagcccatagacctggggaatggtcagaccaggaagtttctgctggacggggatgaagtcatcataacagggtactgccagggggatggttaccgcatcggctttggccagtgtgctggaaaagtgctgcctgctctcctgccatcatgagattttctctgctcttctggaaacaaagggctcaagcacccctttcaaccctgtgactggggtcctccctcgggctgtaggcctggtccgccattcagtgacaaataaagccattgtgctctgaggcctgcactgccgcagatgca

SEQ ID NO: 452998 - DNA, 1707 bp, Homo sapiens
tgtaagggtggcgagactgtggaggacctggagctggcgggggtcagggtaggggggaggggcagggctcggggttcgggggcggggtgttcacggtgagaccaaaagtcaggtaggagcctccggggtccctgctgtgtcacccggacaggccgtgggggcgggcaggggggcggggccgggcctgaccacagcggccgagttcagtcctgctctccgcacgccaccttaggcccgcagccgtgccgggtgctcttcagcatgtccttcatcccggtggccgaggattccgacttccccatccacaacctgccctacggcgtcttctcgaccagaggcgacccaagaccgaggataggtgtggccattggcgaccagatcctggacctcagcatcatcaagcacctctttactggtcctgtcctctccaaacaccaggatgtcttcaatcagcctacactcaacagcttcatgggcctgggtcaggctgcctggaaggaggcgagagtgttcttgcagaacttgctgtctgtgagccaagccaggctcagagatgacaccgaacttcggaagtgtgcattcatctcccaggcttctgccacgatgcaccttccagccaccataggagactacacagacttctattcctctcggcagcatgctaccaacgtcggaatcatgttcagggacaaggagaatgcgttgatgccaaattggctgcacttaccagtgggctaccatggccgtgcctcctctgtcgtggtgtctggcaccccaatccgaaggcccatgggacagatgaaacctgatgactctaagcctcccgtatatggtgcctgcaagctcttggacatggagctggaaatggctttttttgtaggccctggaaacagattgggagagccgatccccatttccaaggcccatgagcacatttttggaatggtccttatgaacgactggagtgcacgagacattcagaagtgggagtatgtccctctcgggccattccttgggaagagttttgggaccactgtctctccgtgggtggtgcccatggatgctctcatgccctttgctgtgcccaacccgaagcaggtaagcacattctctgcaggaagctcccaaacccagccctgctgcctctgaggctgcttgcccactgagtggacatgccaggcatgcagaccatcaggagggaagctctgtgcccacggcatgcccacagcagagtgcctgggagttcctggccacgattacttccaggcagccagggcatcattctcccttgtggtttccctggccctggcacagttcttggagaaaacacagaattttgtaaccttaagaatcttgcaagacccgggggatctggccagttggcaggaggagtccctgcaggtaccaacattgcacaacctcccaggtggccatcaaatcttgttctgtgcaaatggcgccacctggaccccaactcatagaatgcagcttggagcccagcaacagggagtccctgcagcctctggttcccggcaccgcttggtctaccactgggtctaggccttgacccctggttccagtcctcccttctcagcctgttgcaatctgccccactccatcactggcaacacctggccagagtcacctgtgacccgatagtcagtgtcatgaccttgtgtccccttcagcatggacttcctgtggccc

SEQ ID NO: 452999 - DNA, 2925 bp, Homo sapiens
  misc_feature (3)..(3): n is a, c, g, or t
  misc_feature (154)..(154): n is a, c, g, or t
  misc_feature (168)..(168): n is a, c, g, or t
  misc_feature (216)..(216): n is a, c, g, or t
  misc_feature (230)..(230): n is a, c, g, or t
  misc_feature (286)..(286): n is a, c, g, or t
  misc_feature (451)..(451): n is a, c, g, or t
  misc_feature (558)..(558): n is a, c, g, or t
  misc_feature (594)..(594): n is a, c, g, or t
  misc_feature (670)..(670): n is a, c, g, or t
  misc_feature (676)..(676): n is a, c, g, or t
  misc_feature (682)..(682): n is a, c, g, or t
  misc_feature (699)..(699): n is a, c, g, or t
  misc_feature (2227)..(2227): n is a, c, g, or t
  misc_feature (2543)..(2543): n is a, c, g, or t
ggncactctgcagacagctccagacaatcaggcactcgtcacacagagtcttcctctcgtggacaggctgcgtcatcccatgaacaggcaagatcaagtgcaggagaaagacatggatcccaccaccagcagtcagcagacagctccagacacncaggcattgggcanggacaagcttcatctgcagtcagagacagtggacaccgagggtacagnggtagtcaggccantgacagtgagggacattcagaagactcagacacacagtcagtgtcagcacaggganaagctgggccccatcagcagagccacaaagagtccgcacgtggccagtcaggggaaagctctggacgttcagggtctttcctctaccaggtgagcactcatgaacagtctgagtccacccatggacagtctgcgcccagcactggaggaagacaaggatcccacnatgatcaggcacaagacagctccaggcactcagcatcccaagagggtcaggacaccattcgtggacacccggggccaagcagaggaggaagacaggggtcccaccangagcaatcggtagataggtctggacactcagggtcncatcacagccacaccacatcccagggaaggtctgatgcctcccgtgggcagtcaggatccagaagtgcaagcaganaaacanatgacnaggaacaatcaggaganggctctaggcactcagggtcgcatcatcatgaagcttccactcaggcggacagctctagacactcacagtccggccagggacaatcagcggggcccaggacaagcaggaaccagggatccagtgttagccaggacagtgacagtcagggacactcagaagactctgagaggtggtctgggtctgcttccagaaaccatcgtggatctgctcaggagcagtcaagagatggctccagacaccccaggtcccatcacgaagacagagccggtcacgggcactctgcagagagctccagacaatcaggcactcatcatgcagagaattcctctggtggacaggctgcatcatcccatgaacaggcaagatcaagtgcaggagagagacatggatcccaccaccagcagtcagcagacagctccagacactcaggcattgggcacggacaagcttcatctgcagtcagagacagtggacaccgagggtccagtggtagtcaggccagtgacagtgagggacattcagaagactcagacacacagtcagtgtcagcccacggacaggctgggccccatcagcagagccaccaagagtccacacgtggccggtcagcaggaaggtctggacgttcagggtctttcctctaccaggtgagcactcatgaacagtctgagtctgcccatggacgggctgggcccagtactggaggaagacaaggatcccgccacgagcaggcacgagacagctccaggcactcagcgtcccaagagggtcaggacaccattcgtggacacccggggtcaaggagaggaggaagacagggatcctaccacgagcaatcggtagataggtctggacactcagggtcccatcacagccacaccacatcccagggaaggtctgatgcctcccatgggcagtcaggatccagaagtgcaagcagagaaacacgtaatgaggaacagtcaggagacggctccaggcactcagggtcgcgtcaccatgaagcttccactcaggctgacagctctagacactcacagtccggccagggtgaatcagcggggtccaggagaagcaggcgccagggatccagtgttagccaggacagtgacagtgaggcatacccagaggactctgagaggcgatctgagtctgcttccagaaaccatcatggatcttctcgggagcagtcaagagatggctccagacaccccggatcctctcaccgcgatacagccagtcatgtacagtcttcacctgtacagtcagactctagtaccgctaaggaacatggtcactttagtagtctttcacaagattctgcgtatcactcaggaatacagtcacgtggcagtcctcacagttctagttcttatcattatcaatctgagggcactgaaaggcaaaaaggtcaatcaggtttagtttggagacatggcagctatggtagtgcagattatgattatggtgaatccgggtttagacactctcagcacggaagtgttagttacaattccaatcctgttnttttcaaggaaagatctgatatctgtaaagcaagtgcgtttggtaaagatcatccaaggtattatgcaacgtatattaataaggacccaggtttatgtggccattctagtgatatatcgaaacaactgggatttagtcagtcacagagatactattactatgagtaagaaattaatggcaaaggaattaatccaagaatagaagaatgaagcaagttcactttcaatcaagaaacttcataatactttcagggaagttatcttttcctgtcaatctgtttaaaatatgctatagtatttcattagtttggtggtancttatttttattgtgtaatgatctttaaacgctatatttcagaaatattaaatggaagaaatcaatatcatggagagctaactttagaaaactagctggagtattttaggagattctgggtcaagtaatgttttatgtttttgaaagtttaagttttagacactccccaaatttctaaattaatctttttcagaaatatcgaaggagccaaaaatataaaacagttctgataccaaagtggctatatcaacatcagggctagcacatctttctctattatccttctattggaattctagtattctgtattcaaaaaatcatcttggacataattaatattttagtaagctgcatctaaattaaaaataaactattcatcata

SEQ ID NO: 453000 - DNA, 288 bp, Homo sapiens
gtctccctatgagcaactgtggctccgagaggtgataggttgtgacgtgcccgatggggttccagccgctttccacctgcagccctgcagctgcctcccctcaggtttgctggtgctcgaagcaaggactggcttgacttctgtcctgagaaaggtggactgggttctgttctgatgtatagtttacaaatcgtgaaactccagcatagagtgcatataatcatgttcacacccatgcaaccaccttctccctccaagatgcaggacaattctctcaccccctcccag

SEQ ID NO: 453001 - DNA, 2677 bp, Homo sapiens
actcactatagggctcgagcggccgcccgggcaggcgtctgcccgcagccatgagcgtgctcggccccggtggagcccgcagtcctctagattagtctccaccgccgtccaggacccacttgcagcatggagtcgcccgcctcgagccagcccgccagcatgccccagtccaaaggaaaatccaagaggaagaaggatctacggatatcctgcatgtccaagccacccgcacccaaccccacacccccccggaacctggactcccggaccttcatcaccattggagacagaaactttgaggtggaggctgatgacttggtgaccatctcagaactgggccgtggagcctatggggtggtagagaaggtgcggcacgcccagagcggcaccatcatggccgtgaagcggatccgggccaccgtgaactcacaggagcagaagcggctgctcatggacctggacatcaacatgcgcacggtcgactgtttctacactgtcaccttctacggggcactattcagagagggagacgtgtggatctgcatggagctcatggacacatccttggacaagttctaccggaaggtgctggataaaaacatgacaattccagaggacatccttggggagattgctgtgtctatcgtgcgggccctggagcatctgcacagcaagctgtcggtgatccacagagatgtgaagccctccaatgtccttatcaacaaggagggccatgtgaagatgtgtgactttggcatcagtggctacttggtggactctgtggccaagacgatggatgccggctgcaagccctacatggcccctgagaggatcaacccagagctgaaccagaagggctacaatgtcaagtccgacgtctggagcctgggcatcaccatgattgagatggccatcctgcggttcccttacgagtcctgggggaccccgttccagcagctgaagcaggtggtggaggagccgtccccccagctcccagccgaccgtttctcccccgagtttgtggacttcactgctcagtgcctgaggaagaaccccgcagagcgtatgagctacctggagctgatggagcaccccttcttcaccttgcacaaaaccaagaagacggacattgctgccttcgtgaaggagatcctgggagaagactcataggggctgggcctcggaccccactccggccctccagagccccacagccccatctgcgggggcagtgctcacccacaccataagctactgccatcctggcccagggcatctgggaggaaccgagggggctgctcccacctggctctgtggcgagccatttgtcccaagtgccaaagaagcagaccattggggctcccagccaggcccttgtcggccccaccagtgcctctccctgctgctcctaggacccgtctccagctgctgagatcctggactgagggggcctggatgccccctgtggatgctgctgcccctgcacagcaggctgccagtgcctgggtggatgggccaccgccttgcccagcctggatgccatccaagttgtatatttttttaatctctcgactgaatggactttgcacactttggcccagggtggccacacctctatcccggctttggtgcggggtacacaagaggggatgagttgtgtgaataccccaagactcccatgagggagatgccatgagccgcccaaggccttcccctggcactggcaaacagggcctctgcggagcacactggctcacccagtcctgcccgccaccgttatcggtgtcattcacctttcgtgttttttttaatttatcctctgttgattttttcttttgctttatgggtttggcttgtttttcttgcatggtttggagctgatcgcttctcccccaccccctagggtaccagcaggcagagccttgccctctgctcaggctggggtccagtgggaggggcccaagatctctgctcagagaagtgcagggggagccttccagctcactctccctgaggactggcttgacaggggctatgggtttgctttggtgttgtttttaaaaaaagaaaatatatttttttgaaaaaacgactgcccatcccgggtcctttccctgatgggttggggcagttacctggttgctgttttaattaaaaaaaaaaaaaaaaaaaaaacagaggcggggttccaccggggcctgctttccaacgtggccctcttataattaaagggaggctggtgtgggtaacgcagcaacttctttcacaacgacggggtcatcttggggagcccggggacccaccaatagtttgggggcttgtcacaccagccggcgctcttctccgggtaacactaacgacaccctttggggcgcccttatagggcaggggtggggtcgcgcgcccaaagaaaagggttccccgaggaattccccttcgtgggggggatctccccaccccgggggggccactctccgctggggaaatctcctgggcaacccccggggcgtggctggccaaccgggcaagtcgggggccaaggggaaacccttgacccacctcccgtgggagggaagcaagggggccgcacagagggcggagcgcgacacgggcggggtctccccccagtgtataccctaaggtggccccccagaaagaggggggtccggcaacaacc

SEQ ID NO: 453002 - DNA, 2801 bp, Homo sapiens
tggctggcaatggccttgctgacctcgagccgggcccacgtggggacctttggagcacagcctacgatcctggtgcaaggccggtggatgcagaggccagtccatataccacccaggcctgcgaggagcgtggtccccacccatccagcccatatgtgcaagtgcccttgacagagaggctggtcatatccatggtgaccatttatgggccacaacaggtccccatctgcgcagtgaaccctgtgctgagcaccttgcagacgtgatcttgcttcgtcctgcagcactgtgcggggcaggaaaatccaagaggaagaaggatctacggatatcctgcatgtccaagccacccgcacccaaccccacacccccccggaacctggactcccggaccttcatcaccattggagacagaaactttgaggtggaggctgatgacttggtgaccatctcagaactgggccgtggagcctatggggtggtagagaaggtgcggcacgcccagagcggcaccatcatggccgtgaagcggatccgggccaccgtgaactcacaggagcagaagcggctgctcatggacctggacatcaacatgcgcacggtcgactgtttctacactgtcaccttctacggggcactattcagagagggagacgtgtggatctgcatggagctcatggacacatccttggacaagttctaccggaaggtgctggataaaaacatgacaattccagaggacatccttggggagattgctgtgtctatcgtgcgggccctggagcatctgcacagcaagctgtcggtgatccacagagatgtgaagccctccaatgtccttatcaacaaggagggccatgtgaagatgtgtgactttggcatcagtggctacttggtggactctgtggccaagacgatggatgccggctgcaagccctacatggcccctgagaggatcaacccagagctgaaccagaagggctacaatgtcaagtccgacgtctggagcctgggcatcaccatgattgagatggccatcctgcggttcccttacgagtcctgggggaccccgttccagcagctgaagcaggtggtggaggagccgtccccccagctcccagccgaccgtttctcccccgagtttgtggacttcactgctcagtgcctgaggaagaaccccgcagagcgtatgagctacctggagctgatggagcaccccttcttcaccttgcacaaaaccaagaagacggacattgctgccttcgtgaaggagatcctgggagaagactcataggggctgggcctcggaccccactccggccctccagagccccacagccccatctgcgggggcagtgctcacccacaccataagctactgccatcctggcccagggcatctgggaggaaccgagggggctgctcccacctggctctgtggcgagccatttgtcccaagtgccaaagaagcagaccattggggctcccagccaggcccttgtcggccccaccagtgcctctccctgctgctcctaggacccgtctccagctgctgagatcctggactgagggggcctggatgccccctgtggatgctgctgcccctgcacagcaggctgccagtgcctgggtggatgggccaccgccttgcccagcctggatgccatccaagttgtatatttttttaatctctcgactgaatggactttgcacactttggcccagggtggccacacctctatcccggctttggtgcggggtacacaagaggggatgagttgtgtgaataccccaagactcccatgagggagatgccatgagccgcccaaggccttcccctggcactggcaaacagggcctctgcggagcacactggctcacccagtcctgcccgccaccgttatcggtgtcattcacctttcgtgttttttttaatttatcctctgttgattttttcttttgctttatgggtttggcttgtttttcttgcatggtttggagctgatcgcttctcccccaccccctagggtaccagcaggcagagccttgccctctgctcaggctggggtccagtgggaggggcccaagatctctgctcagagaagtgcagggggagccttccagctcactctccctgaggactggcttgacaggggctatgggtttgctttggtgttgtttttaaaaaaagaaaatatatttttttgaaaaaacgactgcccatcccgggtcctttccctgatgggttggggcagttacctggttgctgttttaattaaaaaaaaaaaaaaaaaaaaaacagaggcggggttccaccggggcctgctttccaacgtggccctcttataattaaagggaggctggtgtgggtaacgcagcaacttctttcacaacgacggggtcatcttggggagcccggggacccaccaatagtttgggggcttgtcacaccagccggcgctcttctccgggtaacactaacgacaccctttggggcgcccttatagggcaggggtggggtcgcgcgcccaaagaaaagggttccccgaggaattccccttcgtgggggggatctccccaccccgggggggccactctccgctggggaaatctcctgggcaacccccggggcgtggctggccaaccgggcaagtcgggggccaaggggaaacccttgacccacctcccgtgggagggaagcaagggggccgcacagagggcggagcgcgacacgggcggggtctccccccagtgtataccctaaggtggccccccagaaagaggggggtccggcaacaacc

SEQ ID NO: 453003 - DNA, 2751 bp, Homo sapiens
gaaggccggggcagcggaggcttccggcggccggtggatgcagaggccagtccatataccacccaggcctgcgaggagcgtggtccccacccatccagcccatatgtgcaagtgcccttgacagagaggctggtcatatccatggtgaccatttatgggccacaacaggtccccatctgcgcagtgaaccctgtgctgagcaccttgcagacgtgatcttgcttcgtcctgcagcactgtgcggggcaggaaaatccaagaggaagaaggatctacggatatcctgcatgtccaagccacccgcacccaaccccacacccccccggaacctggactcccggaccttcatcaccattggagacagaaactttgaggtggaggctgatgacttggtgaccatctcagaactgggccgtggagcctatggggtggtagagaaggtgcggcacgcccagagcggcaccatcatggccgtgaagcggatccgggccaccgtgaactcacaggagcagaagcggctgctcatggacctggacatcaacatgcgcacggtcgactgtttctacactgtcaccttctacggggcactattcagagagggagacgtgtggatctgcatggagctcatggacacatccttggacaagttctaccggaaggtgctggataaaaacatgacaattccagaggacatccttggggagattgctgtgtctatcgtgcgggccctggagcatctgcacagcaagctgtcggtgatccacagagatgtgaagccctccaatgtccttatcaacaaggagggccatgtgaagatgtgtgactttggcatcagtggctacttggtggactctgtggccaagacgatggatgccggctgcaagccctacatggcccctgagaggatcaacccagagctgaaccagaagggctacaatgtcaagtccgacgtctggagcctgggcatcaccatgattgagatggccatcctgcggttcccttacgagtcctgggggaccccgttccagcagctgaagcaggtggtggaggagccgtccccccagctcccagccgaccgtttctcccccgagtttgtggacttcactgctcagtgcctgaggaagaaccccgcagagcgtatgagctacctggagctgatggagcaccccttcttcaccttgcacaaaaccaagaagacggacattgctgccttcgtgaaggagatcctgggagaagactcataggggctgggcctcggaccccactccggccctccagagccccacagccccatctgcgggggcagtgctcacccacaccataagctactgccatcctggcccagggcatctgggaggaaccgagggggctgctcccacctggctctgtggcgagccatttgtcccaagtgccaaagaagcagaccattggggctcccagccaggcccttgtcggccccaccagtgcctctccctgctgctcctaggacccgtctccagctgctgagatcctggactgagggggcctggatgccccctgtggatgctgctgcccctgcacagcaggctgccagtgcctgggtggatgggccaccgccttgcccagcctggatgccatccaagttgtatatttttttaatctctcgactgaatggactttgcacactttggcccagggtggccacacctctatcccggctttggtgcggggtacacaagaggggatgagttgtgtgaataccccaagactcccatgagggagatgccatgagccgcccaaggccttcccctggcactggcaaacagggcctctgcggagcacactggctcacccagtcctgcccgccaccgttatcggtgtcattcacctttcgtgttttttttaatttatcctctgttgattttttcttttgctttatgggtttggcttgtttttcttgcatggtttggagctgatcgcttctcccccaccccctagggtaccagcaggcagagccttgccctctgctcaggctggggtccagtgggaggggcccaagatctctgctcagagaagtgcagggggagccttccagctcactctccctgaggactggcttgacaggggctatgggtttgctttggtgttgtttttaaaaaaagaaaatatatttttttgaaaaaacgactgcccatcccgggtcctttccctgatgggttggggcagttacctggttgctgttttaattaaaaaaaaaaaaaaaaaaaaaacagaggcggggttccaccggggcctgctttccaacgtggccctcttataattaaagggaggctggtgtgggtaacgcagcaacttctttcacaacgacggggtcatcttggggagcccggggacccaccaatagtttgggggcttgtcacaccagccggcgctcttctccgggtaacactaacgacaccctttggggcgcccttatagggcaggggtggggtcgcgcgcccaaagaaaagggttccccgaggaattccccttcgtgggggggatctccccaccccgggggggccactctccgctggggaaatctcctgggcaacccccggggcgtggctggccaaccgggcaagtcgggggccaaggggaaacccttgacccacctcccgtgggagggaagcaagggggccgcacagagggcggagcgcgacacgggcggggtctccccccagtgtataccctaaggtggccccccagaaagaggggggtccggcaacaacc

SEQ ID NO: 453004 - DNA, 1834 bp, Homo sapiens
tggcgaattcggcacgaggatgtcatgtccgacgtctggagcctgggcatcaccatgattgagatggccatcctgcggttcccttacgagtcctgggggaccccgttccagcagctgaagcaggtggtggaggagccgtccccccagctcccagccgaccgtttctcccccgagtttgtggacttcactgctcagtgcctgaggaagaaccccgcagagcgtatgagctacctggagctgatggagcaccccttcttcaccttgcacaaaaccaagaagacggacattgctgccttcgtgaaggagatcctgggagaagactcataggggctgggcctcggaccccactccggccctccagagccccacagccccatctgcgggggcagtgctcacccacaccataagctactgccatcctggcccagggcatctgggaggaaccgagggggctgctcccacctggctctgtggcgagccatttgtcccaagtgccaaagaagcagaccattggggctcccagccaggcccttgtcggccccaccagtgcctctccctgctgctcctaggacccgtctccagctgctgagatcctggactgagggggcctggatgccccctgtggatgctgctgcccctgcacagcaggctgccagtgcctgggtggatgggccaccgccttgcccagcctggatgccatccaagttgtatatttttttaatctctcgactgaatggactttgcacactttggcccagggtggccacacctctatcccggctttggtgcggggtacacaagaggggatgagttgtgtgaataccccaagactcccatgagggagatgccatgagccgcccaaggccttcccctggcactggcaaacagggcctctgcggagcacactggctcacccagtcctgcccgccaccgttatcggtgtcattcacctttcgtgttttttttaatttatcctctgttgattttttcttttgctttatgggtttggcttgtttttcttgcatggtttggagctgatcgcttctcccccaccccctagggtaccagcaggcagagccttgccctctgctcaggctggggtccagtgggaggggcccaagatctctgctcagagaagtgcagggggagccttccagctcactctccctgaggactggcttgacaggggctatgggtttgctttggtgttgtttttaaaaaaagaaaatatatttttttgaaaaaacgactgcccatcccgggtcctttccctgatgggttggggcagttacctggttgctgttttaattaaaaaaaaaaaaaaaaaaaaaacagaggcggggttccaccggggcctgctttccaacgtggccctcttataattaaagggaggctggtgtgggtaacgcagcaacttctttcacaacgacggggtcatcttggggagcccggggacccaccaatagtttgggggcttgtcacaccagccggcgctcttctccgggtaacactaacgacaccctttggggcgcccttatagggcaggggtggggtcgcgcgcccaaagaaaagggttccccgaggaattccccttcgtgggggggatctccccaccccgggggggccactctccgctggggaaatctcctgggcaacccccggggcgtggctggccaaccgggcaagtcgggggccaaggggaaacccttgacccacctcccgtgggagggaagcaagggggccgcacagagggcggagcgcgacacgggcggggtctccccccagtgtataccctaaggtggccccccagaaagaggggggtccggcaacaacc

SEQ ID NO: 453005 - DNA, 2331 bp, Homo sapiens
gtctccccggcgctgcccagtctgtctccggcgccgcccgtcgcggactcgtccttgctgcagtcgccgccgcagtcctcgccgcagtcgccgccgccgccgccgccgccgccgctgctcctccgcctggcctgggccgtctgcccgcagccatgagcgtgctcggccccggtggagcccgcagtcctctagattagtctccaccgccgtccaggacccacttgcagcatggagtcgcccgcctcgagccagcccgccagcatgccccagtccaaaggaaaatccaagaggaagaaggatctacggatatcctgcatgtccaagccacccgcacccaaccccacacccccccggaacctggactcccggaccttcatcaccattggagacagaaactttgaggtggaggctgatgacttggtgaccatctcagaactgggccgtggagcctatggggtggtagagaaggtgcggcacgcccagagcggcaccatcatggccgtgaagcggatccgggccaccgtgaactcacaggagcagaagcggctgctcatggacctggacatcaacatgcgcacggtcgactgtttctacactgtcaccttctacggggcactattcagagagggagacgtgtggatctgcatggagctcatggacacatccttggacaagttctaccggaaggtgctggataaaaacatgacaattccagaggacatccttggggagattgctgtgtctatcgtgcgggccctggagcatctgcacagcaagctgtcggtgatccacagagatgtgaagccctccaatgtccttatcaacaaggagggccatgtgaagatgtgtgactttggcatcagtggctacttggtggactctgtggccaagacgatggatgccggctgcaagccctacatggcccctgagaggatcaacccagagctgaaccagaagggctacaatgtcaagtccgacgtctggagcctgggcatcaccatgattgagatggccatcctgcggttcccttacgagtcctgggggaccccgttccagcagctgaagcaggtggtggaggagccgtccccccagctcccagccgaccgtttctcccccgagtttgtggacttcactgctcagtgcctgaggaagaaccccgcagagcgtatgagctacctggagctgatggagcaccccttcttcaccttgcacaaaaccaagaagacggacattgctgccttcgtgaaggagatcctgggagaagactcataggggctgggcctcggaccccactccggccctccagagccccacagccccatctgcgggggcagtgctcacccacaccataagctactgccatcctggcccagggcatctgggaggaaccgagggggctgctcccacctggctctgtggcgagccatttgtcccaagtgtcattcacctttcgtgttttttttaatttatcctctgttgattttttcttttgctttatgggtttggcttgtttttcttgcatggtttggagctgatcgcttctcccccaccccctagggtaccagcaggcagagccttgccctctgctcaggctggggtccagtgggaggggcccaagatctctgctcagagaagtgcagggggagccttccagctcactctccctgaggactggcttgacaggggctatgggtttgctttggtgttgtttttaaaaaaagaaaatatatttttttgaaaaaacgactgcccatcccgggtcctttccctgatgggttggggcagttacctggttgctgttttaattaaaaaaaaaaaaaaaaaaaaaacagaggcggggttccaccggggcctgctttccaacgtggccctcttataattaaagggaggctggtgtgggtaacgcagcaacttctttcacaacgacggggtcatcttggggagcccggggacccaccaatagtttgggggcttgtcacaccagccggcgctcttctccgggtaacactaacgacaccctttggggcgcccttatagggcaggggtggggtcgcgcgcccaaagaaaagggttccccgaggaattccccttcgtgggggggatctccccaccccgggggggccactctccgctggggaaatctcctgggcaacccccggggcgtggctggccaaccgggcaagtcgggggccaaggggaaacccttgacccacctcccgtgggagggaagcaagggggccgcacagagggcggagcgcgacacgggcggggtctccccccagtgtataccctaaggtggccccccagaaagaggggggtccggcaacaacc

SEQ ID NO: 453006 - DNA, 2201 bp, Homo sapiens
gtctccccggcgctgcccagtctgtctccggcgccgcccgtcgcggactcgtccttgctgcagtcgccgccgcagtcctcgccgcagtcgccgccgccgccgccgccgccgccgctgctcctccgcctggcctgggccgtctgcccgcagccatgagcgtgctcggccccggtggagcccgcagtcctctagattagtctccaccgccgtccaggacccacttgcagcatggagtcgcccgcctcgagccagcccgccagcatgccccagtccaaaggaaaatccaagaggaagaaggatctacggatatcctgcatgtccaagccacccgcacccaaccccacacccccccggaacctggactcccggaccttcatcaccattggagacagaaactttgaggtggaggctgatgacttggtgaccatctcagaactgggccgtggagcctatggggtggtagagaaggtgcggcacgcccagagcggcaccatcatggccgtgaagcggatccgggccaccgtgaactcacaggagcagaagcggctgctcatggacctggacatcaacatgcgcacggtcgactgtttctacactgtcaccttctacggggcactattcagagagggagacgtgtggatctgcatggagctcatggacacatccttggacaagttctaccggaaggtgctggataaaaacatgacaattccagaggacatccttggggagattgctgtgtctatcgtgcgggccctggagcatctgcacagcaagctgtcggtgatccacagagatgtgaagccctccaatgtccttatcaacaaggagggccatgtgaagatgtgtgactttggcatcagtggctacttggtggactctgtggccaagacgatggatgccggctgcaagccctacatggcccctgagaggatcaacccagagctgaaccagaagggctacaatgtcaagtccgacgtctggagcctgggcatcaccatgattgagatggccatcctgcggttcccttacgagtcctgggggaccccgttccagcagctgaagcaggtggtggaggagccgtccccccagctcccagccgaccgtttctcccccgagtttgtggacttcactgctcagtgcctgaggaagaaccccgcagagcgtatgagctacctggagctgatggagcaccccttcttcaccttgcacaaaaccaagaagacggacattgctgccttcgtgaaggagatcctgggagaagactcataggggctgggcctcggaccccactccggccctccagagccccacagccccatctgcgggggcagtgctcacccacaccataagctactgccatcctggcccagggcatctgggaggaaccgagggggctgctcccacctggctctgtggcgagccatttgtcccaagtgccaaagaagcagaccattggggctcccagccaggcccttgtcgcccaagatctctgctcagagaagtgcagggggagccttccagctcactctccctgaggactggcttgacaggggctatgggtttgctttggtgttgtttttaaaaaaagaaaatatatttttttgaaaaaacgactgcccatcccgggtcctttccctgatgggttggggcagttacctggttgctgttttaattaaaaaaaaaaaaaaaaaaaaaacagaggcggggttccaccggggcctgctttccaacgtggccctcttataattaaagggaggctggtgtgggtaacgcagcaacttctttcacaacgacggggtcatcttggggagcccggggacccaccaatagtttgggggcttgtcacaccagccggcgctcttctccgggtaacactaacgacaccctttggggcgcccttatagggcaggggtggggtcgcgcgcccaaagaaaagggttccccgaggaattccccttcgtgggggggatctccccaccccgggggggccactctccgctggggaaatctcctgggcaacccccggggcgtggctggccaaccgggcaagtcgggggccaaggggaaacccttgacccacctcccgtgggagggaagcaagggggccgcacagagggcggagcgcgacacgggcggggtctccccccagtgtataccctaaggtggccccccagaaagaggggggtccggcaacaacc

SEQ ID NO: 453007 - DNA, 1205 bp, Homo sapiens
gtctccccggcgctgcccagtctgtctccggcgccgcccgtcgcggactcgtccttgctgcagtcgccgccgcagtcctcgccgcagtcgccgccgccgccgccgccgccgccgctgctcctccgcctggcctgggccgtctgcccgcagccatgagcgtgctcggccccggtggagcccgcagtcctctagattagtctccaccgccgtccaggacccacttgcagcatggagtcgcccgcctcgagccagcccgccagcatgccccagtccaaaggaaaatccaagaggaagaaggatctacggatatcctgcatgtccaagccacccgcacccaaccccacacccccccggaacctggactcccggaccttcatcaccattggagacagaaactttgaggtggaggctgatgacttggtgaccatctcagaactgggccgtggagcctatggggtggtagagaaggtgcggcacgcccagagcggcaccatcatggccgtgaagcggatccgggccaccgtgaactcacaggagcagaagcggctgctcatggacctggacatcaacatgcgcacggtcgactgtttctacactgtcaccttctacggggcactattcagagagggagacgtgtggatctgcatggagctcatggacacatccttggacaagttctaccggaaggtgctggataaaaacatgacaattccagaggacatccttggggagattgctgtgtctatcgtgcgggccctggagcatctgcacagcaagctgtcggtgatccacagagatgtgaagccctccaatgtccttatcaacaaggagggccatgtgaagatgtgtgactttggcatcagtggctacttggtggactctgtggccaagacgatggatgccggctgcaagccctacatggcccctgagaggatcaacccagagctgaaccagaagggctacaatgtcaagtccgacgtctggagcctgggcatcaccatgcctggtggtgatggtgtttcttagagagaagatcactgaagaaacttctgctttaatggctttacaaagctggcaatattacaatccttgacctcagtgaaagcagtcaccttcagcgttttccagccctatagccaccccaagtgtggttatgcctcctcgattgctccgtactctaacatctagctggcttacctgtctag

SEQ ID NO: 453008 - DNA, 967 bp, Homo sapiens
gtctccctatgagcaactgtggctccgagaggtgataggttgtgacgtgcccgatggggttccagccgctttccacctgcagccctgcagctgcctcccctcaggtttgctggtgctcgaagcaaggactggcttgacttctgtcctgagaaaggtggactgggttctgttctgatgtatagtttacaaatcgtgaaactccagcatagagtgcatataatcatgttcacacccatgcaaccaccttgcccaagatctctgctcagagaagtgcagggggagccttccagctcactctccctgaggactggcttgacaggggctatgggtttgctttggtgttgtttttaaaaaaagaaaatatatttttttgaaaaaacgactgcccatcccgggtcctttccctgatgggttggggcagttacctggttgctgttttaattaaaaaaaaaaaaaaaaaaaaaacagaggcggggttccaccggggcctgctttccaacgtggccctcttataattaaagggaggctggtgtgggtaacgcagcaacttctttcacaacgacggggtcatcttggggagcccggggacccaccaatagtttgggggcttgtcacaccagccggcgctcttctccgggtaacactaacgacaccctttggggcgcccttatagggcaggggtggggtcgcgcgcccaaagaaaagggttccccgaggaattccccttcgtgggggggatctccccaccccgggggggccactctccgctggggaaatctcctgggcaacccccggggcgtggctggccaaccgggcaagtcgggggccaaggggaaacccttgacccacctcccgtgggagggaagcaagggggccgcacagagggcggagcgcgacacgggcggggtctccccccagtgtataccctaaggtggccccccagaaagaggggggtccggcaacaacc

SEQ ID NO: 453009 - DNA, 603 bp, Homo sapiens
ggaacctgcattgttttgtaaaatcttcagaattcaggttttctgaaaaccctatgatggttccaccagtcccggtgtgggctgaatctgcttcctgagctgggtcctgctggctgggtcggaggagctaagagctggcatccccggctttctcgcctttgttctgctgggatgtggtagggagatcagctgtgcagctttgacgcctggctctggtaccaggatgggtgggagcccccaaccctcgctcctgggtgcagagcgtggttgtatctggggccggggcctctgaccccctgtccccgctgcagattgagatggccatcctgcggttcccttacgagtcctgggggaccccgttccagcagctgaagcaggtggtggaggagccgtccccccagctcccagccgaccgtttctcccccgagtttgtggacttcactgctcagtggtgagtcttgggtgctgctgagcgcctgccactgcccctccctggccagatccctgcaccttcctgggccctgttcctttattcctttggcaaataaacccccagatgacttggcatccaaatatgtaaggcagaaacagctggagcatgag

SEQ ID NO: 453010 - DNA, 2779 bp, Homo sapiens
gtctccccggcgctgcccagtctgtctccggcgccgcccgtcgcggactcgtccttgctgcagtcgccgccgcagtcctcgccgcagtcgccgccgccgccgccgccgccgccgctgctcctccgcctggcctgggccgtctgcccgcagccatgagcgtgctcggccccggtggagcccgcagtcctctagattagtctccaccgccgtccaggacccacttgcagcatggagtcgcccgcctcgagccagcccgccagcatgccccagtccaaaggaaaatccaagaggaagaaggatctacggatatcctgcatgtccaagccacccgcacccaaccccacacccccccggaacctggactcccggaccttcatcaccattggagacagaaactttgaggtggaggctgatgacttggtgaccatctcagaactgggccgtggagcctatggggtggtagagaaggtgcggcacgcccagagcggcaccatcatggccgtgaagcggatccgggccaccgtgaactcacaggagcagaagcggctgctcatggacctggacatcaacatgcgcacggtcgactgtttctacactgtcaccttctacggggcactattcagagagggagacgtgtggatctgcatggagctcatggacacatccttggacaagttctaccggaaggtgctggataaaaacatgacaattccagaggacatccttggggagattgctgtgtctatcgtgcgggccctggagcatctgcacagcaagctgtcggtgatccacagagatgtgaagccctccaatgtccttatcaacaaggagggccatgtgaagatgtgtgactttggcatcagtggctacttggtggactctgtggccaagacgatggatgccggctgcaagccctacatggcccctgagaggatcaacccagagctgaaccagaagggctacaatgtcaagtccgacgtctggagcctgggcatcaccatgattgagatggccatcctgcggttcccttacgagtcctgggggaccccgttccagcagctgaagcaggtggtggaggagccgtccccccagctcccagccgaccgtttctcccccgagtttgtggacttcactgctcagtgcctgaggaagaaccccgcagagcgtatgagctacctggagctgatggagcaccccttcttcaccttgcacaaaaccaagaagacggacattgctgccttcgtgaaggagatcctgggagaagactcataggggctgggcctcggaccccactccggccctccagagccccacagccccatctgcgggggcagtgctcacccacaccataagctactgccatcctggcccagggcatctgggaggaaccgagggggctgctcccacctggctctgtggcgagccatttgtcccaagtgccaaagaagcagaccattggggctcccagccaggcccttgtcggccccaccagtgcctctccctgctgctcctaggacccgtctccagctgctgagatcctggactgagggggcctggatgccccctgtggatgctgctgcccctgcacagcaggctgccagtgcctgggtggatgggccaccgccttgcccagcctggatgccatccaagttgtatatttttttaatctctcgactgaatggactttgcacactttggcccagggtggccacacctctatcccggctttggtgcggggtacacaagaggggatgagttgtgtgaataccccaagactcccatgagggagatgccatgagccgcccaaggccttcccctggcactggcaaacagggcctctgcggagcacactggctcacccagtcctgcccgccaccgttatcggtgtcattcacctttcgtgttttttttaatttatcctctgttgattttttcttttgctttatgggtttggcttgtttttcttgcatggtttggagctgatcgcttctcccccaccccctagggtaccagcaggcagagccttgccctctgctcaggctggggtccagtgggaggggcccaagatctctgctcagagaagtgcagggggagccttccagctcactctccctgaggactggcttgacaggggctatgggtttgctttggtgttgtttttaaaaaaagaaaatatatttttttgaaaaaacgactgcccatcccgggtcctttccctgatgggttggggcagttacctggttgctgttttaattaaaaaaaaaaaaaaaaaaaaaacagaggcggggttccaccggggcctgctttccaacgtggccctcttataattaaagggaggctggtgtgggtaacgcagcaacttctttcacaacgacggggtcatcttggggagcccggggacccaccaatagtttgggggcttgtcacaccagccggcgctcttctccgggtaacactaacgacaccctttggggcgcccttatagggcaggggtggggtcgcgcgcccaaagaaaagggttccccgaggaattccccttcgtgggggggatctccccaccccgggggggccactctccgctggggaaatctcctgggcaacccccggggcgtggctggccaaccgggcaagtcgggggccaaggggaaacccttgacccacctcccgtgggagggaagcaagggggccgcacagagggcggagcgcgacacgggcggggtctccccccagtgtataccctaaggtggccccccagaaagaggggggtccggcaacaacc

SEQ ID NO: 453011 - DNA, 2232 bp, Homo sapiens
cccaaattaatgacagcagatgctgaagtctgagatggtcagatgttaggaaggggattggctgtgaccacctgggacctgcccacctggctcatgaggctacggcccaaagttgccagctcctcagatttttccagagcagctggaacctgcattgttttgtaaaatcttcagaattcaggttttctgaaaaccctatgatggttccaccagtcccggtgtgggctgaatctgcttcctgagctgggtcctgctggctgggtcggaggagctaagagctggcatccccggctttctcgcctttgttctgctgggatgtggtagggagatcagctgtgcagctttgacgcctggctctggtaccaggatgggtgggagcccccaaccctcgctcctgggtgcagagcgtggttgtatctggggccggggcctctgaccccctgtccccgctgcagattgagatggccatcctgcggttcccttacgagtcctgggggaccccgttccagcagctgaagcaggtggtggaggagccgtccccccagctcccagccgaccgtttctcccccgagtttgtggacttcactgctcagtgcctgaggaagaaccccgcagagcgtatgagctacctggagctgatggagcaccccttcttcaccttgcacaaaaccaagaagacggacattgctgccttcgtgaaggagatcctgggagaagactcataggggctgggcctcggaccccactccggccctccagagccccacagccccatctgcgggggcagtgctcacccacaccataagctactgccatcctggcccagggcatctgggaggaaccgagggggctgctcccacctggctctgtggcgagccatttgtcccaagtgccaaagaagcagaccattggggctcccagccaggcccttgtcggccccaccagtgcctctccctgctgctcctaggacccgtctccagctgctgagatcctggactgagggggcctggatgccccctgtggatgctgctgcccctgcacagcaggctgccagtgcctgggtggatgggccaccgccttgcccagcctggatgccatccaagttgtatatttttttaatctctcgactgaatggactttgcacactttggcccagggtggccacacctctatcccggctttggtgcggggtacacaagaggggatgagttgtgtgaataccccaagactcccatgagggagatgccatgagccgcccaaggccttcccctggcactggcaaacagggcctctgcggagcacactggctcacccagtcctgcccgccaccgttatcggtgtcattcacctttcgtgttttttttaatttatcctctgttgattttttcttttgctttatgggtttggcttgtttttcttgcatggtttggagctgatcgcttctcccccaccccctagggtaccagcaggcagagccttgccctctgctcaggctggggtccagtgggaggggcccaagatctctgctcagagaagtgcagggggagccttccagctcactctccctgaggactggcttgacaggggctatgggtttgctttggtgttgtttttaaaaaaagaaaatatatttttttgaaaaaacgactgcccatcccgggtcctttccctgatgggttggggcagttacctggttgctgttttaattaaaaaaaaaaaaaaaaaaaaaacagaggcggggttccaccggggcctgctttccaacgtggccctcttataattaaagggaggctggtgtgggtaacgcagcaacttctttcacaacgacggggtcatcttggggagcccggggacccaccaatagtttgggggcttgtcacaccagccggcgctcttctccgggtaacactaacgacaccctttggggcgcccttatagggcaggggtggggtcgcgcgcccaaagaaaagggttccccgaggaattccccttcgtgggggggatctccccaccccgggggggccactctccgctggggaaatctcctgggcaacccccggggcgtggctggccaaccgggcaagtcgggggccaaggggaaacccttgacccacctcccgtgggagggaagcaagggggccgcacagagggcggagcgcgacacgggcggggtctccccccagtgtataccctaaggtggccccccagaaagaggggggtccggcaacaacc

SEQ ID NO: 453012 - DNA, 2108 bp, Homo sapiens
gtctccccggcgctgcccagtctgtctccggcgccgcccgtcgcggactcgtccttgctgcagtcgccgccgcagtcctcgccgcagtcgccgccgccgccgccgccgccgccgctgctcctccgcctggcctgggccgtctgcccgcagccatgagcgtgctcggccccggtggagcccgcagtcctctagattagtctccaccgccgtccaggacccacttgcagcatggagtcgcccgcctcgagccagcccgccagcatgccccagtccaaaggaaaatccaagaggaagaaggatctacggatatcctgcatgtccaagccacccgcacccaaccccacacccccccggaacctggactcccggaccttcatcaccattggagacagaaactttgaggtggaggctgatgacttggtgaccatctcagaactgggccgtggagcctatggggtggtagagaaggtgcggcacgcccagagcggcaccatcatggccgtgaagcggatccgggccaccgtgaactcacaggagcagaagcggctgctcatggacctggacatcaacatgcgcacggtcgactgtttctacactgtcaccttctacggggcactattcagagagggagacgtgtggatctgcatggagctcatggacacatccttggacaagttctaccggaaggtgctggataaaaacatgacaattccagaggacatccttggggagattgctgtgtctatcgtgcgggccctggagcatctgcacagcaagctgtcggtgatccacagagatgtgaagccctccaatgtccttatcaacaaggagggccatgtgaagatgtgtgactttggcatcagtggctacttggtggactctgtggccaagacgatggatgccggctgcaagccctacatggcccctgagaggatcaacccagagctgaaccagaagggctacaatgtcaagtccgacgtctggagcctgggcatcaccatgattgagatggccatcctgcggttcccttacgagtcctgggggaccccgttccagcagctgaagcaggtggtggaggagccgtccccccagctcccagccgaccgtttctcccccgagtttgtggacttcactgctcagtgcctgaggaagaaccccgcagagcgtatgagctacctggagctgatggagcaccccttcttcaccttgcacaaaaccaagaagacggacattgctgccttcgtgaaggagatcctgggagaagactcataggggctgggcctcggaccccactccggccctccagagccccacagccccatctgcgggggcagtgctcacccacaccataagctactgccatcctggcccagggcatctgggaggaaccgagggggctgctcccacctggctctgtggcgagccatttgtcccaagtgccaaagaagcagaccattggggctcccagccaggcccttgtcggccccaccagtgcctctccctgctgctcctaggacccgtctccagctgctgagatcctggactgagggggcctggatgccccctgtggatgctgctgcccctgcacagcaggctgccagtgcctgggtggatgggccaccgccttgcccagcctggatgccatccaagttgtatatttttttaatctctcgactgaatggactttgcacactttggcccagggtggccacacctctatcccggctttggtgcggggtacacaagaggggatgagttgtgtgaataccccaagactcccatgagggagatgccatgagccgcccaaggccttcccctggcactggcaaacagggcctctgcggagcacactggctcacccagtcctgcccgccaccgttatcggtgtcattcacctttcgtgttttttttaatttatcctctgttgattttttctttttgggacagagtctcgctctgtcactcccaggctagagtgcagtgacacgttctcggcccaatgcaatctccgcctcctgggttcaagcaattctcctgcatcagcctcccgagcagctgggaccacaggcgcccaccaccacgcccagctaatttttctatttttagga

SEQ ID NO: 453013 - DNA, 1988 bp, Homo sapiens
gtctccccggcgctgcccagtctgtctccggcgccgcccgtcgcggactcgtccttgctgcagtcgccgccgcagtcctcgccgcagtcgccgccgccgccgccgccgccgccgctgctcctccgcctggcctgggccgtctgcccgcagccatgagcgtgctcggccccggtggagcccgcagtcctctagattagtctccaccgccgtccaggacccacttgcagcatggagtcgcccgcctcgagccagcccgccagcatgccccagtccaaaggaaaatccaagaggaagaaggatctacggatatcctgcatgtccaagccacccgcacccaaccccacacccccccggaacctggactcccggaccttcatcaccattggagacagaaactttgaggtggaggctgatgacttggtgaccatctcagaactgggccgtggagcctatggggtggtagagaaggtgcggcacgcccagagcggcaccatcatggccgtgaagcggatccgggccaccgtgaactcacaggagcagaagcggctgctcatggacctggacatcaacatgcgcacggtcgactgtttctacactgtcaccttctacggggcactattcagagagggagacgtgtggatctgcatggagctcatggacacatccttggacaagttctaccggaaggtgctggataaaaacatgacaattccagaggacatccttggggagattgctgtgtctatcgtgcgggccctggagcatctgcacagcaagctgtcggtgatccacagagatgtgaagccctccaatgtccttatcaacaaggagggccatgtgaagatgtgtgactttggcatcagtggctacttggtggactctgtggccaagacgatggatgccggctgcaagccctacatggcccctgagaggatcaacccagagctgaaccagaagggctacaatgtcaagtccgacgtctggagcctgggcatcaccatgattgagatggccatcctgcggttcccttacgagtcctgggggaccccgttccagcagctgaagcaggtggtggaggagccgtccccccagctcccagccgaccgtttctcccccgagtttgtggacttcactgctcagtgcctgaggaagaaccccgcagagcgtatgagctacctggagctgatgctgatcgcttctcccccaccccctagggtaccagcaggcagagccttgccctctgctcaggctggggtccagtgggaggggcccaagatctctgctcagagaagtgcagggggagccttccagctcactctccctgaggactggcttgacaggggctatgggtttgctttggtgttgtttttaaaaaaagaaaatatatttttttgaaaaaacgactgcccatcccgggtcctttccctgatgggttggggcagttacctggttgctgttttaattaaaaaaaaaaaaaaaaaaaaaacagaggcggggttccaccggggcctgctttccaacgtggccctcttataattaaagggaggctggtgtgggtaacgcagcaacttctttcacaacgacggggtcatcttggggagcccggggacccaccaatagtttgggggcttgtcacaccagccggcgctcttctccgggtaacactaacgacaccctttggggcgcccttatagggcaggggtggggtcgcgcgcccaaagaaaagggttccccgaggaattccccttcgtgggggggatctccccaccccgggggggccactctccgctggggaaatctcctgggcaacccccggggcgtggctggccaaccgggcaagtcgggggccaaggggaaacccttgacccacctcccgtgggagggaagcaagggggccgcacagagggcggagcgcgacacgggcggggtctccccccagtgtataccctaaggtggccccccagaaagaggggggtccggcaacaacc

SEQ ID NO: 453014 - DNA, 678 bp, Homo sapiens
gcggccgcctactactactaaattcgcggccgcgtcgacggctttgacagagtgcaagacgatgacttgcaaaatgtcgcagctggaacgcaacatagagaccatcatcaacaccttccaccaatactctgtgaagctggggcacccagacaccctgaaccagggggaattcaaagagctggtgcgaaaagatctgcaaaattttctcaagaaggagaataagaatgaaaaggtcatagaacacatcatggaggacctggacacaaatgcagacaagcagctgagcttcgaggagttcatcatgctgatggcgaggctaacctgggcctcccacgagaagatgcacgagggtgacgagggccctggccaccaccataagccaggcctcggggagggcaccccctaagaccacagtggccaagatcacagtggccacggccacggccacagtcatggtggccacggccacagccactaatcaggaggccaggccaccctgcctctacccaaccagggccccggggcctgttatgtcaaactgtcttggctgtggggctaggggctggggccaaataaagtctcttcctccaaaaaaaatattctaattaattaaaaaaaaaacctcaggggggcccgggtcccaattcgcctataggggtcgtttacaattcctgccct

SEQ ID NO: 453015 - DNA, 446 bp, Homo sapiens
cgtctcctcctcctcctttgtcaacccaaactgcggtgacgctgcgctcagacctgccacagctccagcctcaccgcagtttgggttgacaagggaggatgggagtatgggctacagcaatcaaggggaagatttgagctcctggagcccagccccaagacgcagcgagtgtcctgttatacagggcaggtgctcacagttacacaggacgacagggtcaagaaattgctcaattgaacacctgctatttgtcgggccctgttctgggcagagggatgtagtggtaaatggggagcccactattccagtggagggagacacacagtaaagttgttggccaataaagagcacagataaagccaaatgccaataagtgcctggaagaaaatgagatagagtgcgctgtgggcaatggggctgggtggggtggaggtgaccagttaggg

SEQ ID NO: 453016 - DNA, 956 bp, Homo sapiens
  misc_feature (691)..(691): n is a, c, g, or t
  misc_feature (694)..(694): n is a, c, g, or t
  misc_feature (697)..(701): n is a, c, g, or t
  misc_feature (706)..(706): n is a, c, g, or t
  misc_feature (709)..(709): n is a, c, g, or t
  misc_feature (713)..(713): n is a, c, g, or t
  misc_feature (780)..(780): n is a, c, g, or t
gaaaacactctgtgtggctcctcggctttgacagagtgcaagacgatgacttgcaaaatgtcgcagctggaacgcaacatagagaccatcatcaacaccttccaccaatactctgtgaagctggggcacccagacaccctgaaccagggggaattcaaagagctggtgcgaaaagatctgcaaaattttctcaagaaggagaataagaatgaaaaggtcatagaacacatcatggaggacctggacacaaatgcagacaagcagctgagcttcgaggagttcatcatgctgatggcgaggctaacctgggcctcccacgagaagatgcacgagggtgacgagggccctggccaccaccataagccaggcctcggggagggcaccccctaagaccacagtggccaagatcacagtggccacggccacggccacagtcatggtggccacggccacagccactaatcaggaggccaggccaccctgcctctacccaaccagggccccggggcctgttatgtcaaactgtcttggctgtggggctaggggctggggccaaataaagtctcttcctccaaaaaaaaaaaaaaaaacaaaaaaaaaaaaaaaaaaaaaaaaaaaaaaaaaaaaaaaaaaaaaaaaaaaaaaaaaaaaaaaagggggggggggaaaaaaaatccccggggggcccaanttnggnnnnnccggnttntttntgacaagggggcccaaagaggggggcgtaataaaaggaagagcaggggcgcggttaaacagttgggngtgggaaaatggtcctgggattcggggagggacctaattgcggggggacatgggacataaaccagagttaaggtcaggaataaacttaggtgagggtgacaacgctatgtggcggaattgtcggtttataacagaaaaagaaaataggagataagaagagagttagaatggaaaaa

SEQ ID NO: 453017 - DNA, 972 bp, Homo sapiens
  misc_feature (707)..(707): n is a, c, g, or t
  misc_feature (710)..(710): n is a, c, g, or t
  misc_feature (713)..(717): n is a, c, g, or t
  misc_feature (722)..(722): n is a, c, g, or t
  misc_feature (725)..(725): n is a, c, g, or t
  misc_feature (729)..(729): n is a, c, g, or t
  misc_feature (796)..(796): n is a, c, g, or t
gcggccgcctactactactaaattcgcggccgcgtcgacggctttgacagagtgcaagacgatgacttgcaaaatgtcgcagctggaacgcaacatagagaccatcatcaacaccttccaccaatactctgtgaagctggggcacccagacaccctgaaccagggggaattcaaagagctggtgcgaaaagatctgcaaaattttctcaagaaggagaataagaatgaaaaggtcatagaacacatcatggaggacctggacacaaatgcagacaagcagctgagcttcgaggagttcatcatgctgatggcgaggctaacctgggcctcccacgagaagatgcacgagggtgacgagggccctggccaccaccataagccaggcctcggggagggcaccccctaagaccacagtggccaagatcacagtggccacggccacggccacagtcatggtggccacggccacagccactaatcaggaggccaggccaccctgcctctacccaaccagggccccggggcctgttatgtcaaactgtcttggctgtggggctaggggctggggccaaataaagtctcttcctccaaaaaaaaaaaaaaaaacaaaaaaaaaaaaaaaaaaaaaaaaaaaaaaaaaaaaaaaaaaaaaaaaaaaaaaaaaaaaaaaagggggggggggaaaaaaaatccccggggggcccaanttnggnnnnnccggnttntttntgacaagggggcccaaagaggggggcgtaataaaaggaagagcaggggcgcggttaaacagttgggngtgggaaaatggtcctgggattcggggagggacctaattgcggggggacatgggacataaaccagagttaaggtcaggaataaacttaggtgagggtgacaacgctatgtggcggaattgtcggtttataacagaaaaagaaaataggagataagaagagagttagaatggaaaaa

SEQ ID NO: 453018 - DNA, 1036 bp, Homo sapiens
  misc_feature (771)..(771): n is a, c, g, or t
  misc_feature (774)..(774): n is a, c, g, or t
  misc_feature (777)..(781): n is a, c, g, or t
  misc_feature (786)..(786): n is a, c, g, or t
  misc_feature (789)..(789): n is a, c, g, or t
  misc_feature (793)..(793): n is a, c, g, or t
  misc_feature (860)..(860): n is a, c, g, or t
gccccatgcttctccggcgcacagcttctccaccatgtcgctgctgaggggaagctcttcctgctgtggtgctttagggcacccacccttgggcatcgtcctgctcctcacccgatcttcatttacacggccggcgcttcatcatcaaccgtctgcgattccatagctgaaagtcagtgctgacgaggactgtcttttaaatcccatggaggtgtgtcccagagcagggggaattcaaagagctggtgcgaaaagatctgcaaaattttctcaagaaggagaataagaatgaaaaggtcatagaacacatcatggaggacctggacacaaatgcagacaagcagctgagcttcgaggagttcatcatgctgatggcgaggctaacctgggcctcccacgagaagatgcacgagggtgacgagggccctggccaccaccataagccaggcctcggggagggcaccccctaagaccacagtggccaagatcacagtggccacggccacggccacagtcatggtggccacggccacagccactaatcaggaggccaggccaccctgcctctacccaaccagggccccggggcctgttatgtcaaactgtcttggctgtggggctaggggctggggccaaataaagtctcttcctccaaaaaaaaaaaaaaaaacaaaaaaaaaaaaaaaaaaaaaaaaaaaaaaaaaaaaaaaaaaaaaaaaaaaaaaaaaaaaaaaagggggggggggaaaaaaaatccccggggggcccaanttnggnnnnnccggnttntttntgacaagggggcccaaagaggggggcgtaataaaaggaagagcaggggcgcggttaaacagttgggngtgggaaaatggtcctgggattcggggagggacctaattgcggggggacatgggacataaaccagagttaaggtcaggaataaacttaggtgagggtgacaacgctatgtggcggaattgtcggtttataacagaaaaagaaaataggagataagaagagagttagaatggaaaaa

SEQ ID NO: 453019 - DNA, 593 bp, Homo sapiens
gaaaacactctgtgtggctcctcggctttgacagagtgcaagacgatgacttgcaaaatgtcgcagctggaacgcaacatagagaccatcatcaacaccttccaccaatactctgtgaagctggggcacccagacaccctgaaccagggggaattcaaagagctggtgcgaaaagatctgcaaaattttctcaagaaggagaataagaatgaaaaggtcatagaacacatcatggaggacctggacacaaatgcagacaagcagctgagcttcgaggagttcatcatgctgatggtcacacaacttctatataacttctgaacatctcttcagtacccttagtctcggaacatttggaacccgtcgatcggggtagaacagcgcaccgatccaagttgtatcgtgagaagaacgatgtttgtgaaaccgcatttttcccgcgcgctgaggcatacgctcgtgccggtgtgcgtggcggcgttcgtgctgagcgcctgtggcacccagaaggcgaccagccagtcgaccagcatgaaggtgacgcgcggcaccatatcgcagagcatcagcggcagcggccagatcgaggcgaa

SEQ ID NO: 453020 - DNA, 604 bp, Homo sapiens
gaaaacactctgtgtggctcctcggctttgacagagtgcaagacgatgacttgcaaaatgtcgcagctggaacgcaacatagagaccatcatcaacaccttccaccaatactctgtgaagctggggcacccagacaccctgaaccagggggaattcaaagagctggtgcgaaaagatctgcaaaattttctcaaggtagggctggactctggcaggtctgacccagcctcaccgcagtttgggttgacaagggaggatgggagtatgggctacagcaatcaaggggaagatttgagctcctggagcccagccccaagacgcagcgagtgtcctgttatacagggcaggtgctcacagttacacaggacgacagggtcaagaaattgctcaattgaacacctgctatttgtcgggccctgttctgggcagagggatgtagtggtaaatggggagcccactattccagtggagggagacacacagtaaagttgttggccaataaagagcacagataaagccaaatgccaataagtgcctggaagaaaatgagatagagtgcgctgtgggcaatggggctgggtggggtggaggtgaccagttaggg

SEQ ID NO: 453021 - DNA, 524 bp, Homo sapiens
  misc_feature (259)..(259): n is a, c, g, or t
  misc_feature (262)..(262): n is a, c, g, or t
  misc_feature (265)..(269): n is a, c, g, or t
  misc_feature (274)..(274): n is a, c, g, or t
  misc_feature (277)..(277): n is a, c, g, or t
  misc_feature (281)..(281): n is a, c, g, or t
  misc_feature (348)..(348): n is a, c, g, or t
gcggccgcctactactactactactgctcgaattcaagcttctaacgatgtacggggtcatggtggccacggccacagccactaatcaggaggccaggccaccctgcctctacccaaccagggccccggggcctgttatgtcaaactgtcttggctgtggggctaggggctggggccaaataaagtctcttcctccaaaaaaaaaaaaaaaaaaaaaaaaaaagggggggggggaaaaaaaatccccggggggcccaanttnggnnnnnccggnttntttntgacaagggggcccaaagaggggggcgtaataaaaggaagagcaggggcgcggttaaacagttgggngtgggaaaatggtcctgggattcggggagggacctaattgcggggggacatgggacataaaccagagttaaggtcaggaataaacttaggtgagggtgacaacgctatgtggcggaattgtcggtttataacagaaaaagaaaataggagataagaagagagttagaatggaaaaa

SEQ ID NO: 453022 - DNA, 901 bp, Homo sapiens
  misc_feature (636)..(636): n is a, c, g, or t
  misc_feature (639)..(639): n is a, c, g, or t
  misc_feature (642)..(646): n is a, c, g, or t
  misc_feature (651)..(651): n is a, c, g, or t
  misc_feature (654)..(654): n is a, c, g, or t
  misc_feature (658)..(658): n is a, c, g, or t
  misc_feature (725)..(725): n is a, c, g, or t
gaaaacactctgtgtggctcctcggctttgacagagtgcaagacgatgacttgcaaaatgtcgcagctggaacgcaacatagagaccatcatcaacaccttccaccaatactctgtgaagctggggcacccagacaccctgaaccagggggaattcaaagagctggtgcgaaaagatctgcaaaattttctcaagaaggagaataagaatgaaaaggtcatagaacacatcatggaggacctggacacaaatgcagacaagcagctgagcttcgaggagttcatcatgctgatggcgaggctaacctgggcctcccacgagaagatgcacgagggtgacgagggccctggccaccaccataagccaggcctcggggagggcaccccctaagaccacagtggccaagatcacagtggccacggccacggccacagtcatggtggccacggccacagccactaatcaggaggccaggccaccctgcctctacccaaccagggccccggggcctgttatgtcaaactgtcttggctgtggggctaggggctggggccaaataaagtctcttcctccaaaaaaaaaaaaaaaaaaaaaaaaaaagggggggggggaaaaaaaatccccggggggcccaanttnggnnnnnccggnttntttntgacaagggggcccaaagaggggggcgtaataaaaggaagagcaggggcgcggttaaacagttgggngtgggaaaatggtcctgggattcggggagggacctaattgcggggggacatgggacataaaccagagttaaggtcaggaataaacttaggtgagggtgacaacgctatgtggcggaattgtcggtttataacagaaaaagaaaataggagataagaagagagttagaatggaaaaa

SEQ ID NO: 453023 - DNA, 926 bp, Homo sapiens
  misc_feature (661)..(661): n is a, c, g, or t
  misc_feature (664)..(664): n is a, c, g, or t
  misc_feature (667)..(671): n is a, c, g, or t
  misc_feature (676)..(676): n is a, c, g, or t
  misc_feature (679)..(679): n is a, c, g, or t
  misc_feature (683)..(683): n is a, c, g, or t
  misc_feature (750)..(750): n is a, c, g, or t
cgagaagagtgctaccgacaagccattggaaacggcgagaggcgaatacagagaaccatcatcaacaccttccaccaatactctgtgaagctggggcacccagacaccctgaaccagggggaattcaaagagctggtgcgaaaagatctgcaaaattttctcaagaaggagaataagaatgaaaaggtcatagaacacatcatggaggacctggacacaaatgcagacaagcagctgagcttcgaggagttcatcatgctgatggcgaggctaacctgggcctcccacgagaagatgcacgagggtgacgagggccctggccaccaccataagccaggcctcggggagggcaccccctaagaccacagtggccaagatcacagtggccacggccacggccacagtcatggtggccacggccacagccactaatcaggaggccaggccaccctgcctctacccaaccagggccccggggcctgttatgtcaaactgtcttggctgtggggctaggggctggggccaaataaagtctcttcctccaaaaaaaaaaaaaaaaacaaaaaaaaaaaaaaaaaaaaaaaaaaaaaaaaaaaaaaaaaaaaaaaaaaaaaaaaaaaaaaaagggggggggggaaaaaaaatccccggggggcccaanttnggnnnnnccggnttntttntgacaagggggcccaaagaggggggcgtaataaaaggaagagcaggggcgcggttaaacagttgggngtgggaaaatggtcctgggattcggggagggacctaattgcggggggacatgggacataaaccagagttaaggtcaggaataaacttaggtgagggtgacaacgctatgtggcggaattgtcggtttataacagaaaaagaaaataggagataagaagagagttagaatggaaaaa

SEQ ID NO: 453024 - DNA, 908 bp, Homo sapiens
  misc_feature (643)..(643): n is a, c, g, or t
  misc_feature (646)..(646): n is a, c, g, or t
  misc_feature (649)..(653): n is a, c, g, or t
  misc_feature (658)..(658): n is a, c, g, or t
  misc_feature (661)..(661): n is a, c, g, or t
  misc_feature (665)..(665): n is a, c, g, or t
  misc_feature (732)..(732): n is a, c, g, or t
gcggccgcctactactactaaattcgcggccgcgtcgacggctttgacagagtgcaagacgatgacttgcaaaatgtcgcagctggaacgcaacatagagaccatcatcaacaccttccaccaatactctgtgaagctggggcacccagacaccctgaaccagggggaattcaaagagctgaaggagaataagaatgaaaaggtcatagaacacatcatggaggacctggacacaaatgcagacaagcagctgagcttcgaggagttcatcatgctgatggcgaggctaacctgggcctcccacgagaagatgcacgagggtgacgagggccctggccaccaccataagccaggcctcggggagggcaccccctaagaccacagtggccaagatcacagtggccacggccacggccacagtcatggtggccacggccacagccactaatcaggaggccaggccaccctgcctctacccaaccagggccccggggcctgttatgtcaaactgtcttggctgtggggctaggggctggggccaaaccagtccctccaaaaaaaaaaaaagaaaacgagaaaaaaaaaaaaaaaaaaaaaaaaaaaaaaagggggggggggaaaaaaaatccccggggggcccaanttnggnnnnnccggnttntttntgacaagggggcccaaagaggggggcgtaataaaaggaagagcaggggcgcggttaaacagttgggngtgggaaaatggtcctgggattcggggagggacctaattgcggggggacatgggacataaaccagagttaaggtcaggaataaacttaggtgagggtgacaacgctatgtggcggaattgtcggtttataacagaaaaagaaaataggagataagaagagagttagaatggaaaaa

SEQ ID NO: 453025 - DNA, 4809 bp, Homo sapiens
cccgccccactctggactcccgcgctgggcgcgctgaggcggcccccgagcgagcgcgcgtgcagccgccgccgccccgagcacccgcagctccggcgccgcggcgagacggagacggaccgagccacgggcccccgcggccgcagcatctcggaggagaacatgcttgccaactcagccagcgtgaggatcctcatcaagggaggcaaggtggtgaacgatgactgcacccacgaggctgacgtctacatcgagaatggcatcatccagcaggtgggccgcgagctcatgatccctggcggggccaaggtgattgatgccacaggaaaactggtgatccctggtggcatcgacaccagcacccacttccaccagaccttcatgaatgccacgtgcgtggacgacttctaccatgggaccaaggcagcactcgtcggaggcaccaccatgatcatcggccacgtcctgcccgacaaggagacctcccttgtggacgcttatgagaagtgccgaggtctggccgaccccaaggtctgctgtgattacgccctccacgtggggatcacctggtgggcacccaaggtgaaagcagaaatggagacactggtgagggagaagggtgtcaactcgttccagatgttcatgacctacaaggacctgtacatgcttcgagacagtgagctgtaccaagtgttgcacgcttgcaaggacattggggcaatcgcccgcgtccatgctgaaaatggggagcttgtggccgagggtgctaaggaggcactggatttggggatcacaggcccagaaggaatcgagatcagccgtccagaggagctggaagctgaagccactcatcgtgttatcaccattgcaaacaggactcactgtccaatctacctggtcaacgtgtccagtatctcggctggtgacgttatcgcagctgctaagatgcaagggaaggttgtgctggcggagaccaccactgcacatgccacgctgacaggcttacactactaccaccaggactggtcccacgcggctgcctatgtcacggtgcctcccctgagactggacaccaacacctcaacctacctcatgagcctgctggccaatgacactctgaacatcgtggcatcagatcaccggcctttcaccacaaagcagaaagctatgggcaaggaagacttcaccaagatcccacatggagtgagtggcgtgcaggaccgcatgagcgtcatctgggagagaggagtggttggaggaaagatggatgagaaccgttttgtggccgttaccagttccaacgcagctaagcttctgaacctgtatccccgcaagggccgcattattcccggagccgatgctgatgtggtggtgtgggacccagaagccacaaagaccatctcagccagcacgcaggtccagggaggagacttcaacctgtatgagaacatgcgctgccacggcgtgccactggtcaccatcagccgggggcgcgtcgtgtatgagaacggcgtcttcatgtgcgccgagggcaccggcaagttctgtcccctgaggtccttcccagacactgtctacaagaagctggtccagagagagaagactttaaaggttagaggagtggaccgcactccctacctgggggatgtcgctgttgtcgtgcaccctgggaaaaaagagatgggaaccccactcgcagacactcctacccggcccgtcacccggcatgggggcatgagggaccttcacgaatccagcttcagcctctctggctctcagatcgatgaccatgttccaaagcgagcttcagctcggatcctcgctcctcccggaggcaggtcgagtggcatttggtaaaggcattgccaagccccccgagtgaggacgcaccgccgccaccagcccgcaactctccagccgaagctgcaggggcaggagaggctgggctgggtggcacaccacccgaggggggccccgggacccacggagccctccctatgtctgcaaagtgattcactgtgcttcgagccaactctaacaggcactttgagatgtgttcctcctgctgtagtcctttctgccttggcctcggcgggcttttctggggcccaggaagcccacactatgcacagagcccaatgcatagagccctggccagcccttcctctcactcctgcctccgctggctttgggaaagcccagactttagtgccctgccccctggctgactggccagttgcccagagcactttagcagatgtggtttcaaagtaaaggcctcctcccccaccccttaggccccgtggtgacatttcccaagtcagacagatgtcagcttcccagccatgcccaggacgtcctatctcccccaacccacctctggccctgtgtaggggcagggatgggggtggctgggactcctggtgcccctcgccagcttctcctgcgccccgcccacaccctcgggggggtcacaggcccagaagggtagctgggcggggctcgaggctggtgccaggcgcgtgtaaatggttttgttttgcacgtttggtttgcgcagtagtttggtttgacttgtttgtgcatcctgtgaaaaataacggtgcttgtgtcactagcatagaatagcgacaggaatagatgtggtccttaggagacgctgcacttgacaccaaccagacagcacagggcaggggtggtggagggggctgggctcacaggcctctcttttccccgcctgcagtcttctgggctgcgggaggccctggccctttccccttcccctcccctccttgtctagtttcccacattccaaaagggggcctgggatgctagccccagagatgccagcccttcaggaagcaggtgtcctttcccctctctgcccctgatcactcccagcactccccttgccttcccctgtcttcacctgccacacacacacacacacacacacacacacacacacacgcatggcttcctataacttcttcctgctggacagagactcagcgctcctcctgtgtgactggcaagaggcctcatgcctgctgagagaggaggagtgggagaggggcttgccagacaccagagagggagaccccaggcccacaggacctggctgtcgaacccgcattgctgctcaggtgccgtgatctcccgtggtcggcaccaggcccttgccagctcatggcctcatcttctcccctgtccatccaggtgggccctccctgcttctaaagccccacagaagttcccatggaaacactagaggccgggtgtctccttccacctccagtgatctgggaagtgacccagccgcctgcccttgttaagcctggtctgccccgtgggaagtgacttcatgttgcacatgtgatttcagcccccgaggcttgcgcgaggcttctggaccctcggttaaaggtcagcccctggccgggtgcggtggctcacgcctgtaatcccagcactttgggaggccaaggcgggtggatcatggagtcaggagatcgagaccatcctggctaacacggtgaaaccccgtctctactaaaaatacaaaaattacccaggcgtggtggcgggcgcctgtagtcccagctactgaggaggctgaggcaggagaatagcgtgaacccgggaggcggagcttgcagtgagccaagatcacgccactgcacttcagcctggacgacagagtgagactccatctcaaaaaacagacaaacaaaaaagtcagcccctgcacatctctgtagtgcttttcatgtattcaaaccacttccgtatatgacctctcacttagtcctcatgacaatggagcacttattattcttcccattttacagatgaggaaactaagacccagaaagttcaggtcctctgaccccagaagtgtctgtgatgaccctcccaaccttggctatctaccccacctgtggagaggaggtctggggtgacatctattgtagatcccacctgagagtttaaccaatgagaagacttactttcctggtaggcagcctgctttgttttgcacaggaagatagattttttttctcatctttcttataaacaacctcatgcacattctgtgtttgagccaagactagtcacccattgggggctaaccgtgcagtgtgagctgcgtccacaccctcacttctcccttcactccccctttcctcactcaggggctgagaggacagaggtggtcagccggggagcagaggtggcgaaggggctcatggcaagtggcagccattggaacaggggtgaggacccaggcctgggaaagccaccagggatgggggaaaccatgacgccgcctcctggtgcagtgcacaccatctctatccctgtcagccctcactgggtcatgggccttgggcagatgtcaaagagcccagcagcagcggtggtggccagctgggcagagcatccttgcttgggctaggaaagctttaccttctctgagtgcctccgcctgagagatgtgtgacccgtggcaccagggaaccacgtcttggagtggtccactgtaggccatgcgcttcatccacccccagtccctacataggccctacccttgcccgggagcttctagatagaaatcagaaagagattcaaggagccaaatgagcggtcagcccccaccatgcactccttgccccgtgcagagctccagccagcttcgtcaccagccccactggctcctggttggaacgaaagggtctctggttgcactgaatgcagctctcaaactggtcttgtacttgctgaataaatactgttgttcttgcctta

SEQ ID NO: 453026 - DNA, 4731 bp, Homo sapiens
ggcttacccctcccgggctaggacatcctcctctcccccttctgtttctgcgtgaggcgcacaaaagggcggggagccgggaacatgcttgccaactcagccagcgtgaggatcctcatcaagggaggcaaggtggtgaacgatgactgcacccacgaggctgacgtctacatcgagaatggcatcatccagcaggtgggccgcgagctcatgatccctggcggggccaaggtgattgatgccacaggaaaactggtgatccctggtggcatcgacaccagcacccacttccaccagaccttcatgaatgccacgtgcgtggacgacttctaccatgggaccaaggcagcactcgtcggaggcaccaccatgatcatcggccacgtcctgcccgacaaggagacctcccttgtggacgcttatgagaagtgccgaggtctggccgaccccaaggtctgctgtgattacgccctccacgtggggatcacctggtgggcacccaaggtgaaagcagaaatggagacactggtgagggagaagggtgtcaactcgttccagatgttcatgacctacaaggacctgtacatgcttcgagacagtgagctgtaccaagtgttgcacgcttgcaaggacattggggcaatcgcccgcgtccatgctgaaaatggggagcttgtggccgagggtgctaaggaggcactggatttggggatcacaggcccagaaggaatcgagatcagccgtccagaggagctggaagctgaagccactcatcgtgttatcaccattgcaaacaggactcactgtccaatctacctggtcaacgtgtccagtatctcggctggtgacgttatcgcagctgctaagatgcaagggaaggttgtgctggcggagaccaccactgcacatgccacgctgacaggcttacactactaccaccaggactggtcccacgcggctgcctatgtcacggtgcctcccctgagactggacaccaacacctcaacctacctcatgagcctgctggccaatgacactctgaacatcgtggcatcagatcaccggcctttcaccacaaagcagaaagctatgggcaaggaagacttcaccaagatcccacatggagtgagtggcgtgcaggaccgcatgagcgtcatctgggagagaggagtggttggaggaaagatggatgagaaccgttttgtggccgttaccagttccaacgcagctaagcttctgaacctgtatccccgcaagggccgcattattcccggagccgatgctgatgtggtggtgtgggacccagaagccacaaagaccatctcagccagcacgcaggtccagggaggagacttcaacctgtatgagaacatgcgctgccacggcgtgccactggtcaccatcagccgggggcgcgtcgtgtatgagaacggcgtcttcatgtgcgccgagggcaccggcaagttctgtcccctgaggtccttcccagacactgtctacaagaagctggtccagagagagaagactttaaaggttagaggagtggaccgcactccctacctgggggatgtcgctgttgtcgtgcaccctgggaaaaaagagatgggaaccccactcgcagacactcctacccggcccgtcacccggcatgggggcatgagggaccttcacgaatccagcttcagcctctctggctctcagatcgatgaccatgttccaaagcgagcttcagctcggatcctcgctcctcccggaggcaggtcgagtggcatttggtaaaggcattgccaagccccccgagtgaggacgcaccgccgccaccagcccgcaactctccagccgaagctgcaggggcaggagaggctgggctgggtggcacaccacccgaggggggccccgggacccacggagccctccctatgtctgcaaagtgattcactgtgcttcgagccaactctaacaggcactttgagatgtgttcctcctgctgtagtcctttctgccttggcctcggcgggcttttctggggcccaggaagcccacactatgcacagagcccaatgcatagagccctggccagcccttcctctcactcctgcctccgctggctttgggaaagcccagactttagtgccctgccccctggctgactggccagttgcccagagcactttagcagatgtggtttcaaagtaaaggcctcctcccccaccccttaggccccgtggtgacatttcccaagtcagacagatgtcagcttcccagccatgcccaggacgtcctatctcccccaacccacctctggccctgtgtaggggcagggatgggggtggctgggactcctggtgcccctcgccagcttctcctgcgccccgcccacaccctcgggggggtcacaggcccagaagggtagctgggcggggctcgaggctggtgccaggcgcgtgtaaatggttttgttttgcacgtttggtttgcgcagtagtttggtttgacttgtttgtgcatcctgtgaaaaataacggtgcttgtgtcactagcatagaatagcgacaggaatagatgtggtccttaggagacgctgcacttgacaccaaccagacagcacagggcaggggtggtggagggggctgggctcacaggcctctcttttccccgcctgcagtcttctgggctgcgggaggccctggccctttccccttcccctcccctccttgtctagtttcccacattccaaaagggggcctgggatgctagccccagagatgccagcccttcaggaagcaggtgtcctttcccctctctgcccctgatcactcccagcactccccttgccttcccctgtcttcacctgccacacacacacacacacacacacacacacacacacacgcatggcttcctataacttcttcctgctggacagagactcagcgctcctcctgtgtgactggcaagaggcctcatgcctgctgagagaggaggagtgggagaggggcttgccagacaccagagagggagaccccaggcccacaggacctggctgtcgaacccgcattgctgctcaggtgccgtgatctcccgtggtcggcaccaggcccttgccagctcatggcctcatcttctcccctgtccatccaggtgggccctccctgcttctaaagccccacagaagttcccatggaaacactagaggccgggtgtctccttccacctccagtgatctgggaagtgacccagccgcctgcccttgttaagcctggtctgccccgtgggaagtgacttcatgttgcacatgtgatttcagcccccgaggcttgcgcgaggcttctggaccctcggttaaaggtcagcccctggccgggtgcggtggctcacgcctgtaatcccagcactttgggaggccaaggcgggtggatcatggagtcaggagatcgagaccatcctggctaacacggtgaaaccccgtctctactaaaaatacaaaaattacccaggcgtggtggcgggcgcctgtagtcccagctactgaggaggctgaggcaggagaatagcgtgaacccgggaggcggagcttgcagtgagccaagatcacgccactgcacttcagcctggacgacagagtgagactccatctcaaaaaacagacaaacaaaaaagtcagcccctgcacatctctgtagtgcttttcatgtattcaaaccacttccgtatatgacctctcacttagtcctcatgacaatggagcacttattattcttcccattttacagatgaggaaactaagacccagaaagttcaggtcctctgaccccagaagtgtctgtgatgaccctcccaaccttggctatctaccccacctgtggagaggaggtctggggtgacatctattgtagatcccacctgagagtttaaccaatgagaagacttactttcctggtaggcagcctgctttgttttgcacaggaagatagattttttttctcatctttcttataaacaacctcatgcacattctgtgtttgagccaagactagtcacccattgggggctaaccgtgcagtgtgagctgcgtccacaccctcacttctcccttcactccccctttcctcactcaggggctgagaggacagaggtggtcagccggggagcagaggtggcgaaggggctcatggcaagtggcagccattggaacaggggtgaggacccaggcctgggaaagccaccagggatgggggaaaccatgacgccgcctcctggtgcagtgcacaccatctctatccctgtcagccctcactgggtcatgggccttgggcagatgtcaaagagcccagcagcagcggtggtggccagctgggcagagcatccttgcttgggctaggaaagctttaccttctctgagtgcctccgcctgagagatgtgtgacccgtggcaccagggaaccacgtcttggagtggtccactgtaggccatgcgcttcatccacccccagtccctacataggccctacccttgcccgggagcttctagatagaaatcagaaagagattcaaggagccaaatgagcggtcagcccccaccatgcactccttgccccgtgcagagctccagccagcttcgtcaccagccccactggctcctggttggaacgaaagggtctctggttgcactgaatgcagctctcaaactggtcttgtacttgctgaataaatactgttgttcttgcctta

SEQ ID NO: 453027 - DNA, 2833 bp, Homo sapiens
cccgccccactctggactcccgcgctgggcgcgctgaggcggcccccgagcgagcgcgcgtgcagccgccgccgccccgagcacccgcagctccggcgccgcggcgagacggagacggaccgagccacgggcccccgcggccgcagcatctcggaggagaacatgcttgccaactcagccagcgtgaggatcctcatcaagggaggcaaggtggtgaacgatgactgcacccacgaggctgacgtctacatcgagaatggcatcatccagcaggtgggccgcgagctcatgatccctggcggggccaaggtgattgatgccacaggaaaactggtgatccctggtggcatcgacaccagcacccacttccaccagaccttcatgaatgccacgtgcgtggacgacttctaccatgggaccaaggcagcactcgtcggaggcaccaccatgatcatcggccacgtcctgcccgacaaggagacctcccttgtggacgcttatgagaagtgccgaggtctggccgaccccaaggtctgctgtgattacgccctccacgtggggatcacctggtgggcacccaaggtgaaagcagaaatggagacactggtgagggagaagggtgtcaactcgttccagatgttcatgacctacaaggacctgtacatgcttcgagacagtgagctgtaccaagtgttgcacgcttgcaaggacattggggcaatcgcccgcgtccatgctgaaaatggggagcttgtggccgagggtgctaaggaggcactggatttggggatcacaggcccagaaggaatcgagatcagccgtccagaggagctggaagctgaagccactcatcgtgttatcaccattgcaaacaggactcactgtccaatctacctggtcaacgtgtccagtatctcggctggtgacgttatcgcagctgctaagatgcaagggaaggttgtgctggcggagaccaccactgcacatgccacgctgacaggcttacactactaccaccaggactggtcccacgcggctgcctatgtcacggtgcctcccctgagactggacaccaacacctcaacctacctcatgagcctgctggccaatgacactctgaacatcgtggcatcagatcaccggcctttcaccacaaagcagaaagctatgggcaaggaagacttcaccaagatcccacatggagtgagtggcgtgcaggaccgcatgagcgtcatctgggagagaggagtggttggaggaaagatggatgagaaccgttttgtggccgttaccagttccaacgcagctaagcttctgaacctgtatccccgcaagggccgcattattcccggagccgatgctgatgtggtggtgtgggacccagaagccacaaagaccatctcagccagcacgcaggtccagggaggagacttcaacctgtatgagaacatgcgctgccacggcgtgccactggtcaccatcagccgggggcgcgtcgtgtatgagaacggcgtcttcatgtgcgccgagggcaccggcaagttctgtcccctgaggtccttcccagacactgtctacaagaagctggtccagagagagaagactttaaaggttagaggagtggaccgcactccctacctgggggatgtcgctgttgtcgtgcaccctgggaaaaaagagatgggaaccccactcgcagacactcctacccggcccgtcacccggcatgggggcatgagggaccttcacgaatccagcttcagcctctctggctctcagatcgatgaccatgttccaaagcgagcttcagctcggatcctcgctcctcccggaggcaggtcgagtggcatttggtaaaggcattgccaagccccccgagtgaggacgcaccgccgccaccagcccgcaactctccagccgaagctgcaggggcaggagaggctgggctgggtggcacaccacccgaggggggccccgggacccacggagccctccctatgtctgcaaagtgattcactgtgcttcgaagcccagcagcagcggtggtggccagctgggcagagcatccttgcttgggctaggaaagctttaccttctctgagtgcctccgcctgagagatgtgtgacccgtggcaccagggaaccacgtcttggagtggtccactgtaggccatgcgcttcatccacccccagtccctacataggccctacccttgcccgggagcttctagatagaaatcagaaagagattcaaggagccaaatgagcggtcagcccccaccatgcactccttgccccgtgcagagctccagccagcttcgtcaccagccccactggctcctggttggaacgaaagggtctctggttgcactgaatgcagctctcaaactggtcttgtacttgctgaataaatactgttgttcttgccttagctgctctctaggtttgtggggttaagttgccagaaaattgtgctactgtgtgtgcgtgtgcgtgcgtgtgtgtagtgctaggagtccacagtaggtctctgtcaagccgatgtcgtgatgagggcttttctgatactgacccagaagccacagaaccacaaggaaacccaaaccccctccagctgctgaggcgcaggcacagcctggggtcggatggagcctccagcaccccagcacccaggtgacttccccactcccctgtaaatgtcatggtgctaagactgtgtcaaccccaagacgacacatggtcctgtgctttggccaccgtttgaggcaaaaactaaacagcccgacacgttgtgttctggtgcaggtttgtattaaactgtagctacttctca

SEQ ID NO: 453028 - DNA, 1278 bp, Homo sapiens
cccgccccactctggactcccgcgctgggcgcgctgaggcggcccccgagcgagcgcgcgtgcagccgccgccgccccgagcacccgcagctccggcgccgcggcgagacggagacggaccgagccacgggcccccgcggccgcagcatctcggaggagaacatgcttgccaactcagccagcgtgaggatcctcatcaagggaggcaaggtggtgaacgatgactgcacccacgaggctgacgtctacatcgagaatggcatcatccagcaggtgggccgcgagctcatgatccctggcggggccaaggtgattgatgccacaggaaaactggtgatccctggtggcatcgacaccagcacccacttccaccagaccttcatgaatgccacgtgcgtggacgacttctaccatgggaccaaggcagcactcgtcggaggcaccaccatgatcatcggccacgtcctgcccgacaaggagacctcccttgtggacgcttatgagaagtgccgaggtctggccgaccccaaggtctgctgtgattacgccctccacgtggggatcacctggtgggcacccaaggtgaaagcagaaatggagacactggtgagggagaagggtgtcaactcgttccagatgttcatgacctacaaggacctgtacatgcttcgagacagtgagctgtaccaagtgttgcacgcttgcaaggacattggggcaatcgcccgcgtccatgctgaaaatggggagcttgtggccgagggtgctaaggaggcactggatttggggatcacaggcccagaaggaatcgagatcagccgtccagaggagctggaagctgaagccactcatcgtgttatcaccattgcaaacaggactcactgtccaatctacctggtcaacgtgtccagtatctcggctggtgacgttatcgcagctgctaagatgcaagtgctaggagtccacagtaggtctctgtcaagccgatgtcgtgatgagggcttttctgatactgacccagaagccacagaaccacaaggaaacccaaaccccctccagctgctgaggcgcaggcacagcctggggtcggatggagcctccagcaccccagcacccaggtgacttccccactcccctgtaaatgtcatggtgctaagactgtgtcaaccccaagacgacacatggtcctgtgctttggccaccgtttgaggcaaaaactaaacagcccgacacgttgtgttctggtgcaggtttgtattaaactgtagctacttctca

SEQ ID NO: 453029 - DNA, 481 bp, Homo sapiens
cggccgcagcatctcggaggagtgggtgatggcaggggggtcggtgggcttacccctcccgggctaggacatcctcctctcccccttctgtttctgcgtgaggcgcacaaaagggcggggagccgggtgagcctggggcccggccgcaggggacgcggcgggaggtgtggtttggggttgggaggtggccatcggggctaagccggggcgctcttggggtcctctttgtacgcccgcgaagcgccgtgccgggccttgctcatagtaagcgtttaatgcgtgctcgcggggttgcaaagccctggggtgaggaggcggctcggccgaggggtttcgcgcctagcacgcagtgggccgctttcctagccgggcgcggtgcagtggaccgctggagggctgggcgggggcgcctctggccgggggccagtcctgccggtcccaggatctgcgctgtccccggtcccacacaccacccagatac

SEQ ID NO: 453030 - DNA, 271 bp, Homo sapiens
tctggtgcaggtttgtattaaactgtagctacttctcacttggactctgttgtgtttcttcaaagaggagggagtttggcagagatctcttctacggtggctgggcaaggcttcagttgctaagaaaaggcagctttgatctgtctctcctattgggtggcagctcactgggaggcttgtgcagagactggatttttttttttttttaattctgagagacaggagccccagtggtgccagatttccagggacaaggttgccaaattatctg

SEQ ID NO: 453031 - DNA, 622 bp, Homo sapiens
cccgccccactctggactcccgcgctgggcgcgctgaggcggcccccgagcgagcgcgcgtgcagccgccgccgccccgagcacccgcagctccggcgccgcggcgagacggagacggaccgagccacgggcccccgcggccgcagcatctcggaggagaacatgcttgccaactcagccagcgtgaggatcctcatcaagggaggcaaggtggtgaacgatgactgcacccacgaggctgacgtctacatcgagaatggcatcatccagcaggtgggccgcgagctcatgatccctggcggggccaaggtgattgatgccacaggaaaactggtgatccctggtggcatcgacaccagcacccacttccaccagaccttcatgaatgccacgtgcgtggacgacttctaccatgggaccaaggtaatgctcctgtttgccaaaggtggcttcctctttggcttttttattctgcttctagggctgctccagactagactcatgtgagccaggtgctcccagtgtattgctggcaggagaagggtgtgtcagggccactgtggcaactacaatagggatttccggcttaacgtcacagatttccatgattatagaaaaggag

SEQ ID NO: 453032 - DNA, 5211 bp, Homo sapiens
cccgccccactctggactcccgcgctgggcgcgctgaggcggcccccgagcgagcgcgcgtgcagccgccgccgccccgagcacccgcagctccggcgccgcggcgagacggagacggaccgagccacgggcccccgcggccgcagcatctcggaggagaacatgcttgccaactcagccagcgtgaggatcctcatcaagggaggcaaggtggtgaacgatgactgcacccacgaggctgacgtctacatcgagaatggcatcatccagcaggtgggccgcgagctcatgatccctggcggggccaaggtgattgatgccacaggaaaactggtgatccctggtggcatcgacaccagcacccacttccaccagaccttcatgaatgccacgtgcgtggacgacttctaccatgggaccaaggcagcactcgtcggaggcaccaccatgatcatcggccacgtcctgcccgacaaggagacctcccttgtggacgcttatgagaagtgccgaggtctggccgaccccaaggtctgctgtgattacgccctccacgtggggatcacctggtgggcacccaaggtgaaagcagaaatggagacactggtgagggagaagggtgtcaactcgttccagatgttcatgacctacaaggacctgtacatgcttcgagacagtgagctgtaccaagtgttgcacgcttgcaaggacattggggcaatcgcccgcgtccatgctgaaaatggggagcttgtggccgagggtgctaaggaggcactggatttggggatcacaggcccagaaggaatcgagatcagccgtccagaggagctggaagctgaagccactcatcgtgttatcaccattgcaaacaggactcactgtccaatctacctggtcaacgtgtccagtatctcggctggtgacgttatcgcagctgctaagatgcaagggaaggttgtgctggcggagaccaccactgcacatgccacgctgacaggcttacactactaccaccaggactggtcccacgcggctgcctatgtcacggtgcctcccctgagactggacaccaacacctcaacctacctcatgagcctgctggccaatgacactctgaacatcgtggcatcagatcaccggcctttcaccacaaagcagaaagctatgggcaaggaagacttcaccaagatcccacatggagtgagtggcgtgcaggaccgcatgagcgtcatctgggagagaggagtggttggaggaaagatggatgagaaccgttttgtggccgttaccagttccaacgcagctaagcttctgaacctgtatccccgcaagggccgcattattcccggagccgatgctgatgtggtggtgtgggacccagaagccacaaagaccatctcagccagcacgcaggtccagggaggagacttcaacctgtatgagaacatgcgctgccacggcgtgccactggtcaccatcagccgggggcgcgtcgtgtatgagaacggcgtcttcatgtgcgccgagggcaccggcaagttctgtcccctgaggtccttcccagacactgtctacaagaagctggtccagagagagaagactttaaaggttagaggagtggaccgcactccctacctgggggatgtcgctgttgtcgtgcaccctgggaaaaaagagatgggaaccccactcgcagacactcctacccggcccgtcacccggcatgggggcatgagggaccttcacgaatccagcttcagcctctctggctctcagatcgatgaccatgttccaaagcgagcttcagctcggatcctcgctcctcccggaggcaggtcgagtggcatttggtaaaggcattgccaagccccccgagtgaggacgcaccgccgccaccagcccgcaactctccagccgaagctgcaggggcaggagaggctgggctgggtggcacaccacccgaggggggccccgggacccacggagccctccctatgtctgcaaagtgattcactgtgcttcgagccaactctaacaggcactttgagatgtgttcctcctgctgtagtcctttctgccttggcctcggcgggcttttctggggcccaggaagcccacactatgcacagagcccaatgcatagagccctggccagcccttcctctcactcctgcctccgctggctttgggaaagcccagactttagtgccctgccccctggctgactggccagttgcccagagcactttagcagatgtggtttcaaagtaaaggcctcctcccccaccccttaggccccgtggtgacatttcccaagtcagacagatgtcagcttcccagccatgcccaggacgtcctatctcccccaacccacctctggccctgtgtaggggcagggatgggggtggctgggactcctggtgcccctcgccagcttctcctgcgccccgcccacaccctcgggggggtcacaggcccagaagggtagctgggcggggctcgaggctggtgccaggcgcgtgtaaatggttttgttttgcacgtttggtttgcgcagtagtttggtttgacttgtttgtgcatcctgtgaaaaataacggtgcttgtgtcactagcatagaatagcgacaggaatagatgtggtccttaggagacgctgcacttgacaccaaccagacagcacagggcaggggtggtggagggggctgggctcacaggcctctcttttccccgcctgcagtcttctgggctgcgggaggccctggccctttccccttcccctcccctccttgtctagtttcccacattccaaaagggggcctgggatgctagccccagagatgccagcccttcaggaagcaggtgtcctttcccctctctgcccctgatcactcccagcactccccttgccttcccctgtcttcacctgccacacacacacacacacacacacacacacacacacacgcatggcttcctataacttcttcctgctggacagagactcagcgctcctcctgtgtgactggcaagaggcctcatgcctgctgagagaggaggagtgggagaggggcttgccagacaccagagagggagaccccaggcccacaggacctggctgtcgaacccgcattgctgctcaggtgccgtgatctcccgtggtcggcaccaggcccttgccagctcatggcctcatcttctcccctgtccatccaggtgggccctccctgcttctaaagccccacagaagttcccatggaaacactagaggccgggtgtctccttccacctccagtgatctgggaagtgacccagccgcctgcccttgttaagcctggtctgccccgtgggaagtgacttcatgttgcacatgtgatttcagcccccgaggcttgcgcgaggcttctggaccctcggttaaaggtcagcccctggccgggtgcggtggctcacgcctgtaatcccagcactttgggaggccaaggcgggtggatcatggagtcaggagatcgagaccatcctggctaacacggtgaaaccccgtctctactaaaaatacaaaaattacccaggcgtggtggcgggcgcctgtagtcccagctactgaggaggctgaggcaggagaatagcgtgaacccgggaggcggagcttgcagtgagccaagatcacgccactgcacttcagcctggacgacagagtgagactccatctcaaaaaacagacaaacaaaaaagtcagcccctgcacatctctgtagtgcttttcatgtattcaaaccacttccgtatatgacctctcacttagtcctcatgacaatggagcacttattattcttcccattttacagatgaggaaactaagacccagaaagttcaggtcctctgaccccagaagtgtctgtgatgaccctcccaaccttggctatctaccccacctgtggagaggaggtctggggtgacatctattgtagatcccacctgagagtttaaccaatgagaagacttactttcctggtaggcagcctgctttgttttgcacaggaagatagattttttttctcatctttcttataaacaacctcatgcacattctgtgtttgagccaagactagtcacccattgggggctaaccgtgcagtgtgagctgcgtccacaccctcacttctcccttcactccccctttcctcactcaggggctgagaggacagaggtggtcagccggggagcagaggtggcgaaggggctcatggcaagtggcagccattggaacaggggtgaggacccaggcctgggaaagccaccagggatgggggaaaccatgacgccgcctcctggtgcagtgcacaccatctctatccctgtcagccctcactgggtcatgggccttgggcagatgtcaaagagcccagcagcagcggtggtggccagctgggcagagcatccttgcttgggctaggaaagctttaccttctctgagtgcctccgcctgagagatgtgtgacccgtggcaccagggaaccacgtcttggagtggtccactgtaggccatgcgcttcatccacccccagtccctacataggccctacccttgcccgggagcttctagatagaaatcagaaagagattcaaggagccaaatgagcggtcagcccccaccatgcactccttgccccgtgcagagctccagccagcttcgtcaccagccccactggctcctggttggaacgaaagggtctctggttgcactgaatgcagctctcaaactggtcttgtacttgctgaataaatactgttgttcttgccttagctgctctctaggtttgtggggttaagttgccagaaaattgtgctactgtgtgtgcgtgtgcgtgcgtgtgtgtagtgctaggagtccacagtaggtctctgtcaagccgatgtcgtgatgagggcttttctgatactgacccagaagccacagaaccacaaggaaacccaaaccccctccagctgctgaggcgcaggcacagcctggggtcggatggagcctccagcaccccagcacccaggtgacttccccactcccctgtaaatgtcatggtgctaagactgtgtcaaccccaagacgacacatggtcctgtgctttggccaccgtttgaggcaaaaactaaacagcccgacacgttgtgttctggtgcaggtttgtattaaactgtagctacttctca

SEQ ID NO: 453033 - DNA, 3721 bp, Homo sapiens
ggcttacccctcccgggctaggacatcctcctctcccccttctgtttctgcgtgaggcgcacaaaagggcggggagccgggaacatgcttgccaactcagccagcgtgaggatcctcatcaagggaggcaaggtggtgaacgatgactgcacccacgaggctgacgtctacatcgagaatggcatcatccagcaggtgggccgcgagctcatgatccctggcggggccaaggtgattgatgccacaggaaaactggtgatccctggtggcatcgacaccagcacccacttccaccagaccttcatgaatgccacgtgcgtggacgacttctaccatgggaccaaggcagcactcgtcggaggcaccaccatgatcatcggccacgtcctgcccgacaaggagacctcccttgtggacgcttatgagaagtgccgaggtctggccgaccccaaggtctgctgtgattacgccctccacgtggggatcacctggtgggcacccaaggtgaaagcagaaatggagacactggtgagggagaagggtgtcaactcgttccagatgttcatgacctacaaggacctgtacatgcttcgagacagtgagctgtaccaagtgttgcacgcttgcaaggacattggggcaatcgcccgcgtccatgctgaaaatggggagcttgtggccgagggtgctaaggaggcactggatttggggatcacaggcccagaaggaatcgagatcagccgtccagaggagctggaagctgaagccactcatcgtgttatcaccattgcaaacaggactcactgtccaatctacctggtcaacgtgtccagtatctcggctggtgacgttatcgcagctgctaagatgcaagggaaggttgtgctggcggagaccaccactgcacatgccacgctgacaggcttacactactaccaccaggactggtcccacgcggctgcctatgtcacggtgcctcccctgagactggacaccaacacctcaacctacctcatgagcctgctggccaatgacactctgaacatcgtggcatcagatcaccggcctttcaccacaaagcagaaagctatgggcaaggaagacttcaccaagatcccacatggagtgagtggcgtgcaggaccgcatgagcgtcatctgggagagaggagtggttggaggaaagatggatgagaaccgttttgtggccgttaccagttccaacgcagctaagcttctgaacctgtatccccgcaagggccgcattattcccggagccgatgctgatgtggtggtgtgggacccagaagccacaaagaccatctcagccagcacgcaggtccagggaggagacttcaacctgtatgagaacatgcgctgccacggcgtgccactggtcaccatcagccgggggcgcgtcgtgtatgagaacggcgtcttcatgtgcgccgagggcaccggcaagttctgtcccctgaggtccttcccagacactgtctacaagaagctggtccagagagagaagactttaaaggttagaggagtggaccgcactccctacctgggggatgtcgctgttgtcgtgcaccctgggaaaaaagagatgggaaccccactcgcagacactcctacccggcccgtcacccggcatgggggcatgagggaccttcacgaatccagcttcagcctctctggctctcagatcgatgaccatgttccaaagcgagcttcagctcggatcctcgctcctcccggaggcaggtcgagtggcatttggtaaaggcattgccaagccccccgagtgaggacgcaccgccgccaccagcccgcaactctccagccgaagctgcaggggcaggagaggctgggctgggtggcacaccacccgaggggggccccgggacccacggagccctccctatgtctgcaaagtgattcactgtgcttcgagccaactctaacaggcactttgagatgtgttcctcctgctgtagtcctttctgccttggcctcggcgggcttttctggggcccaggaagcccacactatgcacagagcccaatgcatagagccctggccagcccttcctctcactcctgcctccgctggctttgggaaagcccagactttagtgccctgccccctggctgactggccagttgcccagagcactttagcagatgtggtttcaaagtaaaggcctcctcccccaccccttaggccccgtggtgacatttcccaagtcagacagatgtcagcttcccagccatgcccaggacgtcctatctcccccaacccacctctggccctgtgtaggggcagggatgggggtggctgggactcctggtgcccctcgccagcttctcctgcgccccgcccacaccctcgggggggtcacaggcccagaagggtagctgggcggggctcgaggctggtgccaggcgcgtgtaaatggttttgttttgcacgtttggtttgcgcagtagtttggtttgacttgtttgtgcatcctgtgaaaaataacggtgcttgtgtcactagcatagaatagcgacaggaatagattttttttctcatctttcttataaacaacctcatgcacattctgtgtttgagccaagactagtcacccattgggggctaaccgtgcagtgtgagctgcgtccacaccctcacttctcccttcactccccctttcctcactcaggggctgagaggacagaggtggtcagccggggagcagaggtggcgaaggggctcatggcaagtggcagccattggaacaggggtgaggacccaggcctgggaaagccaccagggatgggggaaaccatgacgccgcctcctggtgcagtgcacaccatctctatccctgtcagccctcactgggtcatgggccttgggcagatgtcaaagagcccagcagcagcggtggtggccagctgggcagagcatccttgcttgggctaggaaagctttaccttctctgagtgcctccgcctgagagatgtgtgacccgtggcaccagggaaccacgtcttggagtggtccactgtaggccatgcgcttcatccacccccagtccctacataggccctacccttgcccgggagcttctagatagaaatcagaaagagattcaaggagccaaatgagcggtcagcccccaccatgcactccttgccccgtgcagagctccagccagcttcgtcaccagccccactggctcctggttggaacgaaagggtctctggttgcactgaatgcagctctcaaactggtcttgtacttgctgaataaatactgttgttcttgccttagctgctctctaggtttgtggggttaagttgccagaaaattgtgctactgtgtgtgcgtgtgcgtgcgtgtgtgtagtgctaggagtccacagtaggtctctgtcaagccgatgtcgtgatgagggcttttctgatactgacccagaagccacagaaccacaaggaaacccaaaccccctccagctgctgaggcgcaggcacagcctggggtcggatggagcctccagcaccccagcacccaggtgacttccccactcccctgtaaatgtcatggtgctaagactgtgtcaaccccaagacgacacatggtcctgtgctttggccaccgtttgaggcaaaaactaaacagcccgacacgttgtgttctggtgcaggtttgtattaaactgtagctacttctca

SEQ ID NO: 453034 - DNA, 3865 bp, Homo sapiens
gcgccgcggacccagagagagggttccgcggaggagaagaggaagaggaagttgggggagggtcctagcggggagtgaaccggaagtgtaaaggttcctgcctctcctcggccaggcggaacctctctgctgggcccggtggccgcaaaagaactttctttctcccgcccgaacggtcgccgcggccaactgcctcgcccgcctggcagcctaaccctccttctcttcttctcctctccggcttcgcgcggccctgcctccctctcgcccggcggcatccgcttgctgctgccaccgcctcctcatcttctgcccggccaaccggcctgccccgctgcagtgatgtgcgacaaggagttcatgtgggccctgaaaaacggagacttggatgaggtgaaagactatgtggccaagggagaagatgtcaaccggacactagaaggtggaaggaaacctcttcattatgcagcagattgtgggcagcttgaaatcctggaatttctgctgctgaaaggagcagatattaatgctccagataaacatcatattactcctcttctgtctgctgtctatgagggtcatgtttcctgtgtgaaattgcttctgtcaaagggtgctgataagactgtgaaaggcccagatggactgaccgcctttgaagccactgacaaccaggcaatcaaagctcttctccagtgatggatggatggactgataactccggaagaatgactctcctgtggcctcacactgctgcctgtctgtctgtcactctctatctgccagcttcttcagctaaatactttaagaggggtgaggggagagagaaattcataacaaatccgactaccagaaaaaaaaaattgttttggaggaggggcaaaaggaaccatgatcaggcttttactgggattcctgatcaagtaagcctcttccctttctaataaaatatacaccttatacccaagggagagcaaagacaaaatacaccagtaacatttgaccttttcagctccctagctaatttattagattgtgttgaaggtctgattctacaaaggccaactctacatatttggtagccctaactgtctgagcagtagtggctgctgtgatgtaaacttagggtgctgagataagcaattagctctagccttctgccttaagaatgcactctactggggatttcctggcatagttaagagcgctgcctataaggttggtgaccaaatctttcctcggtgactttaagctttatgtgaaagcttagttaaggtgaggaggggcacactcctaaattgctggatgactgaactttggattttctctcccctttcacatggatttcatgtctctttagataaaactgactagttttatttataaaatcttaagttttggaagtctaaaggagaaaccattccagtatgcatatttttttctcctctagattcatacatttatatagcattgaaacactttcaaactcctgctggtagtaaaaggggatttaaaaatagaatcatagccataagcctgttagtatcatatgaagagagaacagttatcttagtacctatggattttctttatttgctgtttgaatggattgaccttggttatgtgttgagaattaaggaacattctttgaaatgcctctctcagacccatcttggaggctgattacttactgcaccaaagctatcactggggtgagatttactgtttggacaaatttagccccatcccttcaaaaatacacttgtaaccaggtttcccagagttgttgataggcttctgctgaacatatgccaacccacctgcataatatatttttgttgcttttataaatcatgcattacataaagtgtgacaacttcaaaatgtattctctgttcttggaatacagtgccctaaaatggtgttcttatgacctgcagaaaatatttacacatatttccaaatatttatttcatgagcagtacagctaattaaaatatataagcttaaattttatatcttacatttaaaatattaagattcctttgacttgccatccatataagcttgctaaaaatattaagaccaagtcatgcaataattgaatgtacctcaaatttttaggggagggtgggttagggactgatactcagattgtggataataattgaattggtttttaaaggcaacatagcattctacagcagggttaatctattatcaagaacagtcaccctggttaataacaagttttactgatcagttgctggttggttggttggttggcatgtgggtgtgtgggtgtataggtgtgtgtgggtgtgtgtgtgtatttttccccatgagtcctttttttaatcctgtggctttttcacttacaactagcctaaccctgtaattttcctacatccaagaaaacaatcacaaagtagtggtttaaatactttgttgtatttggctaattttgctgtcttaatgcagcctattaagagttgggttaaaaatcagtaatcagtactttattacatcactgaactaaaatatggagacatcctcattgaaaatggagggcactctatcagtctataactatcaacgtagtgcaacagggtgttttgatacctttgttttcacctcttgacataatgctatttaaaggcttgaatttttccctttatataattttcacctttactttcaaagtgttttgttgtagttggctattgcagagagtgcattgtcctatcattcctaaacctggtctgctttctacattcatggtatggaaaccatgtgattctttgtacagtttatcctgatgttgcttgtaatgcagtagaggctatttcgccttcgcttttctttctcgacctttttgtaaaccctataattatgaagcgattgcttgagaaaataacatataaacatagaatagaatagactgaccaagatggttcacagtttctttttttaactaggttatttataatgtatttctgaaccacttggcagacaaattcacaacacttaatgttcatattttgagtaaaggaagctaaaaccatgtttgctttctggtactacatgcattagcgaaaggttaagtaagttttgttctccactgaagtaatacttaacatctcagaaaaaattttgcatgttctgtagttttgtattaaatcagtcatttcatatgcactatatcaagtacaaacaggtagtttacctgtttatagtagtgtactaacaaagtctcccttgcagcttcagactgttatctataggcttatcgttcaaatacagcacttgaatatcccaagtagttcttctacgcatagctcacctttctaaacccagttaagcatggaagagaggtagtaggtaggtgcagtgtgtggaagctgcaaacaagtaggccttttattcattgatatcttttcccaagtactggattttaaatctgtatgtatctgtttgatttttttttctaatatttcagttgagctgctgttttcttccatgcaatattgtatactcaattgtgtatagaagaagctggtgagagtgccctcctacataaataagcaattgcagtgttttgcatgcaaaatataaaaaatttaaattgtcctgattctattttgtaaatggagaaacaatcatatctttctaagcggtaatggaggaagactagtgctttgtgcattttgatatatttgagttcattttttccacaatgtcatacttttgacgcagttgggtttctcataagtatcctagttcatgtacatccgaatgctaaataatactgtgttttaagttttgtgttgcaagaacaaatggaataaacttgaattgtgctaca

SEQ ID NO: 453035 - DNA, 3071 bp, Homo sapiens
gcagagatgagaggcgttgcaacagcaaccggatgccccaggcgagagggaagcaggtccggcgaagccggagaggagaagaagagaagaggcttacatgatcaggcttttactgggattcctgatcaagtaagcctcttccctttctaataaaatatacaccttatacccaagggagagcaaagacaaaatacaccagtaacatttgaccttttcagctccctagctaatttattagattgtgttgaaggtctgattctacaaaggccaactctacatatttggtagccctaactgtctgagcagtagtggctgctgtgatgtaaacttagggtgctgagataagcaattagctctagccttctgccttaagaatgcactctactggggatttcctggcatagttaagagcgctgcctataaggttggtgaccaaatctttcctcggtgactttaagctttatgtgaaagcttagttaaggtgaggaggggcacactcctaaattgctggatgactgaactttggattttctctcccctttcacatggatttcatgtctctttagataaaactgactagttttatttataaaatcttaagttttggaagtctaaaggagaaaccattccagtatgcatatttttttctcctctagattcatacatttatatagcattgaaacactttcaaactcctgctggtagtaaaaggggatttaaaaatagaatcatagccataagcctgttagtatcatatgaagagagaacagttatcttagtacctatggattttctttatttgctgtttgaatggattgaccttggttatgtgttgagaattaaggaacattctttgaaatgcctctctcagacccatcttggaggctgattacttactgcaccaaagctatcactggggtgagatttactgtttggacaaatttagccccatcccttcaaaaatacacttgtaaccaggtttcccagagttgttgataggcttctgctgaacatatgccaacccacctgcataatatatttttgttgcttttataaatcatgcattacataaagtgtgacaacttcaaaatgtattctctgttcttggaatacagtgccctaaaatggtgttcttatgacctgcagaaaatatttacacatatttccaaatatttatttcatgagcagtacagctaattaaaatatataagcttaaattttatatcttacatttaaaatattaagattcctttgacttgccatccatataagcttgctaaaaatattaagaccaagtcatgcaataattgaatgtacctcaaatttttaggggagggtgggttagggactgatactcagattgtggataataattgaattggtttttaaaggcaacatagcattctacagcagggttaatctattatcaagaacagtcaccctggttaataacaagttttactgatcagttgctggttggttggttggttggcatgtgggtgtgtgggtgtataggtgtgtgtgggtgtgtgtgtgtatttttccccatgagtcctttttttaatcctgtggctttttcacttacaactagcctaaccctgtaattttcctacatccaagaaaacaatcacaaagtagtggtttaaatactttgttgtatttggctaattttgctgtcttaatgcagcctattaagagttgggttaaaaatcagtaatcagtactttattacatcactgaactaaaatatggagacatcctcattgaaaatggagggcactctatcagtctataactatcaacgtagtgcaacagggtgttttgatacctttgttttcacctcttgacataatgctatttaaaggcttgaatttttccctttatataattttcacctttactttcaaagtgttttgttgtagttggctattgcagagagtgcattgtcctatcattcctaaacctggtctgctttctacattcatggtatggaaaccatgtgattctttgtacagtttatcctgatgttgcttgtaatgcagtagaggctatttcgccttcgcttttctttctcgacctttttgtaaaccctataattatgaagcgattgcttgagaaaataacatataaacatagaatagaatagactgaccaagatggttcacagtttctttttttaactaggttatttataatgtatttctgaaccacttggcagacaaattcacaacacttaatgttcatattttgagtaaaggaagctaaaaccatgtttgctttctggtactacatgcattagcgaaaggttaagtaagttttgttctccactgaagtaatacttaacatctcagaaaaaattttgcatgttctgtagttttgtattaaatcagtcatttcatatgcactatatcaagtacaaacaggtagtttacctgtttatagtagtgtactaacaaagtctcccttgcagcttcagactgttatctataggcttatcgttcaaatacagcacttgaatatcccaagtagttcttctacgcatagctcacctttctaaacccagttaagcatggaagagaggtagtaggtaggtgcagtgtgtggaagctgcaaacaagtaggccttttattcattgatatcttttcccaagtactggattttaaatctgtatgtatctgtttgatttttttttctaatatttcagttgagctgctgttttcttccatgcaatattgtatactcaattgtgtatagaagaagctggtgagagtgccctcctacataaataagcaattgcagtgttttgcatgcaaaatataaaaaatttaaattgtcctgattctattttgtaaatggagaaacaatcatatctttctaagcggtaatggaggaagactagtgctttgtgcattttgatatatttgagttcattttttccacaatgtcatacttttgacgcagttgggtttctcataagtatcctagttcatgtacatccgaatgctaaataatactgtgttttaagttttgtgttgcaagaacaaatggaataaacttgaattgtgctaca

SEQ ID NO: 453036 - DNA, 4060 bp, Homo sapiens
gcgccgcggacccagagagagggttccgcggaggagaagaggaagaggaagttgggggagggtcctagcggggagtgaaccggaagtgtaaaggttcctgcctctcctcggccaggcggaacctctctgctgggcccggtggccgcaaaagaactttctttctcccgcccgaacggtcgccgcggccaactgcctcgcccgcctggcagcctaaccctccttctcttcttctcctctccggcttcgcgcggccctgcctccctctcgcccggcggcatccgcttgctgctgccaccgcctcctcatcttctgcccggccaaccggcctgccccgctgcagtgatgtgcgacaaggagttcatgtgggccctgaaaaacggagacttggatgaggtgaaagactatgtggccaagggagaagatgtcaaccggacactagaaggtggaaggaaacctcttcattatgcagcagattgtgggcagcttgaaatcctggaatttctgctgctgaaaggagcagatattaatgctccagataaacatcatattactcctcttctgtctgctgtctatgagggtcatgtttcctgtgtgaaattgcttctgtcaaagggtgctgataagactgtgaaaggcccagatggactgaccgcctttgaagccactgacaaccaggcaatcaaagctcttctccagtgatggatggatggactgataactccggaagaatgactctcctgtggcctcacactgctgcctgtctgtctgtcactctctatctgccagcttcttcagctaaatactttaagaggggtgaggggagagagaaattcataacaaatccgactaccagaaaaaaaaaattgttttggaggaggggcaaaaggaaccatgatcaggcttttactgggattcctgatcaagtaagcctcttccctttctaataaaatatacaccttatacccaagggagagcaaagacaaaatacaccagtaacatttgaccttttcagctccctagctaatttattagattgtgttgaaggtctgattctacaaaggccaactctacatatttggtagccctaactgtctgagcagtagtggctgctgtgatgtaaacttagggtgctgagataagcaattagctctagccttctgccttaagaatgcactctactggggatttcctggcatagttaagagcgctgcctataaggttggtgaccaaatctttcctcggtgactttaagctttatgtgaaagcttagttaaggtgaggaggggcacactcctaaattgctggatgactgaactttggattttctctcccctttcacatggatttcatgtctctttagataaaactgactagttttatttataaaatcttaagttttggaagtctaaaggagaaaccattccagtatgcatatttttttctcctctagattcatacatttatatagcattgaaacactttcaaactcctgctggtagtaaaaggggatttaaaaatagaatcatagccataagcctgttagtatcatatgaagagagaacagttatcttagtacctatggattttctttatttgctgtttgaatggattgaccttggttatgtgttgagaattaaggaacattctttgaaatgcctctctcagacccatcttggaggctgattacttactgcaccaaagctatcactggggtgagatttactgtttggacaaatttagccccatcccttcaaaaatacacttgtaaccaggtttcccagagttgttgataggcttctgctgaacatatgccaacccacctgcataatatatttttgttgcttttataaatcatgcattacataaagtgtgacaacttcaaaatgtattctctgttcttggaatacagtgccctaaaatggtgttcttatgacctgcagaaaatatttacacatatttccaaatatttatttcatgagcagtacagctaattaaaatatataagcttaaattttatatcttacatttaaaatattaagattcctttgacttgccatccatataagcttgctaaaaatattaagaccaagtcatgcaataattgaatgtacctcaaatttttaggggagggtgggttagggactgatactcagattgtggataataattgaattggtttttaaaggcaacatagcattctacagcagggttaatctattatcaagaacagtcaccctggttaataacaagttttactgatcagttgctggttggttggttggttggcatgtgggtgtgtgggtgtataggtgtgtgtgggtgtgtgtgtgtatttttccccatgagtcctttttttaatcctgtggctttttcacttacaactagcctaaccctgtaattttcctacatccaagaaaacaatcacaaagtagtggtttaaatactttgttgtatttggctaattttgctgtcttaatgcagcctattaagagttgggttaaaaatcagtaatcagtactttattacatcactgaactaaaatatggagacatcctcattgaaaatggagggcactctatcagtctataactatcaacgtagtgcaacagggtgttttgatacctttgttttcacctcttgacataatgctatttaaaggcttgaatttttccctttatataattttcacctttactttcaaagtgttttgttgtagttggctattgcagagagtgcattgtcctatcattcctaaacctggtctgctttctacattcatggtatggaaaccatgtgattctttgtacagtttatcctgatgttgcttgtaatgcagtagaggctatttcgccttcgcttttctttctcgacctttttgtaaaccctataattatgaagcgattgcttgagaaaataacatataaacatagaatagaatagactgaccaagatggttcacagtttctttttttaactaggttatttataatgtatttctgaaccacttggcagacaaattcacaacacttaatgttcatattttgagtaaaggaagctaaaaccatgtttgctttctggtactacatgcattagcgaaaggttaagtaagttttgttctccactgaagtaatacttaacatctcagaaaaaattttgcatgttctgtagttttgtattaaatcagtcatttcatatgcactatatcaagtacaaacaggtagtttacctgtttatagtagtgtactaacaaagtctcccttgcagcttcagactgttatctataggcttatcgttcaaatacagcacttgaatatcccaagtagttcttctacgcatagctcacctttctaaacccagttaagcatggaagagaggtagtaggtaggtgcagtgtgtggaagctgcaaacaagtaggccttttattcattgatatcttttcccaagtactggattttaaatctgtatgtatctgtttgatttttttttctaatatttcagttgagctgctgttttcttccatgcaatattgtatactcaattgtgtatagaagaagctggtgagagtgccctcctacataaataagcaattgcagtgttttgcatgcaaaatataaaaaatttaaattgtcctgattctattttgtaaatggagaaacaatcatatctttctaagcggtaatggaggaagactagtgctttgtgcattttgatatatttgagttcattttttccacaatgtcatacttttgacgcagttgggtttctcataagtatcctagttcatgtacatccgaatgctaaataatactgtgttttaagttttgtgttgcaagaacaaatggaataaacttgaattgtgctacaaaaaaaaaaaaaaaaaaaaagctgttcacacagatgtttagacctttctctctctctctctctcttttcttctttctcaacaactctttcacagaggcagtcattttgaaaggttgaaatatttggcctttaccaaagagctttttttttccttaagcaaaatcctttcagaaagaacaatggggaagggcagat

SEQ ID NO: 453037 - DNA, 3446 bp, Homo sapiens
gcgccgcggacccagagagagggttccgcggaggagaagaggaagaggaagttgggggagggtcctagcggggagtgaaccggaagtgtaaaggttcctgcctctcctcggccaggcggaacctctctgctgggcccggtggccgcaaaagaactttctttctcccgcccgaacggtcgccgcggccaactgcctcgcccgcctggcagcctaaccctccttctcttcttctcctctccggcttcgcgcggccctgcctccctctcgcccggcggcatccgcttgctgctgccaccgcctcctcatcttctgcccggccaaccggcctgccccgctgcagtgatgtgcgacaaggagttcatgtgggccctgaaaaacggagacttggatgaggtgaaagactatgtggccaagggagaagatgtcaaccggacactagaaggtggaaggaaacctcttcattatgcagcagattgtgggcagcttgaaatcctggaatttctgctgctgaaaggagcagatattaatgctccagataaacatcatattactcctcttctgtctgctgtctatgagggtcatgtttcctgtgtgaaattgcttctgtcaaagggtgctgataagactgtgaaaggcccagatggactgaccgcctttgaagccactgacaaccaggcaatcaaagctcttctccagtgatggatggatggactgataactccggaagaatgactctcctgtggcctcacactgctgcctgtctgtctgtcactctctatctgccagcttcttcagctaaatactttaagaggggtgaggggagagagaaattcataacaaatccgactaccagaaaaaaaaaattgttttggaggaggggcaaaaggaaccatgatcaggcttttactgggattcctgatcaagtaagcctcttccctttctaataaaatatacaccttatacccaagggagagcaaagacaaaatacaccagtaacatttgaccttttcagctccctagctaatttattagattgtgttgaaggtctgattctacaaaggccaactctacatatttggtagccctaactgtctgagcagtagtggctgctgtgatgtaaacttagggtgctgagataagcaattagctctagccttctgccttaagaatgcactctactggggatttcctggcatagttaagagcgctgcctataaggttggtgaccaaatctttcctcggtgactttaagctttatgtgaaagcttagttaaggtgaggaggggcacactcctaaattgctggatgactgaactttggattttctctcccctttcacatggatttcatgtctctttagataaaactgactagttttatttataaaatcttaagttttggaagtctaaaggagaaaccattccagtatgcatatttttttctcctctagattcatacatttatatagcattgaaacactttcaaactcctgctggtagtaaaaggggatttaaaaatagaatcatagccataagcctgttagtatcatatgaagagagaacagttatcttagtacctatggattttctttatttgctgtttgaatggattgaccttggttatgtgttgagaattaaggaacattctttgaaatgcctctctcagacccatcttggaggctgattacttactgcaccaaagctatcactggggtgagatttactgtttggacaaatttagccccatcccttcaaaaatacacttgtaaccaggtttcccagagttgttgataggcttctgctgaacatatgccaacccacctgcataatatatttttgttgcttttataaatcatgcattacataaagtgtgacaacttcaaaatgtattctctgttcttggaatacagtgccctaaaatggtgttcttatgacctgcagaaaatatttacacatatttccaaatatttatttcatgagcagtacagctaattaaaatatataagcttaaattttatatcttacatttaaaatattaagattcctttgacttgccatccatataagcttgctaaaaatattaagaccaagtcatgcaataattgaatgtacctcaaatttttaggggagggtgggttagggactgatactcagattgtggataataattgaattggtttttaaaggcaacatagcattctacagcagggttaatctattatcaagaacagtcaccctggttaataacaagttttactgatcagttgctggttggttggttggttggcatgtgggtgtgtgggtgtataggtgtgtgtgggtgtgtgtgtgtatttttccccatgagtcctttttttaatcctgtggctttttcacttacaactagcctaaccctgtaattttcctacatccaagaaaacaatcacaaagtagtggtttaaatactttgttgtatttggctaattttgctgtcttaatgcagcctattaagagttgggttaaaaatcagtaatcagtactttattacatcactgaactaaaatatggagacatcctcattgaaaatggagggcactctatcagtctataactatcaacgtagtgcaacagggtgttttgatacctttgttttcacctcttgacataatgctatttaaaggcttgaatttttccctttatataattttcacctttactttcaaagtgttttgttgtagttggctattgcagagagtgcattgtcctatcattcctaaacctggtctgctttctacattcatggtatggaaaccatgtgattctttgtacagtttatcctgatgttgcttgtaatgcagtagaggctatttcgccttcgcttttctttctcgacctttttgtaaaccctataattatgaagcgattgcttgagaaaataacatataaacatagaatagaatagactgaccaagatggttcacagtttctttttttaactaggttatttataatgtatttctgaaccacttggcagacaaattcacaacacttaatgttcatattttgagtaaaggaagctaaaaccatgtttgctttctggtactacatgcattagcgaaaggttaagtaagttttgttctccactgaagtaatacttaacatctcagaaaaaattttgcatgttctgtagttttgtattaaatcagtcatttcatatgcactatatcaagtacaaacaggtagtttacctgtttatagtagtgtactaacaaagtctcccttgcagcttcagactgttatctataggcttatcgttcaaatacagcacttgaatatcccaagtagttcttctacgcatagctcacctttctaaacccagttaagcatggaagagaggtagtaggtaggtgcagtgtgtggaagctgcaaacaagtagccgcatccaaagcggggatcctcagaacagc

SEQ ID NO: 453038 - DNA, 3812 bp, Homo sapiens
gcgccgcggacccagagagagggttccgcggaggagaagaggaagaggaagttgggggagggtcctagcggggagtgaaccggaagtgtaaaggttcctgcctctcctcggccaggcggaacctctctgctgggcccggtggccgcaaaagaactttctttctcccgcccgaacggtcgccgcggccaactgcctcgcccgcctggcagcctaaccctccttctcttcttctcctctccggcttcgcgcggccctgcctccctctcgcccggcggcatccgcttgctgctgccaccgcctcctcatcttctgcccggccaaccggcctgccccgctgcagtgatgtgcgacaaggagttcatgtgggccctgaaaaacggagacttggatgaggtgaaagactatgtggccaagggagaagatgtcaaccggacactagaaggtggaaggaaacctcttcattatgcagcagattgtgggcagcttgaaatcctggaatttctgctgctgaaaggagcagatattaatgctccagataaacatcatattactcctcttctgtctgctgtctatgagggtcatgtttcctgtgtgaaattgcttctgtcaaagggtgctgataagactgtgaaaggcccagatggactgaccgcctttgaagccactgacaaccaggcaatcaaagctcttctccagtgatggatggatggactgataactccggaagaatgactctcctgtggcctcacactgctgcctgtctgtctgtcactctctatctgccagcttcttcagctaaatactttaagaggggtgaggggagagagaaattcataacaaatccgactaccagaaaaaaaaaattgttttggaggaggggcaaaaggaaccatgatcaggcttttactgggattcctgatcaagtaagcctcttccctttctaataaaatatacaccttatacccaagggagagcaaagacaaaatacaccagtaacatttgaccttttcagctccctagctaatttattagattgtgttgaaggtctgattctacaaaggccaactctacatatttggtagccctaactgtctgagcagtagtggctgctgtgatgtaaacttagggtgctgagataagcaattagctctagccttctgccttaagaatgcactctactggggatttcctggcatagttaagagcgctgcctataaggttggtgaccaaatctttcctcggtgactttaagctttatgtgaaagcttagttaaggtgaggaggggcacactcctaaattgctggatgactgaactttggattttctctcccctttcacatggatttcatgtctctttagataaaactgactagttttatttataaaatcttaagttttggaagtctaaaggagaaaccattccagtatgcatatttttttctcctctagattcatacatttatatagcattgaaacactttcaaactcctgctggtagtaaaaggggatttaaaaatagaatcatagccataagcctgttagtatcatatgaagagagaacagttatcttagtacctatggattttctttatttgctgtttgaatggattgaccttggttatgtgttgagaattaaggaacattctttgaaatgcctctctcagacccatcttggaggctgattacttactgcaccaaagctatcactggggtgagatttactgtttggacaaatttagccccatcccttcaaaaatacacttgtaaccaggtttcccagagttgttgataggcttctgctgaacatatgccaacccacctgcataatatatttttgttgcttttataaatcatgcattacataaagtgtgacaacttcaaaatgtattctctgttcttggaatacagtgccctaaaatggtgttcttatgacctgcagaaaatatttacacatatttccaaatatttatttcatgagcagtacagctaattaaaatatataagcttaaattttatatcttacatttaaaatattaagattcctttgacttgccatccatataagcttgctaaaaatattaagaccaagtcatgcaataattgaatgtacctcaaatttttaggggagggtgggttagggactgatactcagattgtggataataattgaattggtttttaaaggcaacatagcattctacagcagggttaatctattatcaagaacagtcaccctggttaataacaagttttactgatcagttgctggttggttggttggttggcatgtgggtgtgtgggtgtataggtgtgtgtgggtgtgtgtgtgtatttttccccatgagtcctttttttaatcctgtggctttttcacttacaactagcctaaccctgtaattttcctacatccaagaaaacaatcacaaagtagtggtttaaatactttgttgtatttggctaattttgctgtcttaatgcagcctattaagagttgggttaaaaatcagtaatcagtactttattacatcactgaactaaaatatggagacatcctcattgaaaatggagggcactctatcagtctataactatcaacgtagtgcaacagggtgttttgatacctttgttttcacctcttgacataatgctatttaaaggcttgaatttttccctttatataattttcacctttactttcaaagtgttttgttgtagttggctattgcagagagtgcattgtcctatcattcctaaacctggtctgctttctacattcatggtatggaaaccatgtgattctttgtacagtttatcctgatgttgcttgtaatgcagtagaggctatttcgccttcgcttttctttctcgacctttttgtaaaccctataattatgaagcgattgcttgagaaaataacatataaacatagaatagaatagactgaccaagatggttcacagtttctttttttaactaggttatttataatgtatttctgaaccacttggcagacaaattcacaacacttaatgttcatattttgagtaaaggaagctaaaaccatgtttgctttctggtactacatgcattagcgaaaggttaagtaagttttgttctccactgaagtaatacttaacatctcagatatatcaagtacaaacaggtagtttacctgtttatagtagtgtactaacaaagtctcccttgcagcttcagactgttatctataggcttatcgttcaaatacagcacttgaatatcccaagtagttcttctacgcatagctcacctttctaaacccagttaagcatggaagagaggtagtaggtaggtgcagtgtgtggaagctgcaaacaagtaggccttttattcattgatatcttttcccaagtactggattttaaatctgtatgtatctgtttgatttttttttctaatatttcagttgagctgctgttttcttccatgcaatattgtatactcaattgtgtatagaagaagctggtgagagtgccctcctacataaataagcaattgcagtgttttgcatgcaaaatataaaaaatttaaattgtcctgattctattttgtaaatggagaaacaatcatatctttctaagcggtaatggaggaagactagtgctttgtgcattttgatatatttgagttcattttttccacaatgtcatacttttgacgcagttgggtttctcataagtatcctagttcatgtacatccgaatgctaaataatactgtgttttaagttttgtgttgcaagaacaaatggaataaacttgaattgtgctaca

SEQ ID NO: 453039 - DNA, 1417 bp, Homo sapiens
caggctgatctagaggatcccgcttggatgcggcctattaagagttgggttaaaaatcagtaatcagtactttattacatcactgaactaaaatatggagacatcctcattgaaaatggagggcactctatcagtctataactatcaacgtagtgcaacagggtgttttgatacctttgttttcacctcttgacataatgctatttaaaggcttgaatttttccctttatataattttcacctttactttcaaagtgttttgttgtagttggctattgcagagagtgcattgtcctatcattcctaaacctggtctgctttctacattcatggtatggaaaccatgtgattctttgtacagtttatcctgatgttgcttgtaatgcagtagaggctatttcgccttcgcttttctttctcgacctttttgtaaaccctataattatgaagcgattgcttgagaaaataacatataaacatagaatagaatagactgaccaagatggttcacagtttctttttttaactaggttatttataatgtatttctgaaccacttggcagacaaattcacaacacttaatgttcatattttgagtaaaggaagctaaaaccatgtttgctttctggtactacatgcattagcgaaaggttaagtaagttttgttctccactgaagtaatacttaacatctcagaaaaaattttgcatgttctgtagttttgtattaaatcagtcatttcatatgcactatatcaagtacaaacaggtagtttacctgtttatagtagtgtactaacaaagtctcccttgcagcttcagactgttatctataggcttatcgttcaaatacagcacttgaatatcccaagtagttcttctacgcatagctcacctttctaaacccagttaagcatggaagagaggtagtaggtaggtgcagtgtgtggaagctgcaaacaagtaggccttttattcattgatatcttttcccaagtactggattttaaatctgtatgtatctgtttgatttttttttctaatatttcagttgagctgctgttttcttccatgcaatattgtatactcaattgtgtatagaagaagctggtgagagtgccctcctacataaataagcaattgcagtgttttgcatgcaaaatataaaaaatttaaattgtcctgattctattttgtaaatggagaaacaatcatatctttctaagcggtaatggaggaagactagtgctttgtgcattttgatatatttgagttcattttttccacaatgtcatacttttgacgcagttgggtttctcataagtatcctagttcatgtacatccgaatgctaaataatactgtgttttaagttttgtgttgcaagaacaaatggaataaacttgaattgtgctaca

SEQ ID NO: 453040 - DNA, 1364 bp, Homo sapiens
caggctgatctagaggatcccgcttggatgcggcctattaagagttgggttaaaaatcagtaatcagtactttattacatcactgaactaaaatatggagacatcctcattgaaaatggagggcactctatcagtctataactatcaacgtagtgcaacagggtgttttgatacctttgttttcacctcttgacataatgctatttaaaggcttgaatttttccctttatataattttcacctttactttcaaagtgttttgttgtagttggctattgcagagagtgcattgtcctatcattcctaaacctggtctgctttctacattcatggtatggaaaccatgtgattctttgtacagtttatcctgatgttgcttgtaatgcagtagaggctatttcgccttcgcttttctttctcgacctttttgtaaaccctataattatgaagcgattgcttgagaaaataacatataaacatagaatagaatagactgaccaagatggttcacagtttctttttttaactaggttatttataatgtatttctgaaccacttggcagacaaattcacaacacttaatgttcatattttgagtaaaggaagctaaaaccatgtttgctttctggtactacatgcattagcgaaaggttaagtaagttttgttctccactgaagtaatacttaacatctcagatatatcaagtacaaacaggtagtttacctgtttatagtagtgtactaacaaagtctcccttgcagcttcagactgttatctataggcttatcgttcaaatacagcacttgaatatcccaagtagttcttctacgcatagctcacctttctaaacccagttaagcatggaagagaggtagtaggtaggtgcagtgtgtggaagctgcaaacaagtaggccttttattcattgatatcttttcccaagtactggattttaaatctgtatgtatctgtttgatttttttttctaatatttcagttgagctgctgttttcttccatgcaatattgtatactcaattgtgtatagaagaagctggtgagagtgccctcctacataaataagcaattgcagtgttttgcatgcaaaatataaaaaatttaaattgtcctgattctattttgtaaatggagaaacaatcatatctttctaagcggtaatggaggaagactagtgctttgtgcattttgatatatttgagttcattttttccacaatgtcatacttttgacgcagttgggtttctcataagtatcctagttcatgtacatccgaatgctaaataatactgtgttttaagttttgtgttgcaagaacaaatggaataaacttgaattgtgctaca

SEQ ID NO: 453041 - DNA, 2850 bp, Homo sapiens
gcgccgcggacccagagagagggttccgcggaggagaagaggaagaggaagttgggggagggtcctagcggggagtgaaccggaagtgtaaaggttcctgcctctcctcggccaggcggaacctctctgctgggcccggtggccgcaaaagaactttctttctcccgcccgaacggtcgccgcggccaactgcctcgcccgcctggcagcctaaccctccttctcttcttctcctctccggcttcgcgcggccctgcctccctctcgcccggcggcatccgcttgctgctgccaccgcctcctcatcttctgcccggccaaccggcctgccccgctgcagtgatgtgcgacaaggagttcatgtgggccctgaaaaacggagacttggatgaggtgaaagactatgtggccaagggagaagatgtcaaccggacactagaaggtggaaggaaacctcttcattatgcagcagattgtgggcagcttgaaatcctggaatttctgctgctgaaaggagcagatattaatgctccagataaacatcatattactcctcttctgtctgctgtctatgagggtcatgtttcctgtgtgaaattgcttctgtcaaagggtgctgataagactgtgaaaggcccagatggactgaccgcctttgaagccactgacaaccaggcaatcaaagctcttctccagtgatggatggatggactgataactccggaagaatgactctcctgtggcctcacactgctgcctgtctgtctgtcactctctatctgccagcttcttcagctaaatactttaagaggggtgaggggagagagaaattcataacaaatccgactaccagaaaaaaaaaattgttttggaggaggggcaaaaggaaccatgatcaggcttttactgggattcctgatcaagtaagcctcttccctttctaataaaatatacaccttatacccaagggagagcaaagacaaaatacaccagtaacatttgaccttttcagctccctagctaatttattagattgtgttgaaggtctgattctacaaaggccaactctacatatttggtagccctaactgtctgagcagtagtggctgctgtgatgtaaacttagggtgctgagataagcaattagctctagccttctgccttaagaatgcactctactggggatttcctggcatagttaagagcgctgcctataaggttggtgaccaaatctttcctcggtgactttaagctttatgtgaaagcttagttaaggtgaggaggggcacactcctaaattgctggatgactgaactttggattttctctcccctttcacatggatttcatgtctctttagataaaactgactagttttatttataaaatcttaagttttggaagtctaaaggagaaaccattccagtatgcatatttttttctcctctagattcatacatttatatagcattgaaacactttcaaactcctgctggtagtaaaaggggatttaaaaatagaatcatagccataagcctgttagtatcatatgaagagagaacagttatcttagtacctatggattttctttatttgctgtttgaatggattgaccttggttatgtgttgagaattaaggaacattctttgaaatgcctctctcagacccatcttggaggctgattacttactgcaccaaagctatcactggggtgagatttactgtttggacaaatttagccccatcccttcaaaaatacacttgtaaccaggtttcccagagttgttgataggcttctgctgaacatatgccaacccacctgcataatatatttttgttgcttttataaatcatgcattacataaagtgtgacaacttcaaaatgtattctctgttcttggaatacagtgccctaaaatggtgttcttatgacctgcagaaaatatttacacatatttccaaatatttatttcatgagcagtacagctaattaaaatatataagcttaaattttatatcttacatttaaaatattaagattcctttgacttgccatccatataagcttgctaaaaatattaagaccaagtcatgcaataattgaatgtacctcaaatttttaggggagggtgggttagggactgatactcagattgtggataataattgaattggtttttaaaggcaacatagcattctacagcagggttaatctattatcaagaacagtcaccctggttaataacaagttttactgatcagttgctggttggttggttggttggcatgtgggtgtgtgggtgtataggtgtgtgtgggtgtgtgtgtgtatttttccccatgagtcctttttttaatcctgtggctttttcacttacaactagcctaaccctgtaattttcctacatccaagaaaacaatcacaaagtagtggtttaaatactttgttgtatttggctaattttgctgtcttaatgcagcctattaagagttgggttaaaaatcagtaatcagtactttattacatcactgaactaaaatatggagacatccctcctacataaataagcaattgcagtgttttgcatgcaaaatataaaaaatttaaattgtcctgattctattttgtaaatggagaaacaatcatatctttctaagcggtaatggaggaagactagtgctttgtgcattttgatatatttgagttcattttttccacaatgtcatacttttgacgcagttgggtttctcataagtatcctagttcatgtacatccgaatgctaaataatactgtgttttaagttttgtgttgcaagaacaaatggaataaacttgaattgtgctaca

SEQ ID NO: 453042 - DNA, 448 bp, Homo sapiens
agctcggccagtctgtctaccatccaagtactggattttaaatctgtatgtatctgtttgatttttttttctaatatttcagttgagctgctgttttcttccatgcaatattgtatactcaattgtgtatagaagaagctggtgagagtgccctcctacataaataagcaattgcagtgttttgcatgcaaaatataaaaaatttaaattgtcctgattctattttgtaaatggagaaacaatcatatctttctaagcggtaatggaggaagactagtgctttgtgcattttgatatatttgagttcattttttccacaatgtcatacttttgacgcagttgggtttctcataagtatcctagttcatgtacatccgaatgctaaataatactgtgttttaagttttgtgttgcaagaacaaatggaataaacttgaattgtgctaca

SEQ ID NO: 453043 - DNA, 967 bp, Homo sapiens
gcgccgcggacccagagagagggttccgcggaggagaagaggaagaggaagttgggggagggtcctagcggggagtgaaccggaagtgtaaaggttcctgcctctcctcggccaggcggaacctctctgctgggcccggtggccgcaaaagaactttctttctcccgcccgaacggtcgccgcggccaactgcctcgcccgcctggcagcctaaccctccttctcttcttctcctctccggcttcgcgcggccctgcctccctctcgcccggcggcatccgcttgctgctgccaccgcctcctcatcttctgcccggccaaccggcctgccccgctgcagtgatgtgcgacaaggagttcatgtgggccctgaaaaacggagacttggatgaggtgaaagactatgtggccaagggagaagatgtcaaccggacactagaaggtggaaggaaacctcttcattatgcagcagattgtgggcagcttgaaatcctggaatttctgctgctgaaaggagcagatattaatgctccagataaacatcatattactcctcttctgtctgctgtctatgagggtcatgtttcctgtgtgaaattgcttctgtcaaagggtgctgataagactgtgaaaggcccagatggactgaccgcctttgaagccactgacaaccaggcaatcaaagctcttctccagtgatggatggatggactgataactccggaagaatgactctcctgtggcctcacactgctgcctgtctgtctgtcactctctatctgccagcttcttcagctaaatactttaagaggggtgaggggagaatctacatcggtcaaaaaaaaaaaaaaagttggggccgcccgaaagtaaaacattgggggccagaaaagatgtcaacgccaagggggccaaacgggcgggaccgctgtttacgttcccccccgtcggacatcaagaaaaacag

SEQ ID NO: 453044 - DNA, 4350 bp, Homo sapiens
gcgccgcggacccagagagagggttccgcggaggagaagaggaagaggaagttgggggagggtcctagcggggagtgaaccggaagtgtaaaggttcctgcctctcctcggccaggcggaacctctctgctgggcccggtggccgcaaaagaactttctttctcccgcccgaacggtcgccgcggccaactgcctcgcccgcctggcagcctaaccctccttctcttcttctcctctccggcttcgcgcggccctgcctccctctcgcccggcggcatccgcttgctgctgccaccgcctcctcatcttctgcccggccaaccggcctgccccgctgcagtgatgtgcgacaaggagttcatgtgggccctgaaaaacggagacttggatgaggtgaaagactatgtggccaagggagaagatgtcaaccggacactagaaggtggaaggaaacctcttcattatgcagcagattgtgggcagcttgaaatcctggaatttctgctgctgaaaggagcagatattaatgctccagataaacatcatattactcctcttctgtctgctgtctatgagggtcatgtttcctgtgtgaaattgcttctgtcaaagggtgctgataagactgtgaaaggcccagatggactgaccgcctttgaagccactgacaaccaggcaatcaaagctcttctccagtgatggatggatggactgataactccggaagaatgactctcctgtggcctcacactgctgcctgtctgtctgtcactctctatctgccagcttcttcagctaaatactttaagaggggtgaggggagagagaaattcataacaaatccgactaccagaaaaaaaaaattgttttggaggaggggcaaaaggaaccatgatcaggcttttactgggattcctgatcaagtaagcctcttccctttctaataaaatatacaccttatacccaagggagagcaaagacaaaatacaccagtaacatttgaccttttcagctccctagctaatttattagattgtgttgaaggtctgattctacaaaggccaactctacatatttggtagccctaactgtctgagcagtagtggctgctgtgatgtaaacttagggtgctgagataagcaattagctctagccttctgccttaagaatgcactctactggggatttcctggcatagttaagagcgctgcctataaggttggtgaccaaatctttcctcggtgactttaagctttatgtgaaagcttagttaaggtgaggaggggcacactcctaaattgctggatgactgaactttggattttctctcccctttcacatggatttcatgtctctttagataaaactgactagttttatttataaaatcttaagttttggaagtctaaaggagaaaccattccagtatgcatatttttttctcctctagattcatacatttatatagcattgaaacactttcaaactcctgctggtagtaaaaggggatttaaaaatagaatcatagccataagcctgttagtatcatatgaagagagaacagttatcttagtacctatggattttctttatttgctgtttgaatggattgaccttggttatgtgttgagaattaaggaacattctttgaaatgcctctctcagacccatcttggaggctgattacttactgcaccaaagctatcactggggtgagatttactgtttggacaaatttagccccatcccttcaaaaatacacttgtaaccaggtttcccagagttgttgataggcttctgctgaacatatgccaacccacctgcataatatatttttgttgcttttataaatcatgcattacataaagtgtgacaacttcaaaatgtattctctgttcttggaatacagtgccctaaaatggtgttcttatgacctgcagaaaatatttacacatatttccaaatatttatttcatgagcagtacagctaattaaaatatataagcttaaattttatatcttacatttaaaatattaagattcctttgacttgccatccatataagcttgctaaaaatattaagaccaagtcatgcaataattgaatgtacctcaaatttttaggggagggtgggttagggactgatactcagattgtggataataattgaattggtttttaaaggcaacatagcattctacagcagggttaatctattatcaagaacagtcaccctggttaataacaagttttactgatcagttgctggttggttggttggttggcatgtgggtgtgtgggtgtataggtgtgtgtgggtgtgtgtgtgtatttttccccatgagtcctttttttaatcctgtggctttttcacttacaactagcctaaccctgtaattttcctacatccaagaaaacaatcacaaagtagtggtttaaatactttgttgtatttggctaattttgctgtcttaatgcagcctattaagagttgggttaaaaatcagtaatcagtactttattacatcactgaactaaaatatggagacatcctcattgaaaatggagggcactctatcagtctataactatcaacgtagtgcaacagggtgttttgatacctttgttttcacctcttgacataatgctatttaaaggcttgaatttttccctttatataattttcacctttactttcaaagtgttttgttgtagttggctattgcagagagtgcattgtcctatcattcctaaacctggtctgctttctacattcatggtatggaaaccatgtgattctttgtacagtttatcctgatgttgcttgtaatgcagtagaggctatttcgccttcgcttttctttctcgacctttttgtaaaccctataattatgaagcgattgcttgagaaaataacatataaacatagaatagaatagactgaccaagatggttcacagtttctttttttaactaggttatttataatgtatttctgaaccacttggcagacaaattcacaacacttaatgttcatattttgagtaaaggaagctaaaaccatgtttgctttctggtactacatgcattagcgaaaggttaagtaagttttgttctccactgaagtaatacttaacatctcagaaaaaattttgcatgttctgtagttttgtattaaatcagtcatttcatatgcactatatcaagtacaaacaggtagtttacctgtttatagtagtgtactaacaaagtctcccttgcagcttcagactgttatctataggcttatcgttcaaatacagcacttgaatatcccaagtagttcttctacgcatagctcacctttctaaacccagttaagcatggaagagaggtagtaggtaggtgcagtgtgtggaagctgcaaacaagtaggccttttattcattgatatcttttcccaagtactggattttaaatctgtatgtatctgtttgatttttttttctaatatttcagttgagctgctgttttcttccatgcaatattgtatactcaattgtgtatagaagaagctggtgagagtgccctcctacataaataagcaattgcagtgttttgcatgcaaaatataaaaaatttaaattgtcctgattctattttgtaaatggagaaacaatcatatctttctaagcggtaatggaggaagactagtgctttgtgcattttgatatatttgagttcattttttccacaatgtcatacttttgacgcagttgggtttctcataagtatcctagttcatgtacatccgaatgctaaataatactgtgttttaagttttgtgttgcaagaacaaatggaataaacttgaattgtgctacaaaaaaaaaaaaaaaaaaaaaaaaaaaaaaaaaaaaaaaaaaaaaaaaaaaaaaaaaaaaaaaaaaaaaaaaaaaaaaaaaaaaaaaaaaaaaaaaaaaaaacaaaaagagaggggggggcgcggggaagcgagcagcggcggggggaggaccgcggagtgtgagaaaaacagaagcgaggcaaagaaagtgagcggcaccacacaggcgaggaaaaaaagaaaagaagaaagagaggggggaaggaagagacaaaaaaagggacagggagagaaagacagagaagaagaagaaaaggaagaaaagaaggaacaacgagagggagggagggacgaaacaaacgcgaagaaacaaccggacgagcagtaatgagcggaaccgcgagtagcataaacgaaaaggaagaatagaaggagacaaagaaagagaagaaacaacacggagaaaaagtaagagaaaaaaatagaaaaaaacgaggagaaggag

SEQ ID NO: 453045 - DNA, 4133 bp, Homo sapiens
gcgccgcggacccagagagagggttccgcggaggagaagaggaagaggaagttgggggagggtcctagcggggagtgaaccggaagtgtaaaggttcctgcctctcctcggccaggcggaacctctctgctgggcccggtggccgcaaaagaactttctttctcccgcccgaacggtcgccgcggccaactgcctcgcccgcctggcagcctaaccctccttctcttcttctcctctccggcttcgcgcggccctgcctccctctcgcccggcggcatccgcttgctgctgccaccgcctcctcatcttctgcccggccaaccggcctgccccgctgcagtgatgtgcgacaaggagttcatgtgggccctgaaaaacggagacttggatgaggtgaaagactatgtggccaagggagaagatgtcaaccggacactagaaggtggaaggaaacctcttcattatgcagcagattgtgggcagcttgaaatcctggaatttctgctgctgaaaggagcagatattaatgctccagataaacatcatattactcctcttctgtctgctgtctatgagggtcatgtttcctgtgtgaaattgcttctgtcaaagggtgctgataagactgtgaaaggcccagatggactgaccgcctttgaagccactgacaaccaggcaatcaaagctcttctccagtgatggatggatggactgataactccggaagaatgactctcctgtggcctcacactgctgcctgtctgtctgtcactctctatctgccagcttcttcagctaaatactttaagaggggtgaggggagagagaaattcataacaaatccgactaccagaaaaaaaaaattgttttggaggaggggcaaaaggaaccatgatcaggcttttactgggattcctgatcaagtaagcctcttccctttctaataaaatatacaccttatacccaagggagagcaaagacaaaatacaccagtaacatttgaccttttcagctccctagctaatttattagattgtgttgaaggtctgattctacaaaggccaactctacatatttggtagccctaactgtctgagcagtagtggctgctgtgatgtaaacttagggtgctgagataagcaattagctctagccttctgccttaagaatgcactctactggggatttcctggcatagttaagagcgctgcctataaggttggtgaccaaatctttcctcggtgactttaagctttatgtgaaagcttagttaaggtgaggaggggcacactcctaaattgctggatgactgaactttggattttctctcccctttcacatggatttcatgtctctttagataaaactgactagttttatttataaaatcttaagttttggaagtctaaaggagaaaccattccagtatgcatatttttttctcctctagattcatacatttatatagcattgaaacactttcaaactcctgctggtagtaaaaggggatttaaaaatagaatcatagccataagcctgttagtatcatatgaagagagaacagttatcttagtacctatggattttctttatttgctgtttgaatggattgaccttggttatgtgttgagaattaaggaacattctttgaaatgcctctctcagacccatcttggaggctgattacttactgcaccaaagctatcactggggtgagatttactgtttggacaaatttagccccatcccttcaaaaatacacttgtaaccaggtttcccagagttgttgataggcttctgctgaacatatgccaacccacctgcataatatatttttgttgcttttataaatcatgcattacataaagtgtgacaacttcaaaatgtattctctgttcttggaatacagtgccctaaaatggtgttcttatgacctgcagaaaatatttacacatatttccaaatatttatttcatgagcagtacagctaattaaaatatataagcttaaattttatatcttacatttaaaatattaagattcctttgacttgccatccatataagcttgctaaaaatattaagaccaagtcatgcaataattgaatgtacctcaaatttttaggggagggtgggttagggactgatactcagattgtggataataattgaattggtttttaaaggcaacatagcattctacagcagggttaatctattatcaagaacagtcaccctggttaataacaagttttactgatcagttgctggttggttggttggttggcatgtgggtgtgtgggtgtataggtgtgtgtgggtgtgtgtgtgtatttttccccatgagtcctttttttaatcctgtggctttttcacttacaactagcctaaccctgtaattttcctacatccaagaaaacaatcacaaagtagtggtttaaatactttgttgtatttggctaattttgctgtcttaatgcagcctattaagagttgggttaaaaatcagtaatcagtactttattacatcactgaactaaaatatggagacatcctcattgaaaatggagggcactctatcagtctataactatcaacgtagtgcaacagggtgttttgatacctttgttttcacctcttgacataatgctatttaaaggcttgaatttttccctttatataattttcacctttactttcaaagtgttttgttgtagttggctattgcagagagtgcattgtcctatcattcctaaacctggtctgctttctacattcatggtatggaaaccatgtgattctttgtacagtttatcctgatgttgcttgtaatgcagtagaggctatttcgccttcgcttttctttctcgacctttttgtaaaccctataattatgaagcgattgcttgagaaaataacatataaacatagaatagaatagactgaccaagatggttcacagtttctttttttaactaggttatttataatgtatttctgaaccacttggcagacaaattcacaacacttaatgttcatattttgagtaaaggaagctaaaaccatgtttgctttctggtactacatgcattagcgaaaggttaagtaagttttgttctccactgaagtaatacttaacatctcagaaaaaattttgcatgttctgtagttttgtattaaatcagtcatttcatatgcactatatcaagtacaaacaggtagtttacctgtttatagtagtgtactaacaaagtctcccttgcagcttcagactgttatctataggcttatcgttcaaatacagcacttgaatatcccaagtagttcttctacgcatagctcacctttctaaacccagttaagcatggaagagaggtagtaggtaggtgcagtgtgtggaagctgcaaacaagtaggccttttattcattgatatcttttcccaagtactggattttaaatctgtatgtatctgtttgatttttttttctaatatttcagttgagctgctgttttcttccatgcaatattgtatactcaattgtgtatagaagaagctggtgagagtgccctcctacataaataagcaattgcagtgttttgcatgcaaaatataaaaaatttaaattgtcctgattctattttgtaaatggagaaacaatcatatctttctaagcggtaatggaggaagactagtgctttgtgcattttgatatatttgagttcattttttccacaatgtcatacttttgacgcagttgggtttctcataagtatcctagttcatgtacatccgaatgctaaataatactgtgttttaagttttgtgttgcaagaacaaatggaataaacttgaattgtgctacaaaaaaaaaaaatatgaacaacgaaagcgaaccaaaaccgaagcaacgcacaccacaaagggcggggccgcaaaaaacggcccgagggcgcgcaagtgcccgtacacgttctttgcaacaggcgcgatcaagggggccaaaatccaggcgcgcggcatacaacgcgcgagacaaccgccgccgatgtggagagcccaccggtgggcggacacgacaaccaagatagccagcaccactggatctgccaccctccgccacagccgtatgat

SEQ ID NO: 453046 - DNA, 3335 bp, Homo sapiens
gcgccgcggacccagagagagggttccgcggaggagaagaggaagaggaagttgggggagggtcctagcggggagtgaaccggaagtgtaaaggttcctgcctctcctcggccaggcggaacctctctgctgggcccggtggccgcaaaagaactttctttctcccgcccgaacggtcgccgcggccaactgcctcgcccgcctggcagcctaaccctccttctcttcttctcctctccggcttcgcgcggccctgcctccctctcgcccggcggcatccgcttgctgctgccaccgcctcctcatcttctgcccggccaaccggcctgccccgctgcagtgatgtgcgacaaggagttcatgtgggccctgaaaaacggagacttggatgaggtgaaagactatgtggccaagggagaagatgtcaaccggacactagaaggtggaaggaaacctcttcattatgcagcagattgtgggcagcttgaaatcctggaatttctgctgctgaaaggagcagatattaatgctccagataaacatcatattactcctcttctgtctgctgtctatgagggtcatgtttcctgtgtgaaattgcttctgtcaaagggtgctgataagactgtgaaaggcccagatggactgaccgcctttgaagccactgacaaccaggcaatcaaagctcttctccagtgatggatggatggactgataactccggaagaatgactctcctgtggcctcacactgctgcctgtctgtctgtcactctctatctgccagcttcttcagctaaatactttaagaggggtgaggggagagagaaattcataacaaatccgactaccagaaaaaaaaaattgttttggaggaggggcaaaaggaaccatgatcaggcttttactgggattcctgatcaagtaagcctcttccctttctaataaaatatacaccttatacccaagggagagcaaagacaaaatacaccagtaacatttgaccttttcagctccctagctaatttattagattgtgttgaaggtctgattctacaaaggccaactctacatatttggtagccctaactgtctgagcagtagtggctgctgtgatgtaaacttagggtgctgagataagcaattagctctagccttctgccttaagaatgcactctactggggatttcctggcatagttaagagcgctgcctataaggttggtgaccaaatctttcctcggtgactttaagctttatgtgaaagcttagttaaggtgaggaggggcacactcctaaattgctggatgactgaactttggattttctctcccctttcacatggatttcatgtctctttagataaaactgactagttttatttataaaatcttaagttttggaagtctaaaggagaaaccattccagtatgcatatttttttctcctctagattcatacatttatatagcattgaaacactttcaaactcctgctggtagtaaaaggggatttaaaaatagaatcatagccataagcctgttagtatcatatgaagagagaacagttatcttagtacctatggattttctttatttgctgtttgaatggattgaccttggttatgtgttgagaattaaggaacattctttgaaatgcctctctcagacccatcttggaggctgattacttactgcaccaaagctatcactggggtgagatttactgtttggacaaatttagccccatcccttcaaaaatacacttgtaaccaggtttcccagagttgttgataggcttctgctgaacatatgccaacccacctgcataatatatttttgttgcttttataaatcatgcattacataaagtgtgacaacttcaaaatgtattctctgttcttggaatacagtgccctaaaatggtgttcttatgacctgcagaaaatatttacacatatttccaaatatttatttcatgagcagtacagctaattaaaatatataagcttaaattttatatcttacatttaaaatattaagattcctttgacttgccatccatataagcttgctaaaaatattaagaccaagtcatgcaataattgaatgtacctcaaatttttaggggagggtgggttagggactgatactcagattgtggataataattgaattggtttttaaaggcaacatagcattctacagcagggttaatctattatcaagaacagtcaccctggttaataacaagttttactgatcagttgctggttggttggttggttggcatgtgggtgtgtgggtgtataggtgtgtgtgggtgtgtgtgtgtatttttccccatgagtcctttttttaatcctgtggctttttcacttacaactagcctaaccctgtaattttcctacatccaagaaaacaatcacaaagtagtggtttaaatactttgttgtatttggctaattttgctgtcttaatgcagcctattaagagttgggttaaaaatcagtaatcagtactttattacatcactgaactaaaatatggagacatcctcattgaaaatggagggcactctatcagtctataactatcaacgtagtgcaacagggtgttttgatacctttgttttcacctcttgacataatgctatttaaaggcttgaatttttccctttatataattttcacctttactttcaaagtgttttgttgtagttggctattgcagagagtgcattgtcctatcattcctaaacctggtctgctttctacattcatggtatggaaaccatgtgattctttgtacagtttatcctgatgttgcttgtaatgcagtagaggctatttcgccttcgcttttctttctcgacctttttgtaaaccctataattatgaagcgattgcttgagaaaataacatataaacatagaatagaatagactgaccaagatggttcacagtttctttttttaactaggttatttataatgtatttctgaaccacttggcagacaaattcacaacacttaatgttcatattttgagtaaaggaagctaaaaccatgtttgctttctggtactacatgcattagcgaaaggttaagtaagttttgttctccactgaagtaatacttaacatctcagaaaaaattttgcatgttctgtagttttgtattaaatcagtcatttcatatgcactatatcaagtacaaacaggtagtttacctgtttatagtagtgtactaacggatcctggggacttagaactgtattataggctattcgtcaatccagactggatttccaagaggtctctaccctagtccctttttcc

SEQ ID NO: 453047 - DNA, 2011 bp, Homo sapiens
gcgccgcggacccagagagagggttccgcggaggagaagaggaagaggaagttgggggagggtcctagcggggagtgaaccggaagtgtaaaggttcctgcctctcctcggccaggcggaacctctctgctgggcccggtggccgcaaaagaactttctttctcccgcccgaacggtcgccgcggccaactgcctcgcccgcctggcagcctaaccctccttctcttcttctcctctccggcttcgcgcggccctgcctccctctcgcccggcggcatccgcttgctgctgccaccgcctcctcatcttctgcccggccaaccggcctgccccgctgcagtgatgtgcgacaaggagttcatgtgggccctgaaaaacggagacttggatgaggtgaaagactatgtggccaagggagaagatgtcaaccggacactagaaggtggaaggaaacctcttcattatgcagcagattgtgggcagcttgaaatcctggaatttctgctgctgaaaggagcagatattaatgctccagataaacatcatattactcctcttctgtctgctgtctatgagggtcatgtttcctgtgtgaaattgcttctgtcaaagggtgctgataagactgtgaaaggcccagatggactgaccgcctttgaagccactgacaaccaggcaatcaaagctcttctccagtgatggatggatggactgataactccggaagaatgactctcctgtggcctcacactgctgcctgtctgtctgtcactctctatctgccagcttcttcagctaaatactttaagaggggtgaggggagagagaaattcataacaaatccgactaccagaaaaaaaaaattgttttggaggaggggcaaaaggaaccatgatcaggcttttactgggattcctgatcaagtaagcctcttccctttctaataaaatatacaccttatacccaagggagagcaaagacaaaatacaccagtaacatttgaccttttcagctccctagctaatttattagattgtgttgaaggtctgattctacaaaggccaactctacatatttggtagccctaactgtctgagcagtagtggctgctgtgatgtaaacttagggtgctgagataagcaattagctctagccttctgccttaagaatgcactctactggggatttcctggcatagttaagagcgctgcctataaggttggtgaccaaatctttcctcggtgactttaagctttatgtgaaagcttagttaaggtgaggaggggcacactcctaaattgctggatgactgaactttggattttctctcccctttcacatggatttcatgtctctttagataaaactgactagttttatttataaaatcttaagttttggaagtctaaaggagaaaccattccagtatgcatatttttttctcctctagattcatacatttatatagcattgaaacactttcaaactcctgctggtagtaaaaggggatttaaaaatagaatcatagccataagcctgttagtatcatatgaagagagaacagttatcttagtacctatggattttctttatttgctgtttgaatggattgaccttggttatgtgttgagaattaaggaacattctttgaaatgcctctctcagacccatcttggaggctgattacttactgcaccaaagctatcactggggtgagatttactgtttggacaaatttagccccatcccttcaaaaatacacttgtaaccaggtttcccagagttgttgataggcttctgctgaacatatgccaacccacctgcataatatatttttgttgcttttataaatcatgcattacataaagtgtgacaacttcaaaatgtattctctgttcttggaatacagtgccctaaaatggtgttcttatgacctcgcattatattacacatagctcccattctactccactgaccgctacacccgccgtccgtatcctccctctccccg

SEQ ID NO: 453048 - DNA, 4483 bp, Homo sapiens
aaccatgtagaatgaagcaggagacctggaaggaagcagaaaagccactgagagataaagaagaagcagcaagatgtggttagatttctggaagccaacaagatagagtttgaggaggtggatatcacaatgtcagaagaacagaggcaatggatgtacaaaaacgtccccccggaaaagaaacccactcagggcaaccccctgccacctcagatatttaatggcgaccgatactgtggagattatgacagtttttttgaatccaaggaaagcaacacagtcttttcatttttaggcctgaaaccacggttggcatcaaaggcagaaccttagagaagaagagtggaagatgacggagatgcattttgaagcacccctggtactcagcacacacatgcttacctaatgcatcactgtgacaaaagccacacgcattatcagtaactttgcttgccacggaaaaggtgtttttgaaagatgtggctataatgagaattgcatgattgctttaaaccaaatcaggtggtggattttttttttcttattctatttgcctgcagttgcctcactcacctggaaataccgtcacctgttacaggtgtactttcttaatgactgaaagataagtgggtagcaccgtcagagagaaaatgttggatctgccctaggttatagtagatgccggaattgcgtaaacccacttctctttaagctgcctggattgcacctttgaaatatgtctgccaagttgttagaatctttgaatcagaaggaaaaaaagcagcgctggttgacaaagggtgttgaagatttttgctgcagaatcagttacaaacatcacagttcccatgctttgtaataacacctggtgaaaaagttagatattctagacttgttttagtaatggaaactcttacctccacatattatcctacagatgtttccagaaatccctgttgtaacatcaagtgatcagaactaagttactgggatgacaataattgctatttgaaatatatgcttctttatttcttgcaaggggcaagtttcacccaaatgcctgagactgcttgaaagatatattttaagtggtgcactaattagtgaatatataggaaaattatctgacgagtatctgaaggcattttcagctctagcaatttatttataatatataagttcatatattttttaatccagctcccctaacagacagctgctgcttctattttgtgaagggactatattttttgagaaaggaaaatctcagttagatatattttgtgaacccttgattagacatattaaaatataccaatgttgtagtaaaatttaatttttccttttgttacttttcatttgcctctaattttgcttgctcatatttctggccaatgtacagcctcatatttttcagagtaatacagatacttgttctcattccgtatatgagcacaagtaaggtttcagagcaacacacatgagaaagagagtaacccggaattgtacttgtcaagcaaaatctatactcctattggagtggatgctgatgaacatcgaacatatctacttcattagagcagaggctatttttctgcattcttgtccctataacagggatgcttaattttttttttaacttagagttttaaattgccaaacatgggaacagccttgaataggataaattttcagagggctgcctaaaatattttatttctagcatcctgattctggacttttcattataattctgagcaggaaatttataagaaattgaaagagcagaagaattacagccctgtcacatgtgcccagcactccgccccatgccttgctaaatgtagactaaagaacttgttgaatgctaaggctgaaatcccaacctgagatttgtagtccaggattacaaccagaaggaaagtatgacagatttctacttaactagaatggacacatgatccacaattttctcttcaagggaagctgttgtcaaattatggatattactggttagttgtcattaagtaagatccaggtcaaattccatttgacaaatcccagggactatccaggaatttttttttaactggatattgtgtttgagtatgtgagtcttctgataaaactcagaatttctttttaagcagttgtaaaaattgtcatgttgtaattcattactcagctaacatttagtctactcttgctagtgagtgccaagaaccaacttggtaaggttgaggctttgcaagttaactgctggggttataggatcaataccatacttgctagacaaagctacccagatttgtcttatattataatttttgagttaaccgtagtatacctattatgattatagtaaacagactagtgggtagtaatgctaaattaccatcacagttatgtgccatctccccaccccatttttttttttttttttttgatcagcaaagaaatacaggagaccagtctcgagtggtgctgtacttgttatgagtgaggcagcagcacagtgtgtggcatttacatggtacccaggctccacagagtaccaagatgttgccctctgggaccacacttagctcagagaatatggggtccttacttgtattcttttatcagctgattttgaaacatataataatgattttcttgttcccttctttaactagctgcctttagattttgataatcacagtcttaaaatactaggaaagaagtggatgggaattgtaggcatagatttcatatcaagggcatttcaagacagaatttttatttcctgtagtaggcttgctggagcaaaggaaatgtgctgctaaaaatcaacttatgccattttaaaattagataaaatatggagtgccatcctgctaggtgagtacagaccagaagaaaatttagttgggaaaatacttgtttttccaaattccggtgttttattacaatcaaagaagaggaaagcaaggtattttttcacctcagattctaatatattctagatttgtttctgttttatagatttaattcaatacctccacatagatgtttttatattacatgaatttaataataaactaaacttttttttgtctcccgttattgaaaagtaccaaagcttctttctgttgtgtttgattttactataggggttttgctttttctagagatacttttcatttaacagcttttgttaagtgtcaggctgcactttgctccatataattattgttttcagatttcaacttgtatgtgtttgtctcttaaagcattggtgaaatcacatattttatattcagcataaaggagaataaattccagaaaacacatattctgaaaatggagtgtttgttccctgccatttttcacacctctcttaattttagttctgtttagttgagaggctgtgattttactcttgcctgtgaacctcatgcatgaaagcagcacattaaattgtaaaaatacaaacagatcgtgtgatcattcaaggagccagacatgaggtcctgcacgagggtgttgggaggacaccacagattcatctcagacagtgatcaggactgaggatggagttaaatcactcagcccctgggtggggtggggtggttcaaatggatgactgatctcctgagtacactgaagccacaggctggtggccatgttctctgaattgggtgcagaagacaagggcagagtggctgcggcccctattacctttgtagcagccacatcagaaagcagaagaaaacagtatttctgaaggcattgtttgaggttgatctcagcactgaacgatttcaagccctacgcaccagaacagaaggagggtggaggaagtgatcagagggaacgagctgtaggtttgcagaaatgtgtgaaaccaaaatgatcactgcctacttgtgattcaaatcttcagagttttcctagttcttctagaaatacatgtcaggtttgtttgttcatcctttctgtcagcatggatcaagcccctaaaatgtggtaagtgttgtcagagcagggcaatatctctactctcaagtatgaggggaatagaaacaaagcagcagttttagccagggttcaatgatagagtggaggtaaattaagagcctccaggctgtgattcaccatttgagacattatacataatttgtttttgttataagccatttgaatttttaaaaaatttcatacatgcaatggaatatagatatgtatatacacatataatatatatgctaaagtataaagagtaataataatgacaataaacaaacccctgtgtgcctaccacccaccttattgcctttcctttgaggtaccgtgtgcggtttcctgaacctatctctatccctgtctgatagagggaacccctgtactgaactttgtgttgaccatagccttcttgtctttcatcactttatctccatgtatgtatccttaaagaataataaatggaattaaactgaatgta

SEQ ID NO: 453049 - DNA, 4197 bp, Homo sapiens
  misc_feature (24)..(24): n is a, c, g, or t
ttctagaggacccctgcaaacggntggcatcaaatgcagaaccttagagaagaagagtggaagatgacggagatgcattttgaagcacccctggtactcagcacacacatgcttacctaatgcatcactgtgacaaaagccacacgcattatcagtaactttgcttgccacggaaaaggtgtttttgaaagatgtggctataatgagaattgcatgattgctttaaaccaaatcaggtggtggattttttttttcttattctatttgcctgcagttgcctcactcacctggaaataccgtcacctgttacaggtgtactttcttaatgactgaaagataagtgggtagcaccgtcagagagaaaatgttggatctgccctaggttatagtagatgccggaattgcgtaaacccacttctctttaagctgcctggattgcacctttgaaatatgtctgccaagttgttagaatctttgaatcagaaggaaaaaaagcagcgctggttgacaaagggtgttgaagatttttgctgcagaatcagttacaaacatcacagttcccatgctttgtaataacacctggtgaaaaagttagatattctagacttgttttagtaatggaaactcttacctccacatattatcctacagatgtttccagaaatccctgttgtaacatcaagtgatcagaactaagttactgggatgacaataattgctatttgaaatatatgcttctttatttcttgcaaggggcaagtttcacccaaatgcctgagactgcttgaaagatatattttaagtggtgcactaattagtgaatatataggaaaattatctgacgagtatctgaaggcattttcagctctagcaatttatttataatatataagttcatatattttttaatccagctcccctaacagacagctgctgcttctattttgtgaagggactatattttttgagaaaggaaaatctcagttagatatattttgtgaacccttgattagacatattaaaatataccaatgttgtagtaaaatttaatttttccttttgttacttttcatttgcctctaattttgcttgctcatatttctggccaatgtacagcctcatatttttcagagtaatacagatacttgttctcattccgtatatgagcacaagtaaggtttcagagcaacacacatgagaaagagagtaacccggaattgtacttgtcaagcaaaatctatactcctattggagtggatgctgatgaacatcgaacatatctacttcattagagcagaggctatttttctgcattcttgtccctataacagggatgcttaattttttttttaacttagagttttaaattgccaaacatgggaacagccttgaataggataaattttcagagggctgcctaaaatattttatttctagcatcctgattctggacttttcattataattctgagcaggaaatttataagaaattgaaagagcagaagaattacagccctgtcacatgtgcccagcactccgccccatgccttgctaaatgtagactaaagaacttgttgaatgctaaggctgaaatcccaacctgagatttgtagtccaggattacaaccagaaggaaagtatgacagatttctacttaactagaatggacacatgatccacaattttctcttcaagggaagctgttgtcaaattatggatattactggttagttgtcattaagtaagatccaggtcaaattccatttgacaaatcccagggactatccaggaatttttttttaactggatattgtgtttgagtatgtgagtcttctgataaaactcagaatttctttttaagcagttgtaaaaattgtcatgttgtaattcattactcagctaacatttagtctactcttgctagtgagtgccaagaaccaacttggtaaggttgaggctttgcaagttaactgctggggttataggatcaataccatacttgctagacaaagctacccagatttgtcttatattataatttttgagttaaccgtagtatacctattatgattatagtaaacagactagtgggtagtaatgctaaattaccatcacagttatgtgccatctccccaccccatttttttttttttttttttgatcagcaaagaaatacaggagaccagtctcgagtggtgctgtacttgttatgagtgaggcagcagcacagtgtgtggcatttacatggtacccaggctccacagagtaccaagatgttgccctctgggaccacacttagctcagagaatatggggtccttacttgtattcttttatcagctgattttgaaacatataataatgattttcttgttcccttctttaactagctgcctttagattttgataatcacagtcttaaaatactaggaaagaagtggatgggaattgtaggcatagatttcatatcaagggcatttcaagacagaatttttatttcctgtagtaggcttgctggagcaaaggaaatgtgctgctaaaaatcaacttatgccattttaaaattagataaaatatggagtgccatcctgctaggtgagtacagaccagaagaaaatttagttgggaaaatacttgtttttccaaattccggtgttttattacaatcaaagaagaggaaagcaaggtattttttcacctcagattctaatatattctagatttgtttctgttttatagatttaattcaatacctccacatagatgtttttatattacatgaatttaataataaactaaacttttttttgtctcccgttattgaaaagtaccaaagcttctttctgttgtgtttgattttactataggggttttgctttttctagagatacttttcatttaacagcttttgttaagtgtcaggctgcactttgctccatataattattgttttcagatttcaacttgtatgtgtttgtctcttaaagcattggtgaaatcacatattttatattcagcataaaggagaataaattccagaaaacacatattctgaaaatggagtgtttgttccctgccatttttcacacctctcttaattttagttctgtttagttgagaggctgtgattttactcttgcctgtgaacctcatgcatgaaagcagcacattaaattgtaaaaatacaaacagatcgtgtgatcattcaaggagccagacatgaggtcctgcacgagggtgttgggaggacaccacagattcatctcagacagtgatcaggactgaggatggagttaaatcactcagcccctgggtggggtggggtggttcaaatggatgactgatctcctgagtacactgaagccacaggctggtggccatgttctctgaattgggtgcagaagacaagggcagagtggctgcggcccctattacctttgtagcagccacatcagaaagcagaagaaaacagtatttctgaaggcattgtttgaggttgatctcagcactgaacgatttcaagccctacgcaccagaacagaaggagggtggaggaagtgatcagagggaacgagctgtaggtttgcagaaatgtgtgaaaccaaaatgatcactgcctacttgtgattcaaatcttcagagttttcctagttcttctagaaatacatgtcaggtttgtttgttcatcctttctgtcagcatggatcaagcccctaaaatgtggtaagtgttgtcagagcagggcaatatctctactctcaagtatgaggggaatagaaacaaagcagcagttttagccagggttcaatgatagagtggaggtaaattaagagcctccaggctgtgattcaccatttgagacattatacataatttgtttttgttataagccatttgaatttttaaaaaatttcatacatgcaatggaatatagatatgtatatacacatataatatatatgctaaagtataaagagtaataataatgacaataaacaaacccctgtgtgcctaccacccaccttattgcctttcctttgaggtaccgtgtgcggtttcctgaacctatctctatccctgtctgatagagggaacccctgtactgaactttgtgttgaccatagccttcttgtctttcatcactttatctccatgtatgtatccttaaagaataataaatggaattaaactgaatgta

SEQ ID NO: 453050 - DNA, 5366 bp, Homo sapiens
ccgggcggcgctgggcttttatctgcggacccgccgggagggagccagatcccagcgatcttccccgacggcagcgctttacccagaggctgccggcggctcgtagctgggttcagctctgcgtccacgccagcccggagcccggggggcaaggggtctgtcccgggcgcagcgagaggatggtcatccgcgtgttcatcgcctcttcctcgggcttcgtggcgataaagaagaagcagcaagatgtggttagatttctggaagccaacaagatagagtttgaggaggtggatatcacaatgtcagaagaacagaggcaatggatgtacaaaaacgtccccccggaaaagaaacccactcagggcaaccccctgccacctcagatatttaatggcgaccgatactgtggagattatgacagtttttttgaatccaaggaaagcaacacagtcttttcatttttaggcctgaaaccacggttggcatcaaaggcagaaccttagagaagaagagtggaagatgacggagatgcattttgaagcacccctggtactcagcacacacatgcttacctaatgcatcactgtgacaaaagccacacgcattatcagtaactttgcttgccacggaaaaggtgtttttgaaagatgtggctataatgagaattgcatgattgctttaaaccaaatcaggtggtggattttttttttcttattctatttgcctgcagttgcctcactcacctggaaataccgtcacctgttacaggtgtactttcttaatgactgaaagataagtgggtagcaccgtcagagagaaaatgttggatctgccctaggttatagtagatgccggaattgcgtaaacccacttctctttaagctgcctggattgcacctttgaaatatgtctgccaagttgttagaatctttgaatcagaaggaaaaaaagcagcgctggttgacaaagggtgttgaagatttttgctgcagaatcagttacaaacatcacagttcccatgctttgtaataacacctggtgaaaaagttagatattctagacttgttttagtaatggaaactcttacctccacatattatcctacagatgtttccagaaatccctgttgtaacatcaagtgatcagaactaagttactgggatgacaataattgctatttgaaatatatgcttctttatttcttgcaaggggcaagtttcacccaaatgcctgagactgcttgaaagatatattttaagtggtgcactaattagtgaatatataggaaaattatctgacgagtatctgaaggcattttcagctctagcaatttatttataatatataagttcatatattttttaatccagctcccctaacagacagctgctgcttctattttgtgaagggactatattttttgagaaaggaaaatctcagttagatatattttgtgaacccttgattagacatattaaaatataccaatgttgtagtaaaatttaatttttccttttgttacttttcatttgcctctaattttgcttgctcatatttctggccaatgtacagcctcatatttttcagagtaatacagatacttgttctcattccgtatatgagcacaagtaaggtttcagagcaacacacatgagaaagagagtaacccggaattgtacttgtcaagcaaaatctatactcctattggagtggatgctgatgaacatcgaacatatctacttcattagagcagaggctatttttctgcattcttgtccctataacagggatgcttaattttttttttaacttagagttttaaattgccaaacatgggaacagccttgaataggataaattttcagagggctgcctaaaatattttatttctagcatcctgattctggacttttcattataattctgagcaggaaatttataagaaattgaaagagcagaagaattacagccctgtcacatgtgcccagcactccgccccatgccttgctaaatgtagactaaagaacttgttgaatgctaaggctgaaatcccaacctgagatttgtagtccaggattacaaccagaaggaaagtatgacagatttctacttaactagaatggacacatgatccacaattttctcttcaagggaagctgttgtcaaattatggatattactggttagttgtcattaagtaagatccaggtcaaattccatttgacaaatcccagggactatccaggaatttttttttaactggatattgtgtttgagtatgtgagtcttctgataaaactcagaatttctttttaagcagttgtaaaaattgtcatgttgtaattcattactcagctaacatttagtctactcttgctagtgagtgccaagaaccaacttggtaaggttgaggctttgcaagttaactgctggggttataggatcaataccatacttgctagacaaagctacccagatttgtcttatattataatttttgagttaaccgtagtatacctattatgattatagtaaacagactagtgggtagtaatgctaaattaccatcacagttatgtgccatctccccaccccatttttttttttttttttttgatcagcaaagaaatacaggagaccagtctcgagtggtgctgtacttgttatgagtgaggcagcagcacagtgtgtggcatttacatggtacccaggctccacagagtaccaagatgttgccctctgggaccacacttagctcagagaatatggggtccttacttgtattcttttatcagctgattttgaaacatataataatgattttcttgttcccttctttaactagctgcctttagattttgataatcacagtcttaaaatactaggaaagaagtggatgggaattgtaggcatagatttcatatcaagggcatttcaagacagaatttttatttcctgtagtaggcttgctggagcaaaggaaatgtgctgctaaaaatcaacttatgccattttaaaattagataaaatatggagtgccatcctgctaggtgagtacagaccagaagaaaatttagttgggaaaatacttgtttttccaaattccggtgttttattacaatcaaagaagaggaaagcaaggtattttttcacctcagattctaatatattctagatttgtttctgttttatagatttaattcaatacctccacatagatgtttttatattacatgaatttaataataaactaaacttttttttgtctcccgttattgaaaagtaccaaagcttctttctgttgtgtttgattttactataggggttttgctttttctagagatacttttcatttaacagcttttgttaagtgtcaggctgcactttgctccatataattattgttttcagatttcaacttgtatgtgtttgtctcttaaagcattggtgaaatcacatattttatattcagcataaaggagaataaattccagaaaacacatattctgaaaatggagtgtttgttccctgccatttttcacacctctcttaattttagttctgtttagttgagaggctgtgattttactcttgcctgtgaacctcatgcatgaaagcagcacattaaattgtaaaaatacaaacagatcgtgtgatcattcaaggagccagacatgaggtcctgcacgagggtgttgggaggacaccacagattcatctcagacagtgatcaggactgaggatggagttaaatcactcagcccctgggtggggtggggtggttcaaatggatgactgatctcctgagtacactgaagccacaggctggtggccatgttctctgaattgggtgcagaagacaagggcagagtggctgcggcccctattacctttgtagcagccacatcagaaagcagaagaaaacagtatttctgaaggcattgtttgaggttgatctcagcactgaacgatttcaagccctacgcaccagaacagaaggagggtggaggaagtgatcagagggaacgagctgtaggtttgcagaaatgtgtgaaaccaaaatgatcactgcctacttgtgattcaaatcttcagagttttcctagttcttctagaaatacatgtcaggtttgtttgttcatcctttctgtcagcatggatcaagcccctaaaatgtggtaagtgttgtcagagcagggcaatatctctactctcaagtatgaggggaatagaaacaaagcagcagttttagccagggttcaatgatagagtggaggtaaattaagagcctccaggctgtgattcaccatttgagacattatacataatttgtttttgttataagccatttgaatttttaaaaaatttcatacatgcaatggaatatagatatgtatatacacatataatatatatgctaaagtataaagagtaataataatgacaataaacaaacccctgtgtgcctaccacccaccttattgcctttcctttgaggtaccgtgtgcggtttcctgaacctatctctatccctgtctgatagagggaacccctgtactgaactttgtgttgaccatagccttcttgtctttcatcactttatctccatgtatgtatccttaaagaataataaatggaattaaactgaatgtattcttctgtcacctcctttttatgttcattgccatcggagttttttcactgctaaatattattccattatgaatatatcacatgttctcttctccagctggtgcttattgaactgcatctttgtttgaaatagaaaaaggtaatgttgctctgaatattcttttatgtgacttctggtgtacatactgaagaatggatgtataccttgaatagaattgctggtttatacaataaaagcacatcatcagttttaatagataaggccaaattgctttccagagtactaatttatgctccccaccagtatactagaatttgcaggactctaaatctttgccaatgtttgagattgtcagagttgcatttttgccaagctggggagtataaaatgttacctcattgtggtttcattttgtaaatttttgattattagtaagttgaacatgttttattatgggaattcttgtttctttttcttggcaatccctcttcatgtcttttgcctttcttcctattgagttgtgttttaatgattaatttttaaagtttctttatatttaatatttaattggtcgacatttatttaatcattaaagtgaagagaaaccagatttagagtagaaaacttttctgaggccatttccagaaatatgctaagcatgtgaatctttattctatttggagaaaataaagttaaatacatataaatattt

SEQ ID NO: 453051 - DNA, 3643 bp, Homo sapiens
ccgggcggcgctgggcttttatctgcggacccgccgggagggagccagatcccagcgatcttccccgacggcagcgctttacccagaggctgccggcggctcgtagctgggttcagctctgcgtccacgccagcccggagcccggggggcaaggggtctgtcccgggcgcagcgagaggatggtcatccgcgtgttcatcgcctcttcctcgggcttcgtggcgataaagaagaagcagcaagatgtggttagatttctggaagccaacaagatagagtttgaggaggtggatatcacaatgtcagaagaacagaggcaatggatgtacaaaaacgtccccccggaaaagaaacccactcagggcaaccccctgccacctcagatatttaatggcgaccgatactgtggagattatgacagtttttttgaatccaaggaaagcaacacagtcttttcatttttaggcctgaaaccacggttggcatcaaaggcagaaccttagagaagaagagtggaagatgacggagatgcattttgaagcacccctggtactcagcacacacatgcttacctaatgcatcactgtgacaaaagccacacgcattatcagtaactttgcttgccacggaaaaggtgtttttgaaagatgtggctataatgagaattgcatgattgctttaaaccaaatcaggtggtggattttttttttcttattctatttgcctgcagttgcctcactcacctggaaataccgtcacctgttacaggtgtactttcttaatgactgaaagataagtgggtagcaccgtcagagagaaaatgttggatctgccctaggttatagtagatgccggaattgcgtaaacccacttctctttaagctgcctggattgcacctttgaaatatgtctgccaagttgttagaatctttgaatcagaaggaaaaaaagcagcgctggttgacaaagggtgttgaagatttttgctgcagaatcagttacaaacatcacagttcccatgctttgtaataacacctggtgaaaaagttagatattctagacttgttttagtaatggaaactcttacctccacatattatcctacagatgtttccagaaatccctgttgtaacatcaagtgatcagaactaagttactgggatgacaataattgctatttgaaatatatgcttctttatttcttgcaaggggcaagtttcacccaaatgcctgagactgcttgaaagatatattttaagtggtgcactaattagtgaatatataggaaaattatctgacgagtatctgaaggcattttcagctctagcaatttatttataatatataagttcatatattttttaatccagctcccctaacagacagctgctgcttctattttgtgaagggactatattttttgagaaaggaaaatctcagttagatatattttgtgaacccttgattagacatattaaaatataccaatgttgtagtaaaatttaatttttccttttgttacttttcatttgcctctaattttgcttgctcatatttctggccaatgtacagcctcatatttttcagagtaatacagatacttgttctcattccgtatatgagcacaagtaaggtttcagagcaacacacatgagaaagagagtaacccggaattgtacttgtcaagcaaaatctatactcctattggagtggatgctgatgaacatcgaacatatctacttcattagagcagaggctatttttctgcattcttgtccctataacagggatgcttaattttttttttaacttagagttttaaattgccaaacatgggaacagccttgaataggataaattttcagagggctgcctaaaatattttatttctagcatcctgattctggacttttcattataattctgagcaggaaatttataagaaattgaaagagcagaagaattacagccctgtcacatgtgcccagcactccgccccatgccttgctaaatgtagactaaagaacttgttgaatgctaaggctgaaatcccaacctgagatttgtagtccaggattacaaccagaaggaaagtatgacagatttctacttaactagaatggacacatgatccacaattttctcttcaagggaagctgttgtcaaattatggatattactggttagttgtcattaagtaagatccaggtcaaattccatttgacaaatcccagggactatccaggaatttttttttaactggatattgtgtttgagtatgtgagtcttctgataaaactcagaatttctttttaagcagttgtaaaaattgtcatgttgtaattcattactcagctaacatttagtctactcttgctagtgagtgccaagaaccaacttggtaaggttgaggctttgcaagttaactgctggggttataggatcaataccatacttgctagacaaagctacccagatttgtcttatattataatttttgagttaaccgtagtatacctattatgattatagtaaacagactagtgggtagtaatgctaaattaccatcacagttatgtgccatctccccaccccatttttttttttttttttttgatcagcaaagaaatacaggagaccagtctcgagtggtgctgtacttgttatgagtgaggcagcagcacagtgtgtggcatttacatggtacccaggctccacagagtaccaagatgttgccctctgggaccacacttagctcagagaatatggggtccttacttgtattcttttatcagctgattttgaaacatataataatgattttcttgttcccttctttaactagctgcctttagattttgataatcacagtcttaaaatactaggaaagaagtggatgggaattgtaggcatagatttcatatcaagggcatttcaagacagaatttttatttcctgtagtaggcttgctggagcaaaggaaatgtgctgctaaaaatcaacttatgccattttaaaattagataaaatatggagtgccatcctgctaggtgagtacagaccagaagaaaatttagttgggaaaatacttgtttttccaaattccggtgttttattacaatcaaagaagaggaaagcaaggtattttttcacctcagattctaatatattctagatttgtttctgttttatagatttaattcaatacctccacatagatgtttttatattacatgaatttaataataaactaaacttttttttgtctcccgttattgaaaagtaccaaagcttctttctgttgtgtttgattttactataggggttttgctttttctagagatacttttcatttaacagcttttgttaagtgtcaggctgcactttgctccatataattattgttttcagatttcaacttgtatgtgtttgtctcttaaagcattggtgaaatcacatattttatattcagcataaaggagaataaattccagaaaacgcaaaaaaaaaagaaaaaaaaaaaaaaaaaaatgtttgtggggggggggcctcgaaaaaattttttaaaacaacttggttgtgggggggggcccagtgggttattggaaacgtgggcaaagggggtccaggggaaaccggggag

SEQ ID NO: 453052 - DNA, 571 bp, Homo sapiens
ccgggcggcgctgggcttttatctgcggacccgccgggagggagccagatcccagcgatcttccccgacggcagcgctttacccagaggctgccggcggctcgtagctgggttcagctctgcgtccacgccagcccggagcccggggggcaaggggtctgtcccgggcgcagcgagaggatggtcatccgcgtgttcatcgcctcttcctcgggcttcgtggcgataaagaagaagcagcaagatgtggttagatttctggaagccaacaagatagagtttgaggaggtggatatcacaatgtcagaagaacagaggcaatggatgtacaaaaacgtccccccggaaaagaaacccactcagggcaaccccctgccacctcagatatttaatggcgaccgatactgtggagattatgacagtttttttgaatccaaggaaagcaacacagtcttttcatttttaggcctgaaaccacggttggcatcaaaggtaggtaaatcttttcttattcttgttttagaattcatctcttttgaatttttcttagagatgtagagtgacggtgttag

SEQ ID NO: 453053 - DNA, 4653 bp, Homo sapiens
ccgggcggcgctgggcttttatctgcggacccgccgggagggagccagatcccagcgatcttccccgacggcagcgctttacccagaggctgccggcggctcgtagctgggttcagctctgcgtccacgccagcccggagcccggggggcaaggggtctgtcccgggcgcagcgagaggatggtcatccgcgtgttcatcgcctcttcctcgggcttcgtggcgataaagaagaagcagcaagatgtggttagatttctggaagccaacaagatagagtttgaggaggtggatatcacaatgtcagaagaacagaggcaatggatgtacaaaaacgtccccccggaaaagaaacccactcagggcaaccccctgccacctcagatatttaatggcgaccgatactgtggagattatgacagtttttttgaatccaaggaaagcaacacagtcttttcatttttaggcctgaaaccacggttggcatcaaaggcagaaccttagagaagaagagtggaagatgacggagatgcattttgaagcacccctggtactcagcacacacatgcttacctaatgcatcactgtgacaaaagccacacgcattatcagtaactttgcttgccacggaaaaggtgtttttgaaagatgtggctataatgagaattgcatgattgctttaaaccaaatcaggtggtggattttttttttcttattctatttgcctgcagttgcctcactcacctggaaataccgtcacctgttacaggtgtactttcttaatgactgaaagataagtgggtagcaccgtcagagagaaaatgttggatctgccctaggttatagtagatgccggaattgcgtaaacccacttctctttaagctgcctggattgcacctttgaaatatgtctgccaagttgttagaatctttgaatcagaaggaaaaaaagcagcgctggttgacaaagggtgttgaagatttttgctgcagaatcagttacaaacatcacagttcccatgctttgtaataacacctggtgaaaaagttagatattctagacttgttttagtaatggaaactcttacctccacatattatcctacagatgtttccagaaatccctgttgtaacatcaagtgatcagaactaagttactgggatgacaataattgctatttgaaatatatgcttctttatttcttgcaaggggcaagtttcacccaaatgcctgagactgcttgaaagatatattttaagtggtgcactaattagtgaatatataggaaaattatctgacgagtatctgaaggcattttcagctctagcaatttatttataatatataagttcatatattttttaatccagctcccctaacagacagctgctgcttctattttgtgaagggactatattttttgagaaaggaaaatctcagttagatatattttgtgaacccttgattagacatattaaaatataccaatgttgtagtaaaatttaatttttccttttgttacttttcatttgcctctaattttgcttgctcatatttctggccaatgtacagcctcatatttttcagagtaatacagatacttgttctcattccgtatatgagcacaagtaaggtttcagagcaacacacatgagaaagagagtaacccggaattgtacttgtcaagcaaaatctatactcctattggagtggatgctgatgaacatcgaacatatctacttcattagagcagaggctatttttctgcattcttgtccctataacagggatgcttaattttttttttaacttagagttttaaattgccaaacatgggaacagccttgaataggataaattttcagagggctgcctaaaatattttatttctagcatcctgattctggacttttcattataattctgagcaggaaatttataagaaattgaaagagcagaagaattacagccctgtcacatgtgcccagcactccgccccatgccttgctaaatgtagactaaagaacttgttgaatgctaaggctgaaatcccaacctgagatttgtagtccaggattacaaccagaaggaaagtatgacagatttctacttaactagaatggacacatgatccacaattttctcttcaagggaagctgttgtcaaattatggatattactggttagttgtcattaagtaagatccaggtcaaattccatttgacaaatcccagggactatccaggaatttttttttaactggatattgtgtttgagtatgtgagtcttctgataaaactcagaatttctttttaagcagttgtaaaaattgtcatgttgtaattcattactcagctaacatttagtctactcttgctagtgagtgccaagaaccaacttggtaaggttgaggctttgcaagttaactgctggggttataggatcaataccatacttgctagacaaagctacccagatttgtcttatattataatttttgagttaaccgtagtatacctattatgattatagtaaacagactagtgggtagtaatgctaaattaccatcacagttatgtgccatctccccaccccatttttttttttttttttttgatcagcaaagaaatacaggagaccagtctcgagtggtgctgtacttgttatgagtgaggcagcagcacagtgtgtggcatttacatggtacccaggctccacagagtaccaagatgttgccctctgggaccacacttagctcagagaatatggggtccttacttgtattcttttatcagctgattttgaaacatataataatgattttcttgttcccttctttaactagctgcctttagattttgataatcacagtcttaaaatactaggaaagaagtggatgggaattgtaggcatagatttcatatcaagggcatttcaagacagaatttttatttcctgtagtaggcttgctggagcaaaggaaatgtgctgctaaaaatcaacttatgccattttaaaattagataaaatatggagtgccatcctgctaggtgagtacagaccagaagaaaatttagttgggaaaatacttgtttttccaaattccggtgttttattacaatcaaagaagaggaaagcaaggtattttttcacctcagattctaatatattctagatttgtttctgttttatagatttaattcaatacctccacatagatgtttttatattacatgaatttaataataaactaaacttttttttgtctcccgttattgaaaagtaccaaagcttctttctgttgtgtttgattttactataggggttttgctttttctagagatacttttcatttaacagcttttgttaagtgtcaggctgcactttgctccatataattattgttttcagatttcaacttgtatgtgtttgtctcttaaagcattggtgaaatcacatattttatattcagcataaaggagaataaattccagaaaacacatattctgaaaatggagtgtttgttccctgccatttttcacacctctcttaattttagttctgtttagttgagaggctgtgattttactcttgcctgtgaacctcatgcatgaaagcagcacattaaattgtaaaaatacaaacagatcgtgtgatcattcaaggagccagacatgaggtcctgcacgagggtgttgggaggacaccacagattcatctcagacagtgatcaggactgaggatggagttaaatcactcagcccctgggtggggtggggtggttcaaatggatgactgatctcctgagtacactgaagccacaggctggtggccatgttctctgaattgggtgcagaagacaagggcagagtggctgcggcccctattacctttgtagcagccacatcagaaagcagaagaaaacagtatttctgaaggcattgtttgaggttgatctcagcactgaacgatttcaagccctacgcaccagaacagaaggagggtggaggaagtgatcagagggaacgagctgtaggtttgcagaaatgtgtgaaaccaaaatgatcactgcctacttgtgattcaaatcttcagagttttcctagttcttctagaaatacatgtcaggtttgtttgttcatcctttctgtcagcatggatcaagcccctaaaatgtggtaagtgttgtcagagcagggcaatatctctactctcaagtatgaggggaatagaaacaaagcagcagttttagccagggttcaatgatagagtggaggtaaattaagagcctccaggctgtgattcaccatttgagacattatacataatttgtttttgttataagccatttgaatttttaaaaaatttcatacatgcaatggaatatagatatgtatatacacatataatatatatgctaaagtataaagagtaataataatgacaataaacaaacccctgtgtgcctaccacccaccttattgcctttcctttgaggtaccgtgtgcggtttcctgaacctatctctatccctgtctgatagagggaacccctgtactgaactttgtgttgaccatagccttcttgtctttcatcactttatctccatgtatgtatccttaaagaataataaatggaattaaactgaatgta

SEQ ID NO: 453054 - DNA, 3881 bp, Homo sapiens
ccgggcggcgctgggcttttatctgcggacccgccgggagggagccagatcccagcgatcttccccgacggcagcgctttacccagaggctgccggcggctcgtagctgggttcagctctgcgtccacgccagcccggagcccggggggcaaggggtctgtcccgggcgcagcgagaggatggtcatccgcgtgttcatcgcctcttcctcgggcttcgtggcgataaagaagaagcagcaagatgtggttagatttctggaagccaacaagatagagtttgaggaggtggatatcacaatgtcagaagaacagaggcaatggatgtacaaaaacgtccccccggaaaagaaacccactcagggcaaccccctgccacctcagatatttaatggcgaccgatactgtggagattatgacagtttttttgaatccaaggaaagcaacacagtcttttcatttttaggcctgaaaccacggttggcatcaaaggcagaaccttagagaagaagagtggaagatgacggagatgcattttgaagcacccctggtactcagcacacacatgcttacctaatgcatcactgtgacaaaagccacacgcattatcagtaactttgcttgccacggaaaaggtgtttttgaaagatgtggctataatgagaattgcatgattgctttaaaccaaatcaggtggtggattttttttttcttattctatttgcctgcagttgcctcactcacctggaaataccgtcacctgttacaggtgtactttcttaatgactgaaagataagtgggtagcaccgtcagagagaaaatgttggatctgccctaggttatagtagatgccggaattgcgtaaacccacttctctttaagctgcctggattgcacctttgaaatatgtctgccaagttgttagaatctttgaatcagaaggaaaaaaagcagcgctggttgacaaagggtgttgaagatttttgctgcagaatcagttacaaacatcacagttcccatgctttgtaataacacctggtgaaaaagttagatattctagacttgttttagtaatggaaactcttacctccacatattatcctacagatgtttccagaaatccctgttgtaacatcaagtgatcagaactaagttactgggatgacaataattgctatttgaaatatatgcttctttatttcttgcaaggggcaagtttcacccaaatgcctgagactgcttgaaagatatattttaagtggtgcactaattagtgaatatataggaaaattatctgacgagtatctgaaggcattttcagctctagcaatttatttataatatataagttcatatattttttaatccagctcccctaacagacagctgctgcttctattttgtgaagggactatattttttgagaaaggaaaatctcagttagatatattttgtgaacccttgattagacatattaaaatataccaatgttgtagtaaaatttaatttttccttttgttacttttcatttgcctctaattttgcttgctcatatttctggccaatgtacagcctcatatttttcagagtaatacagatacttgttctcattccgtatatgagcacaagtaaggtttcagagcaacacacatgagaaagagagtaacccggaattgtacttgtcaagcaaaatctatactcctattggagtggatgctgatgaacatcgaacatatctacttcattagagcagaggctatttttctgcattcttgtccctataacagggatgcttaattttttttttaacttagagttttaaattgccaaacatgggaacagccttgaataggataaattttcagagggctgcctaaaatattttatttctagcatcctgattctggacttttcattataattctgagcaggaaatttataagaaattgaaagagcagaagaattacagccctgtcacatgtgcccagcactccgccccatgccttgctaaatgtagactaaagaacttgttgaatgctaaggctgaaatcccaacctgagatttgtagtccaggattacaaccagaaggaaagtatgacagatttctacttaactagaatggacacatgatccacaattttctcttcaagggaagctgttgtcaaattatggatattactggttagttgtcattaagtaagatccaggtcaaattccatttgacaaatcccagggactatccaggaatttttttttaactggatattgtgtttgagtatgtgagtcttctgataaaactcagaatttctttttaagcagttgtaaaaattgtcatgttgtaattcattactcagctaacatttagtctactcttgctagtgagtgccaagaaccaacttggtaaggttgaggctttgcaagttaactgctggggttataggatcaataccatacttgctagacaaagctacccagatttgtcttatattataatttttgagttaaccgtagtatacctattatgattatagtaaacagactagtgggtagtaatgctaaattaccatcacagttatgtgccatctccccaccccatttttttttttttttttttgatcagcaaagaaatacaggagaccagtctcgagtggtgctgtacttgttatgagtgaggcagcagcacagtgtgtggcatttacatggtacccaggctccacagagtaccaagatgttgccctctgggaccacacttagctcagagaatatggggtccttacttgtattcttttatcagctgattttgaaacatataataatgattttcttgttcccttctttaactagctgcctttagattttgataatcacagtcttaaaatactaggaaagaagtggatgggaattgtaggcatagatttcatatcaagggcatttcaagacagaatttttatttcctgtagtaggcttgctggagcaaaggaaatgtgctgctaaaaatcaacttatgccattttaaaattagataaaatatggagtgccatcctgctaggtgagtacagaccagaagaaaatttagttgggaaaatacttgtttttccaaattccggtgttttattacaatcaaagaagaggaaagcaaggtattttttcacctcagattctaatatattctagatttgtttctgttttatagatttaattcaatacctccacatagatgtttttatattacatgaatttaataataaactaaacttttttttgtctcccgttattgaaaagtaccaaagcttctttctgttgtgtttgattttactataggggttttgctttttctagagatacttttcatttaacagcttttgttaagtgtcaggctgcactttgctccatataattattgttttcagatttcaacttgtatgtgtttgtctcttaaagcattggtgaaatcacatattttatattcacagttttagccagggttcaatgatagagtggaggtaaattaagagcctccaggctgtgattcaccatttgagacattatacataatttgtttttgttataagccatttgaatttttaaaaaatttcatacatgcaatggaatatagatatgtatatacacatataatatatatgctaaagtataaagagtaataataatgacaataaacaaacccctgtgtgcctaccacccaccttattgcctttcctttgaggtaccgtgtgcggtttcctgaacctatctctatccctgtctgatagagggaacccctgtactgaactttgtgttgaccatagccttcttgtctttcatcactttatctccatgtatgtatccttaaagaataataaatggaattaaactgaatgta

SEQ ID NO: 453055 - DNA, 1497 bp, Homo sapiens
ccgggcggcgctgggcttttatctgcggacccgccgggagggagccagatcccagcgatcttccccgacggcagcgctttacccagaggctgccggcggctcgtagctgggttcagctctgcgtccacgccagcccggagcccggggggcaaggggtctgtcccgggcgcagcgagaggatggtcatccgcgtgttcatcgcctcttcctcgggcttcgtggcgataaagaagaagcagcaagatgtggttagatttctggaagccaacaagatagagtttgaggaggtggatatcacaatgtcagaagaacagaggcaatggatgtacaaaaacgtccccccggaaaagaaacccactcagggcaaccccctgccacctcagatatttaatggcgaccgatactgtggagattatgacagtttttttgaatccaaggaaagcaacacagtcttttcatttttaggcctgaaaccacggttggcatcaaaggcagaaccttagagaagaagagtggaagatgacggagatgcattttgaagcacccctggtactcagcacacacatgcttacctaatgcatcactgtgacaaaagccacacgcattatcagtaactttgcttgccacggaaaaggtgtttttgaaagatgtggctataatgagaattgcatgattgctttaaaccaaatcaggtggtggattttttttttcttattctatttgcctgcagttgcctcactcacctggaaataccgtcacctgttacaggtgtactttcttaatgactgaaagataagtgggtagcaccgtcagagagaaaatgttggatctgccctaggttatagtagatgccggaattgcgtaaacccacttctctttaagctgcctggattgcacctttgaaatatgtctgccaagttgttagaatctttgaatcagaaggaaaaaaagcagcgctggttgacaaagggtgttgaagatttttgctgcagaatcagttacaaacatcacagttcccatgctttgtaataacacctggtgaaaaagttagatattctagacttgttttagtaatggaaactcttacctccacatattatcctacagatgtttccagaaatccctgttgtaacatcaagtgatcagaactaagttactgggatgacaataattgctatttgaaatatatgcttctttatttcttgcaaggggcaagtttcacccaaatgcctgagactgcttgaaagatatattttaagtggtgcactaattagtgaatatataggaaaattatctgacgagtatctgaaggcattttcagctctagcaatttatttataatatataagttcatatattttttaatccagctcccctaacagacagctgctgcttctattttgtgaagggactatattttttgagaaaggaaaatctcagttagatatattttgtgaacccttgattagacatattaaaatataccaatgttgtagt

SEQ ID NO: 453056 - DNA, 5267 bp, Homo sapiens
gaattaccaaagggtcttgtggcatgttccccaatacatgcccttagaaggaagaactattattttttattttggccctttcaggagttgattataaattggtttgttttcaagtcagaattcaagtgggcagaacccgtattgtgaagacctaaactttcctaaatgttcatatgggtagcagattttgtggtgattagaaacatcaggtccttaaatacgatgaacatgggatacaaaggaattctttataagggcaagtatcctaagttagcacatttacttttctctcccctccgcccccaaaagaaaaatccttacaaataaactgcaggtaggcttctaagcctagtcctgcagtatgctgctaacatcttgatgccaatcttcacagcattctttgattgtcatcttattgctgatacattcatacatatatttagtgcttgacactgtagaattttgttacagaagatggttactagattttaagggagctgagggaataattgatgagccttgaattaaccatgcatttaattagattttttgttgttgttgttgttgttttgagatgatgtcttgctctgttgcccaggctggagtgcagtggctcaatctcggctcactgcaacctctgcctcgcaggtttgagcgattctcctgtctcagcctccccagtagctgggtttacaggcgcttgccaccacacctggctagatgttttatattaaagccagagaattgaaaaagaaatgcctcctgtgattgaaattattttatagctcttagcccgttctaccaaagatcacattagcagattacccctccctcctgtgatattatctttcttaaacctgaaccaaatatcaaaagatacaagtttcatgattaggatgaaatatatacatagggattttggtttattgaagttattgaaagacctagaaattttctttttgagagaaagggtaaagaggtgagggttcatgtcacttaacccctacccttttgggcaaattttgtctcaggtagtgtttcattccctaaattaatacctgtgcttccttgcctctcaccttcccagttacttctttggggtattactgtggcacattgtacacccagaaaaggcacatacagtgattattttgtgggaaatacttgattcttttgaaatatatttggagggggtagctagctagccactgtcaaaactaatgctgtatttacaggacaaaaacaagtagagttggacacctcagtaagagacagcattaactaaaagtactgactgccttttaaaggaatttttaaaactattctcttgcaataagagatccgcatttattaccactggatgtcttccttttttgtggccaccaatatagcagctctctttagagggattccctttctgctatgccttgagccaaactggctgcttttagaacaaaaaccataagtatggttttactcgaacttctctttgtttttattgagagaaatattgccttctttttggtactccagctgctaaagagtgctgagatatgttaaattattttttaaaagaaaatctccaaatacttatttaacttgtcttctagattcatgttgcttatattttaactattgagcaagtttattataaggaatgctgccatatagagaaagctgaagagaaaccatgggcagaaggcttttttctgtcttattacactggaccttcactctggtaagggcatcagttacttttctggaataaaaggcggagttagagcacttatcagatgctgtttcatggcttgttttagttaatttatcatgcagataactaacatttgggtatctttttgttttaggtcttattttctgactgttaggcctatcttacacataagttctactatcagtatacttggcagcatgacttttttttttttacagttaatttaatgaaaatcagcaccattgtaaatgatagtaattgtaacaacatagttactgggtgaaggagtaggggagacactcagtaaccatctatttacctagacacttatgcaggggtacatgctaggtggctttattcagattcgggtacattggaatcacatcatgactttgagtctgatggctgtgtagataaagatttaagcaagtgccttgtgtttgctggaaaatattaaaactcatttgggtgaaagcttcccagatgatgataattaatagcacttctgcctttttcctggagtaacttttagattgagtcacatatgatagtataaaagtccaaaattttctgggtttacctttgttttatttttcatatatatattcactgtctgcctggaaatagccttggtttaccttatttttttgtatatgtaaaactattcatatttgattttattccaatattatatatgatggaaaagccagaattgtctggcagaatttaattcttccttggatctctagttctgtttttaatatcaggttccttcatcaaattttactactgtagctctgtgatataatttcatttcttgtcaattatggtcacatatagacaagtacttggtcacaattagctcaaaagaatccccatttcttaaggtgctcagtcaatcacctttattttgagatggtagtttttcaagttagtattacttactagctttcttgatgaatataaaaatgttgtctccatcatacagagctgagcctcttgtggtatattaagataagtcccattcttaatcacagaagaacatggatattttagtttttggagtacccagaattgtaaagattttgtttcattttgttttaggatagcttctctgcctaatactataggatatgtcatgttcgttattgtagccacctccctcagatgtttttcactatttttaaattatataatgaccagtagattcacagtagcatgtacttgacaagtgccatggatatttaagaagaaggtaaataattttaatattttttgctgtaattttataggagcagtggactgtaagagaaatatctataaatcagagagtatttaggaaactttgtattttataggtggtcattaaagtgatcttcaggatataagatagtttacacaaactttattctcctgataggaaatttttattcattttcctaccactcagcacttttgttctgccttgtactgcttatgaggattaatgttttaaatttgctttatttgtgcttttcagagagttgtcataattgtggcagttgtgtttgtggcactgtaaatgctgaaattcatgggaaacttaccaaatgactgcttgagtgttatttcccattaaattgggtagctgtcacaataaccagaagaaatcttgtggcccttttgaagaaagccatgtatgttttgttacctaggttcatagtattttaatttaaaggcaaagagaagcattctacttatttgtcttataaaccattaatcgttttttgtgcagaagagagcttattttgttatactgctttgtataatggaaataagtcacattctgggggaaaaaaactggaattgtttgtattttgtttttttggggggggatctttatgtgaaaaatcagagctacttgttaccataagcccttactatcaacaagataattatttgtaatcacttttttatcccaggttggaattgctttccccttctaagttatcttcccttaataatatttatgataccaggacagtgagggtataagagcaaatgtagtgaggtattcaaaaatcctgcatatatggactcaaaagttctttagttatttgaattatatatagctatattattttattagcttgggttgtcagaagattgccaattttaagagtaaagaggagagagataagtaataaaaatagaggaggggaagaaaatggctcccttactggtcttagtaatcttctatatagttaatgagctaaaaaatgatacttaaagttccaggtttggtaccgctagcatagaaacattgcctttcctacacattcctcatcattgtttcctcagaaaattattttaagagtttgtgaaaccagattaaatatctatattcagtttggcctaatttttaaaaataaatatttatactccagcttttgtgtatttggtgtacatcaccacttatgcaaatcaaggatcagaaaactggaggttagccatctccattatttccttttgcacattgggtacagtgggtggcattagtatgcactagctgcaaagtcacagcaccttatggaaataagtatgtttattataataaaaaaaagttaagctgcatctctgtagattatttactttgcagactgtaaagctgccctatcttttccagcagaatttactcttccattcttaattcttttttgaaatatcttaaataatttaacattcctttataacttcttaacagtgtcaaaactggggtagaagggattttattttttcccaaaagggttccatctttgctatctgttgatcagccttagaaaatctaagtatgatcaataaattttaatggttgatggcatcctgtgtcagctggagtagttggttgtgaatattaaaacctagtactattttccctcagtaacatgtaattgctacattttttataagaaggtatggttagaaaaaaatgtgaaagatcacttaaaccaaagccagttacaaggagtaatctctcctgttggtttaccttcacctcagaactacaagaatattacaatacatagtgaatagttgtctgtaacatttctaccagttgtttcagtagcatattggtcttggcatttcttggcactgtggttctgctgtattatttgtgatgtcttattgtttgtgagcttttgttttttttttaaagaaaaaacaaaaactaagtgggactatgtatgtagatgtgtgtcagtaccaaaaagttattttctcaaatccctaaatttctgatttccattcaagtcttttaaactctttcctgctgaatagcaaagaacttttattttccactttcctatattcctaaaaagtgtgaacaatgcgtttcagttgactgtattgcatacttttttgctgaagactttttctgtaaacacaattgccttgttcagttttgttgtaaactgacttaccataagatgcactgttgataatgctttctgatgtgtgtttgataagagtgataaaataaaagcttaaaaataaa

SEQ ID NO: 453057 - DNA, 790 bp, Homo sapiens
gatcaggaagggagctcagctccacattagttgcaccatcaaagtgactcacttgccccaggagttcccagaaatcatattcagaaaggacaagcgatttgtggccccaccagacatggcaacaaggctgtgtactcagtcatggccatggtggagcacagtggcaactacacgtgcaaagtggagtccagccgcatatccaaggtcagcagcatcgtggtcaacataacagaactattttccaagcccgaactggaatcttccttcacacatctggaccaaggtgaaagactgaacctgtcctgctccatcccaggagcacctccagccaacttcaccatccagaaggaagatacgattgtgtcacagactcaagatttcttggcactgtggttctgctgtattatttgtgatgtcttattgtttgtgagcttttgttttttttttaaagaaaaaacaaaaactaagtgggactatgtatgtagatgtgtgtcagtaccaaaaagttattttctcaaatccctaaatttctgatttccattcaagtcttttaaactctttcctgctgaatagcaaagaacttttattttccactttcctatattcctaaaaagtgtgaacaatgcgtttcagttgactgtattgcatacttttttgctgaagactttttctgtaaacacaattgccttgttcagttttgttgtaaactgacttaccataagatgcactgttgataatgctttctgatgtgtgtttgataagagtgataaaataaaagcttaaaaataaa

SEQ ID NO: 453058 - DNA, 231 bp, Homo sapiens
atgcgtttcagttgactgtattgcattgttcacactttttaggaatataggaaagtgtgaacaatgcgtttcagttgactgtattgcatacttttttgctgaagactttttctgtaaacacaattgccttgttcagttttgttgtaaactgacttaccataagatgcactgttgataatgctttctgatgtgtgtttgataagagtgataaaataaaagcttaaaaataaa

SEQ ID NO: 453059 - DNA, 5213 bp, Homo sapiens
gaattaccaaagggtcttgtggcatgttccccaatacatgcccttagaaggaagaactattattttttattttggccctttcaggagttgattataaattggtttgttttcaagtcagaattcaagtgggcagaacccgtattgtgaagacctaaactttcctaaatgttcatatgggtagcagattttgtggtgattagaaacatcaggtccttaaatacgatgaacatgggatacaaaggaattctttataagggcaagtatcctaagttagcacatttacttttctctcccctccgcccccaaaagaaaaatccttacaaataaactgcaggtaggcttctaagcctagtcctgcagtatgctgctaacatcttgatgccaatcttcacagcattctttgattgtcatcttattgctgatacattcatacatatatttagtgcttgacactgtagaattttgttacagaagatggttactagattttaagggagctgagggaataattgatgagccttgaattaaccatgcatttaattagattttttgttgttgttgttgttgttttgagatgatgtcttgctctgttgcccaggctggagtgcagtggctcaatctcggctcactgcaacctctgcctcgcaggtttgagcgattctcctgtctcagcctccccagtagctgggtttacaggcgcttgccaccacacctggctagatgttttatattaaagccagagaattgaaaaagaaatgcctcctgtgattgaaattattttatagctcttagcccgttctaccaaagatcacattagcagattacccctccctcctgtgatattatctttcttaaacctgaaccaaatatcattgaagttattgaaagacctagaaattttctttttgagagaaagggtaaagaggtgagggttcatgtcacttaacccctacccttttgggcaaattttgtctcaggtagtgtttcattccctaaattaatacctgtgcttccttgcctctcaccttcccagttacttctttggggtattactgtggcacattgtacacccagaaaaggcacatacagtgattattttgtgggaaatacttgattcttttgaaatatatttggagggggtagctagctagccactgtcaaaactaatgctgtatttacaggacaaaaacaagtagagttggacacctcagtaagagacagcattaactaaaagtactgactgccttttaaaggaatttttaaaactattctcttgcaataagagatccgcatttattaccactggatgtcttccttttttgtggccaccaatatagcagctctctttagagggattccctttctgctatgccttgagccaaactggctgcttttagaacaaaaaccataagtatggttttactcgaacttctctttgtttttattgagagaaatattgccttctttttggtactccagctgctaaagagtgctgagatatgttaaattattttttaaaagaaaatctccaaatacttatttaacttgtcttctagattcatgttgcttatattttaactattgagcaagtttattataaggaatgctgccatatagagaaagctgaagagaaaccatgggcagaaggcttttttctgtcttattacactggaccttcactctggtaagggcatcagttacttttctggaataaaaggcggagttagagcacttatcagatgctgtttcatggcttgttttagttaatttatcatgcagataactaacatttgggtatctttttgttttaggtcttattttctgactgttaggcctatcttacacataagttctactatcagtatacttggcagcatgacttttttttttttacagttaatttaatgaaaatcagcaccattgtaaatgatagtaattgtaacaacatagttactgggtgaaggagtaggggagacactcagtaaccatctatttacctagacacttatgcaggggtacatgctaggtggctttattcagattcgggtacattggaatcacatcatgactttgagtctgatggctgtgtagataaagatttaagcaagtgccttgtgtttgctggaaaatattaaaactcatttgggtgaaagcttcccagatgatgataattaatagcacttctgcctttttcctggagtaacttttagattgagtcacatatgatagtataaaagtccaaaattttctgggtttacctttgttttatttttcatatatatattcactgtctgcctggaaatagccttggtttaccttatttttttgtatatgtaaaactattcatatttgattttattccaatattatatatgatggaaaagccagaattgtctggcagaatttaattcttccttggatctctagttctgtttttaatatcaggttccttcatcaaattttactactgtagctctgtgatataatttcatttcttgtcaattatggtcacatatagacaagtacttggtcacaattagctcaaaagaatccccatttcttaaggtgctcagtcaatcacctttattttgagatggtagtttttcaagttagtattacttactagctttcttgatgaatataaaaatgttgtctccatcatacagagctgagcctcttgtggtatattaagataagtcccattcttaatcacagaagaacatggatattttagtttttggagtacccagaattgtaaagattttgtttcattttgttttaggatagcttctctgcctaatactataggatatgtcatgttcgttattgtagccacctccctcagatgtttttcactatttttaaattatataatgaccagtagattcacagtagcatgtacttgacaagtgccatggatatttaagaagaaggtaaataattttaatattttttgctgtaattttataggagcagtggactgtaagagaaatatctataaatcagagagtatttaggaaactttgtattttataggtggtcattaaagtgatcttcaggatataagatagtttacacaaactttattctcctgataggaaatttttattcattttcctaccactcagcacttttgttctgccttgtactgcttatgaggattaatgttttaaatttgctttatttgtgcttttcagagagttgtcataattgtggcagttgtgtttgtggcactgtaaatgctgaaattcatgggaaacttaccaaatgactgcttgagtgttatttcccattaaattgggtagctgtcacaataaccagaagaaatcttgtggcccttttgaagaaagccatgtatgttttgttacctaggttcatagtattttaatttaaaggcaaagagaagcattctacttatttgtcttataaaccattaatcgttttttgtgcagaagagagcttattttgttatactgctttgtataatggaaataagtcacattctgggggaaaaaaactggaattgtttgtattttgtttttttggggggggatctttatgtgaaaaatcagagctacttgttaccataagcccttactatcaacaagataattatttgtaatcacttttttatcccaggttggaattgctttccccttctaagttatcttcccttaataatatttatgataccaggacagtgagggtataagagcaaatgtagtgaggtattcaaaaatcctgcatatatggactcaaaagttctttagttatttgaattatatatagctatattattttattagcttgggttgtcagaagattgccaattttaagagtaaagaggagagagataagtaataaaaatagaggaggggaagaaaatggctcccttactggtcttagtaatcttctatatagttaatgagctaaaaaatgatacttaaagttccaggtttggtaccgctagcatagaaacattgcctttcctacacattcctcatcattgtttcctcagaaaattattttaagagtttgtgaaaccagattaaatatctatattcagtttggcctaatttttaaaaataaatatttatactccagcttttgtgtatttggtgtacatcaccacttatgcaaatcaaggatcagaaaactggaggttagccatctccattatttccttttgcacattgggtacagtgggtggcattagtatgcactagctgcaaagtcacagcaccttatggaaataagtatgtttattataataaaaaaaagttaagctgcatctctgtagattatttactttgcagactgtaaagctgccctatcttttccagcagaatttactcttccattcttaattcttttttgaaatatcttaaataatttaacattcctttataacttcttaacagtgtcaaaactggggtagaagggattttattttttcccaaaagggttccatctttgctatctgttgatcagccttagaaaatctaagtatgatcaataaattttaatggttgatggcatcctgtgtcagctggagtagttggttgtgaatattaaaacctagtactattttccctcagtaacatgtaattgctacattttttataagaaggtatggttagaaaaaaatgtgaaagatcacttaaaccaaagccagttacaaggagtaatctctcctgttggtttaccttcacctcagaactacaagaatattacaatacatagtgaatagttgtctgtaacatttctaccagttgtttcagtagcatattggtcttggcatttcttggcactgtggttctgctgtattatttgtgatgtcttattgtttgtgagcttttgttttttttttaaagaaaaaacaaaaactaagtgggactatgtatgtagatgtgtgtcagtaccaaaaagttattttctcaaatccctaaatttctgatttccattcaagtcttttaaactctttcctgctgaatagcaaagaacttttattttccactttcctatattcctaaaaagtgtgaacaatgcgtttcagttgactgtattgcatacttttttgctgaagactttttctgtaaacacaattgccttgttcagttttgttgtaaactgacttaccataagatgcactgttgataatgctttctgatgtgtgtttgataagagtgataaaataaaagcttaaaaataaa

SEQ ID NO: 453060 - DNA, 5214 bp, Homo sapiens
gaattaccaaagggtcttgtggcatgttccccaatacatgcccttagaaggaagaactattattttttattttggccctttcaggagttgattataaattggtttgttttcaagtcagaattcaagtgggcagaacccgtattgtgaagacctaaactttcctaaatgttcatatgggtagcagattttgtggtgattagaaacatcaggtccttaaatacgatgaacatgggatacaaaggaattctttataagggcaagtatcctaagttagcacatttacttttctctcccctccgcccccaaaagaaaaatccttacaaataaactgcaggtaggcttctaagcctagtcctgcagtatgctgctaacatcttgatgccaatcttcacagcattctttgattgtcatcttattgctgatacattcatacatatatttagtgcttgacactgtagaattttgttacagaagatggttactagattttaagggagctgagggaataattgatgagccttgaattaaccatgcatttaattagattttttgttgttgttgttgttgttttgagatgatgtcttgctctgttgcccaggctggagtgcagtggctcaatctcggctcactgcaacctctgcctcgcaggtttgagcgattctcctgtctcagcctccccagtagctgggtttacaggcgcttgccaccacacctggctagatgttttatattaaagccagagaattgaaaaagaaatgcctcctgtgattgaaattattttatagctcttagcccgttctaccaaagatcacattagcagattacccctccctcctgtgatattatctttcttaaacctgaaccaaatatcaaaagatacaagtttcatgattaggatgaaatatatacatagggattttggtttattgaagttattgaaagacctagaaattttctttttgagagaaagggtaaagaggtgagggttcatgtcacttaacccctacccttttgggcaaattttgtctcaggtagtgtttcattccctaaattaatacctgtgcttccttgcctctcaccttcccagttacttctttggggtattactgtggcacattgtacacccagaaaaggcacatacagtgattattttgtgggaaatacttgattcttttgaaatatatttggagggggtagctagctagccactgtcaaaactaatgctgtatttacaggacaaaaacaagtagagttggacacctcagtaagagacagcattaactaaaagtactgactgccttttaaaggaatttttaaaactattctcttgcaataagagatccgcatttattaccactggatgtcttccttttttgtggccaccaatatagcagctctctttagagggattccctttctgctatgccttgagccaaactggctgcttttagaacaaaaaccataagtatggttttactcgaacttctctttgtttttattgagagaaatattgccttctttttggtactccagctgctaaagagtgctgagatatgttaaattattttttaaaagaaaatctccaaatacttatttaacttgtcttctagattcatgttgcttatattttaactattgagcaagtttattataaggaatgctgccatatagagaaagctgaagagaaaccatgggcagaaggcttttttctgtcttattacactggaccttcactctggtaagggcatcagttacttttctggaataaaaggcggagttagagcacttatcagatgctgtttcatggcttgttttagttaatttatcatgcagataactaacatttgggtatctttttgttttaggtcttattttctgactgttaggcctatcttacacataagttctactatcagtatacttggcagcatgacttttttttttttacagttaatttaatgaaaatcagcaccattgtaaatgatagtaattgtaacaacatagttactgggtgaaggagtaggggagacactcagtaaccatctatttacctagacacttatgcaggggtacatgctaggtggctttattcagattcgggtacattggaatcacatcatgactttgagtctgatggctgtgtagataaagatttaagcaagtgccttgtgtttgctggaaaatattaaaactcatttgggtgaaagcttcccagatgatgataattaatagcacttctgcctttttcctggagtaacttttagattgagtcacatatgatagtataaaagtccaaaattttctgggtttacctttgttttatttttcatatatatattcactgtctgcctggaaatagccttggtttaccttatttttttgtatatgtaaaactattcatatttgattttattccaatattatatatgatggaaaagccagaattgtctggcagaatttaattcttccttggatctctagttctgtttttaatatcaggttccttcatcaaattttactactgtagctctgtgatataatttcatttcttgtcaattatggtcacatatagacaagtacttggtcacaattagctcaaaagaatccccatttcttaaggtgctcagtcaatcacctttattttgagatggtagtttttcaagttagtattacttactagctttcttgatgaatataaaaatgttgtctccatcatacagagctgagcctcttgtggtatattaagataagtcccattcttaatcacagaagaacatggatattttagtttttggagtacccagaattgtaaagattttgtttcattttgttttaggatagcttctctgcctaatactataggatatgtcatgttcgttattgtagccacctccctcagatgtttttcactatttttaaattatataatgaccagtagattcacagtagcatgtacttgacaagtgccatggatatttaagaagaaggtaaataattttaatattttttgctgtaattttataggagcagtggactgtaagagaaatatctataaatcagagagtatttaggaaactttgtattttataggtggtcattaaagtgatcttcaggatataagatagtttacacaaactttattctcctgataggaaatttttattcattttcctaccactcagcacttttgttctgccttgtactgcttatgaggattaatgttttaaatttgctttatttgtgcttttcagagagttgtcataattgtggcagttgtgtttgtggcactgtaaatgctgaaattcatgggaaacttaccaaatgactgcttgagtgttatttcccattaagccatgtatgttttgttacctaggttcatagtattttaatttaaaggcaaagagaagcattctacttatttgtcttataaaccattaatcgttttttgtgcagaagagagcttattttgttatactgctttgtataatggaaataagtcacattctgggggaaaaaaactggaattgtttgtattttgtttttttggggggggatctttatgtgaaaaatcagagctacttgttaccataagcccttactatcaacaagataattatttgtaatcacttttttatcccaggttggaattgctttccccttctaagttatcttcccttaataatatttatgataccaggacagtgagggtataagagcaaatgtagtgaggtattcaaaaatcctgcatatatggactcaaaagttctttagttatttgaattatatatagctatattattttattagcttgggttgtcagaagattgccaattttaagagtaaagaggagagagataagtaataaaaatagaggaggggaagaaaatggctcccttactggtcttagtaatcttctatatagttaatgagctaaaaaatgatacttaaagttccaggtttggtaccgctagcatagaaacattgcctttcctacacattcctcatcattgtttcctcagaaaattattttaagagtttgtgaaaccagattaaatatctatattcagtttggcctaatttttaaaaataaatatttatactccagcttttgtgtatttggtgtacatcaccacttatgcaaatcaaggatcagaaaactggaggttagccatctccattatttccttttgcacattgggtacagtgggtggcattagtatgcactagctgcaaagtcacagcaccttatggaaataagtatgtttattataataaaaaaaagttaagctgcatctctgtagattatttactttgcagactgtaaagctgccctatcttttccagcagaatttactcttccattcttaattcttttttgaaatatcttaaataatttaacattcctttataacttcttaacagtgtcaaaactggggtagaagggattttattttttcccaaaagggttccatctttgctatctgttgatcagccttagaaaatctaagtatgatcaataaattttaatggttgatggcatcctgtgtcagctggagtagttggttgtgaatattaaaacctagtactattttccctcagtaacatgtaattgctacattttttataagaaggtatggttagaaaaaaatgtgaaagatcacttaaaccaaagccagttacaaggagtaatctctcctgttggtttaccttcacctcagaactacaagaatattacaatacatagtgaatagttgtctgtaacatttctaccagttgtttcagtagcatattggtcttggcatttcttggcactgtggttctgctgtattatttgtgatgtcttattgtttgtgagcttttgttttttttttaaagaaaaaacaaaaactaagtgggactatgtatgtagatgtgtgtcagtaccaaaaagttattttctcaaatccctaaatttctgatttccattcaagtcttttaaactctttcctgctgaatagcaaagaacttttattttccactttcctatattcctaaaaagtgtgaacaatgcgtttcagttgactgtattgcatacttttttgctgaagactttttctgtaaacacaattgccttgttcagttttgttgtaaactgacttaccataagatgcactgttgataatgctttctgatgtgtgtttgataagagtgataaaataaaagcttaaaaataaa

SEQ ID NO: 453061 - DNA, 5212 bp, Homo sapiens
gaattaccaaagggtcttgtggcatgttccccaatacatgcccttagaaggaagaactattattttttattttggccctttcaggagttgattataaattggtttgttttcaagtcagaattcaagtgggcagaacccgtattgtgaagacctaaactttcctaaatgttcatatgggtagcagattttgtggtgattagaaacatcaggtccttaaatacgatgaacatgggatacaaaggaattctttataagggcaagtatcctaagttagcacatttacttttctctcccctccgcccccaaaagaaaaatccttacaaataaactgcaggtaggcttctaagcctagtcctgcagtatgctgctaacatcttgatgccaatcttcacagcattctttgattgtcatcttattgctgatacattcatacatatatttagtgcttgacactgtagaattttgttacagaagatggttactagattttaagggagctgagggaataattgatgagccttgaattaaccatgcatttaattagattttttgttgttgttgttgttgttttgagatgatgtcttgctctgttgcccaggctggagtgcagtggctcaatctcggctcactgcaacctctgcctcgcaggtttgagcgattctcctgtctcagcctccccagtagctgggtttacaggcgcttgccaccacacctggctagatgttttatattaaagccagagaattgaaaaagaaatgcctcctgtgattgaaattattttatagctcttagcccgttctaccaaagatcacattagcagattacccctccctcctgtgatattatctttcttaaacctgaaccaaatatcaaaagatacaagtttcatgattaggatgaaatatatacatagggattttggtttattgaagttattgaaagacctagaaattttctttttgagagaaagggtaaagaggtgagggttcatgtcacttaacccctacccttttgggcaaattttgtctcaggtagtgtttcattccctaaattaatacctgtgcttccttgcctctcaccttcccagttacttctttggggtattactgtggcacattgtacacccagaaaaggcacatacagtgattattttgtgggaaatacttgattcttttgaaatatatttggagggggtagctagctagccactgtcaaaactaatgctgtatttacaggacaaaaacaagtagagttggacacctcagtaagagacagcattaactaaaagtactgactgccttttaaaggaatttttaaaactattctcttgcaataagagatccgcatttattaccactggatgtcttccttttttgtggccaccaatatagcagctctctttagagggattccctttctgctatgccttgagccaaactggctgcttttagaacaaaaaccataagtatggttttactcgaacttctctttgtttttattgagagaaatattgccttctttttggtactccagctgctaaagagtgctgagatatgttaaattattttttaaaagaaaatctccaaatacttatttaacttgtcttctagattcatgttgcttatattttaactattgagcaagtttattataaggaatgctgccatatagagaaagctgaagagaaaccatgggcagaaggcttttttctgtcttattacactggaccttcactctggtaagggcatcagttacttttctggaataaaaggcggagttagagcacttatcagatgctgtttcatggcttgttttagttaatttatcatgcagataactaacatttgggtatctttttgttttaggtcttattttctgactgttaggcctatcttacacataagttctactatcagtatacttggcagcatgacttttttttttttacagttaatttaatgaaaatcagcaccattgtaaatgatagtaattgtaacaacatagttactgggtgaaggagtaggggagacactcagtaaccatctatttacctagacacttatgcaggggtacatgctaggtggctttattcagattcgggtacattggaatcacatcatgactttgagtctgatggctgtgtagataaagatttaagcaagtgccttgtgtttgctggaaaatattaaaactcatttgggtgaaagcttcccagatgatgataattaatagcacttctgcctttttcctggagtaacttttagattgagtcacatatgatagtataaaagtccaaaattttctgggtttacctttgttttatttttcatatatatattcactgtctgcctggaaatagccttggtttaccttatttttttgtatatgtaaaactattcatatttgattttattccaatattatatatgatggaaaagccagaattgtctggcagaatttaattcttccttggatctctagttctgtttttaatatcaggttccttcatcaaattttactactgtagctctgtgatataatttcatttcttgtcaattatggtcacatatagacaagtacttggtcacaattagctcaaaagaatccccatttcttaaggtgctcagtcaatcacctttattttgagatggtagtttttcaagttagtattacttactagctttcttgatgaatataaaaatgttgtctccatcatacagagctgagcctcttgtggtatattaagataagtcccattcttaatcacagaagaacatggatattttagtttttggagtacccagaattgtaaagattttgtttcattttgttttaggatagcttctctgcctaatactataggatatgtcatgttcgttattgtagccacctccctcagatgtttttcactatttttaaattatataatgaccagtagattcacagtagcatgtacttgacaagtgccatggatatttaagaagaaggtaaataattttaatattttttgctgtaattttataggagcagtggactgtaagagaaatatctataaatcagagagtatttaggaaactttgtattttataggtggtcattaaagtgatcttcaggatataagatagtttacacaaactttattctcctgataggaaatttttattcattttcctaccactcagcacttttgttctgccttgtactgcttatgaggattaatgttttaaatttgctttatttgtgcttttcagagagttgtcataattgtggcagttgtgtttgtggcactgtaaatgctgaaattcatgggaaacttaccaaatgactgcttgagtgttatttcccattaaattgggtagctgtcacaataaccagaagaaatcttgtggcccttttgaagaaagccatgtatgttttgttacctaggttcatagtattttaatttaaaggcaaagagaagcattctacttatttgtcttataaaccattaatcgttttttgtgcagaagagagcttattttgttatactgctttgtataatggaaataagtcacattctgggggaaaaaaactggaattgtttgtattttgtttttttggggggggatctttatgtgaaaaatcagagctacttgttaccataagcccttactatcaacaagataattatttgtaatcacttttttatcccaggttggaattgctttccccttctaagttatcttcccttaataatatttatgataccaggacagtgagggtataagagcaaatgtagtgaggtattcaaaaatcctgcatatatggactcaaaagttctttagttatttgaattatatatagctatattattttattagcttgggttgtcagaagattgccaattttaagagtaaagaggagagagataagtaataaaaatagaggaggggaagaaaatggctcccttactggtcttagtaatcttctatatagttaatgagctttcctacacattcctcatcattgtttcctcagaaaattattttaagagtttgtgaaaccagattaaatatctatattcagtttggcctaatttttaaaaataaatatttatactccagcttttgtgtatttggtgtacatcaccacttatgcaaatcaaggatcagaaaactggaggttagccatctccattatttccttttgcacattgggtacagtgggtggcattagtatgcactagctgcaaagtcacagcaccttatggaaataagtatgtttattataataaaaaaaagttaagctgcatctctgtagattatttactttgcagactgtaaagctgccctatcttttccagcagaatttactcttccattcttaattcttttttgaaatatcttaaataatttaacattcctttataacttcttaacagtgtcaaaactggggtagaagggattttattttttcccaaaagggttccatctttgctatctgttgatcagccttagaaaatctaagtatgatcaataaattttaatggttgatggcatcctgtgtcagctggagtagttggttgtgaatattaaaacctagtactattttccctcagtaacatgtaattgctacattttttataagaaggtatggttagaaaaaaatgtgaaagatcacttaaaccaaagccagttacaaggagtaatctctcctgttggtttaccttcacctcagaactacaagaatattacaatacatagtgaatagttgtctgtaacatttctaccagttgtttcagtagcatattggtcttggcatttcttggcactgtggttctgctgtattatttgtgatgtcttattgtttgtgagcttttgttttttttttaaagaaaaaacaaaaactaagtgggactatgtatgtagatgtgtgtcagtaccaaaaagttattttctcaaatccctaaatttctgatttccattcaagtcttttaaactctttcctgctgaatagcaaagaacttttattttccactttcctatattcctaaaaagtgtgaacaatgcgtttcagttgactgtattgcatacttttttgctgaagactttttctgtaaacacaattgccttgttcagttttgttgtaaactgacttaccataagatgcactgttgataatgctttctgatgtgtgtttgataagagtgataaaataaaagcttaaaaataaa

SEQ ID NO: 453062 - DNA, 5213 bp, Homo sapiens
gaattaccaaagggtcttgtggcatgttccccaatacatgcccttagaaggaagaactattattttttattttggccctttcaggagttgattataaattggtttgttttcaagtcagaattcaagtgggcagaacccgtattgtgaagacctaaactttcctaaatgttcatatgggtagcagattttgtggtgattagaaacatcaggtccttaaatacgatgaacatgggatacaaaggaattctttataagggcaagtatcctaagttagcacatttacttttctctcccctccgcccccaaaagaaaaatccttacaaataaactgcaggtaggcttctaagcctagtcctgcagtatgctgctaacatcttgatgccaatcttcacagcattctttgattgtcatcttattgctgatacattcatacatatatttagtgcttgacactgtagaattttgttacagaagatggttactagattttaagggagctgagggaataattgatgagccttgaattaaccatgcatttaattagattttttgttgttgttgttgttgttttgagatgatgtcttgctctgttgcccaggctggagtgcagtggctcaatctcggctcactgcaacctctgcctcgcaggtttgagcgattctcctgtctcagcctccccagtagctgggtttacaggcgcttgccaccacacctggctagatgttttatattaaagccagagaattgaaaaagaaatgcctcctgtgattgaaattattttatagctcttagcccgttctaccaaagatcacattagcagattacccctccctcctgtgatattatctttcttaaacctgaaccaaatatcaaaagatacaagtttcatgattaggatgaaatatatacatagggattttggtttattgaagttattgaaagacctagaaattttctttttgagagaaagggtaaagaggtgagggttcatgtcacttaacccctacccttttgggcaaattttgtctcaggtagtgtttcattccctaaattaatacctgtgcttccttgcctctcaccttcccagttacttctttggggtattactgtggcacattgtacacccagaaaaggcacatacagtgattattttgtgggaaatacttgattcttttgaaatatatttggagggggtagctagctagccactgtcaaaactaatgctgtatttacaggacaaaaacaagtagagttggacacctcagtaagagacagcattaactaaaagtactgactgccttttaaaggaatttttaaaactattctcttgcaataagagatccgcatttattaccactggatgtcttccttttttgtggccaccaatatagcagctctctttagagggattccctttctgctatgccttgagccaaactggctgcttttagaacaaaaaccataagtatggttttactcgaacttctctttgtttttattgagagaaatattgccttctttttggtactccagctgctaaagagtgctgagatatgttaaattattttttaaaagaaaatctccaaatacttatttaacttgtcttctagattcatgttgcttatattttaactattgagcaagtttattataaggaatgctgccatatagagaaagctgaagagaaaccatgggcagaaggcttttttctgtcttattacactggaccttcactctggtaagggcatcagttacttttctggaataaaaggcggagttagagcacttatcagatgctgtttcatggcttgttttagttaatttatcatgcagataactaacatttgggtatctttttgttttaggtcttattttctgactgttaggcctatcttacacataagttctactatcagtatacttggcagcatgacttttttttttttacagttaatttaatgaaaatcagcaccattgtaaatgatagtaattgtaacaacatagttactgggtgaaggagtaggggagacactcagtaaccatctatttacctagacacttatgcaggggtacatgctaggtggctttattcagattcgggtacattggaatcacatcatgactttgagtctgatggctgtgtagataaagatttaagcaagtgccttgtgtttgctggaaaatattaaaactcatttgggtgaaagcttcccagatgatgataattaatagcacttctgcctttttcctggagtaacttttagattgagtcacatatgatagtataaaagtccaaaattttctgggtttacctttgttttatttttcatatatatattcactgtctgcctggaaatagccttggtttaccttatttttttgtatatgtaaaactattcatatttgattttattccaatattatatatgatggaaaagccagaattgtctggcagaatttaattcttccttggatctctagttctgtttttaatatcaggttccttcatcaaattttactactgtagctctgtgatataatttcatttcttgtcaattatggtcacatatagacaagtacttggtcacaattagctcaaaagaatccccatttcttaaggtgctcagtcaatcacctttattttgagatggtagtttttcaagttagtattacttactagctttcttgatgaatataaaaatgttgtctccatcatacagagctgagcctcttgtggtatattaagataagtcccattcttaatcacagaagaacatggatattttagtttttggagtacccagaattgtaaagattttgtttcattttgttttaggatagcttctctgcctaatactataggatatgtcatgttcgttattgtagccacctccctcagatgtttttcactatttttaaattatataatgaccagtagattcacagtagcatgtacttgacaagtgccatggatatttaagaagaaggtaaataattttaatattttttgctgtaattttataggagcagtggactgtaagagaaatatctataaatcagagagtatttaggaaactttgtattttataggtggtcattaaagtgatcttcaggatataagatagtttacacaaactttattctcctgataggaaatttttattcattttcctaccactcagcacttttgttctgccttgtactgcttatgaggattaatgttttaaatttgctttatttgtgcttttcagagagttgtcataattgtggcagttgtgtttgtggcactgtaaatgctgaaattcatgggaaacttaccaaatgactgcttgagtgttatttcccattaaattgggtagctgtcacaataaccagaagaaatcttgtggcccttttgaagaaagccatgtatgttttgttacctaggttcatagtattttaatttaaaggcaaagagaagcattctacttatttgtcttataaaccattaatcgttttttgtgcagaagagagcttattttgttatactgctttgtataatggaaataagtcacattctgggggaaaaaaactggaattgtttgtattttgtttttttggggggggatctttatgtgaaaaatcagagctacttgttaccataagcccttactatcaacaagataattatttgtaatcacttttttatcccaggttggaattgctttccccttctaagttatcttcccttaataatatttatgataccaggacagtgagggtataagagcaaatgtagtgaggtattcaaaaatcctgcatatatggactcaaaagttctttagttatttgaattatatatagctatattattttattagcttgggttgtcagaagattgccaattttaagagtaaagaggagagagataagtaataaaaatagaggaggggaagaaaatggctcccttactggtcttagtaatcttctatatagttaatgagctaaaaaatgatacttaaagttccaggtttggtaccgctagcatagaaacattgcctttcctacacattcctcatcattgtttcctcagaaaattattttaagagtttgtgaaaccagattaaatatctatattcagtttggcctaatttttaaaaataaatatttatactccagcttttgtgtatttggtgtacatcaccacttatgcaaatcaaggatcaggtggcattagtatgcactagctgcaaagtcacagcaccttatggaaataagtatgtttattataataaaaaaaagttaagctgcatctctgtagattatttactttgcagactgtaaagctgccctatcttttccagcagaatttactcttccattcttaattcttttttgaaatatcttaaataatttaacattcctttataacttcttaacagtgtcaaaactggggtagaagggattttattttttcccaaaagggttccatctttgctatctgttgatcagccttagaaaatctaagtatgatcaataaattttaatggttgatggcatcctgtgtcagctggagtagttggttgtgaatattaaaacctagtactattttccctcagtaacatgtaattgctacattttttataagaaggtatggttagaaaaaaatgtgaaagatcacttaaaccaaagccagttacaaggagtaatctctcctgttggtttaccttcacctcagaactacaagaatattacaatacatagtgaatagttgtctgtaacatttctaccagttgtttcagtagcatattggtcttggcatttcttggcactgtggttctgctgtattatttgtgatgtcttattgtttgtgagcttttgttttttttttaaagaaaaaacaaaaactaagtgggactatgtatgtagatgtgtgtcagtaccaaaaagttattttctcaaatccctaaatttctgatttccattcaagtcttttaaactctttcctgctgaatagcaaagaacttttattttccactttcctatattcctaaaaagtgtgaacaatgcgtttcagttgactgtattgcatacttttttgctgaagactttttctgtaaacacaattgccttgttcagttttgttgtaaactgacttaccataagatgcactgttgataatgctttctgatgtgtgtttgataagagtgataaaataaaagcttaaaaataaa

SEQ ID NO: 453063 - DNA, 5213 bp, Homo sapiens
gaattaccaaagggtcttgtggcatgttccccaatacatgcccttagaaggaagaactattattttttattttggccctttcaggagttgattataaattggtttgttttcaagtcagaattcaagtgggcagaacccgtattgtgaagacctaaactttcctaaatgttcatatgggtagcagattttgtggtgattagaaacatcaggtccttaaatacgatgaacatgggatacaaaggaattctttataagggcaagtatcctaagttagcacatttacttttctctcccctccgcccccaaaagaaaaatccttacaaataaactgcaggtaggcttctaagcctagtcctgcagtatgctgctaacatcttgatgccaatcttcacagcattctttgattgtcatcttattgctgatacattcatacatatatttagtgcttgacactgtagaattttgttacagaagatggttactagattttaagggagctgagggaataattgatgagccttgaattaaccatgcatttaattagattttttgttgttgttgttgttgttttgagatgatgtcttgctctgttgcccaggctggagtgcagtggctcaatctcggctcactgcaacctctgcctcgcaggtttgagcgattctcctgtctcagcctccccagtagctgggtttacaggcgcttgccaccacacctggctagatgttttatattaaagccagagaattgaaaaagaaatgcctcctgtgattgaaattattttatagctcttagcccgttctaccaaagatcacattagcagattacccctccctcctgtgatattatctttcttaaacctgaaccaaatatcaaaagatacaagtttcatgattaggatgaaatatatacatagggattttggtttattgaagttattgaaagacctagaaattttctttttgagagaaagggtaaagaggtgagggttcatgtcacttaacccctacccttttgggcaaattttgtctcaggtagtgtttcattccctaaattaatacctgtgcttccttgcctctcaccttcccagttacttctttggggtattactgtggcacattgtacacccagaaaaggcacatacagtgattattttgtgggaaatacttgattcttttgaaatatatttggagggggtagctagctagccactgtcaaaactaatgctgtatttacaggacaaaaacaagtagagttggacacctcagtaagagacagcattaactaaaagtactgactgccttttaaaggaatttttaaaactattctcttgcaataagagatccgcatttattaccactggatgtcttccttttttgtggccaccaatatagcagctctctttagagggattccctttctgctatgccttgagccaaactggctgcttttagaacaaaaaccataagtatggttttactcgaacttctctttgtttttattgagagaaatattgccttctttttggtactccagctgctaaagagtgctgagatatgttaaattattttttaaaagaaaatctccaaatacttatttaacttgtcttctagattcatgttgcttatattttaactattgagcaagtttattataaggaatgctgccatatagagaaagctgaagagaaaccatgggcagaaggcttttttctgtcttattacactggaccttcactctggtaagggcatcagttacttttctggaataaaaggcggagttagagcacttatcagatgctgtttcatggcttgttttagttaatttatcatgcagataactaacatttgggtatctttttgttttaggtcttattttctgactgttaggcctatcttacacataagttctactatcagtatacttggcagcatgacttttttttttttacagttaatttaatgaaaatcagcaccattgtaaatgatagtaattgtaacaacatagttactgggtgaaggagtaggggagacactcagtaaccatctatttacctagacacttatgcaggggtacatgctaggtggctttattcagattcgggtacattggaatcacatcatgactttgagtctgatggctgtgtagataaagatttaagcaagtgccttgtgtttgctggaaaatattaaaactcatttgggtgaaagcttcccagatgatgataattaatagcacttctgcctttttcctggagtaacttttagattgagtcacatatgatagtataaaagtccaaaattttctgggtttacctttgttttatttttcatatatatattcactgtctgcctggaaatagccttggtttaccttatttttttgtatatgtaaaactattcatatttgattttattccaatattatatatgatggaaaagccagaattgtctggcagaatttaattcttccttggatctctagttctgtttttaatatcaggttccttcatcaaattttactactgtagctctgtgatataatttcatttcttgtcaattatggtcacatatagacaagtacttggtcacaattagctcaaaagaatccccatttcttaaggtgctcagtcaatcacctttattttgagatggtagtttttcaagttagtattacttactagctttcttgatgaatataaaaatgttgtctccatcatacagagctgagcctcttgtggtatattaagataagtcccattcttaatcacagaagaacatggatattttagtttttggagtacccagaattgtaaagattttgtttcattttgttttaggatagcttctctgcctaatactataggatatgtcatgttcgttattgtagccacctccctcagatgtttttcactatttttaaattatataatgaccagtagattcacagtagcatgtacttgacaagtgccatggatatttaagaagaaggtaaataattttaatattttttgctgtaattttataggagcagtggactgtaagagaaatatctataaatcagagagtatttaggaaactttgtattttataggtggtcattaaagtgatcttcaggatataagatagtttacacaaactttattctcctgataggaaatttttattcattttcctaccactcagcacttttgttctgccttgtactgcttatgaggattaatgttttaaatttgctttatttgtgcttttcagagagttgtcataattgtggcagttgtgtttgtggcactgtaaatgctgaaattcatgggaaacttaccaaatgactgcttgagtgttatttcccattaaattgggtagctgtcacaataaccagaagaaatcttgtggcccttttgaagaaagccatgtatgttttgttacctaggttcatagtattttaatttaaaggcaaagagaagcattctacttatttgtcttataaaccattaatcgttttttgtgcagaagagagcttattttgttatactgctttgtataatggaaataagtcacattctgggggaaaaaaactggaattgtttgtattttgtttttttggggggggatctttatgtgaaaaatcagagctacttgttaccataagcccttactatcaacaagataattatttgtaatcacttttttatcccaggttggaattgctttccccttctaagttatcttcccttaataatatttatgataccaggacagtgagggtataagagcaaatgtagtgaggtattcaaaaatcctgcatatatggactcaaaagttctttagttatttgaattatatatagctatattattttattagcttgggttgtcagaagattgccaattttaagagtaaagaggagagagataagtaataaaaatagaggaggggaagaaaatggctcccttactggtcttagtaatcttctatatagttaatgagctaaaaaatgatacttaaagttccaggtttggtaccgctagcatagaaacattgcctttcctacacattcctcatcattgtttcctcagaaaattattttaagagtttgtgaaaccagattaaatatctatattcagtttggcctaatttttaaaaataaatatttatactccagcttttgtgtatttggtgtacatcaccacttatgcaaatcaaggatcagaaaactggaggttagccatctccattatttccttttgcacattgggtacagtgggtggcattagtatgcactagctgcaaagtcacagcaccttatggaaataagtatgtttattataataaaaaaaagttaagctgcatctctgtagattatttactttgcagactgtaaagctgccctatcttttccagcagaatttactcttccattcttaattcttttttgaaatatcttaaataatttaacattcctttataacttcttaacagtgtcaaaactggggtagaagggattttattttttcccaaaagggttccatctttgctatctgttgatcagccttagaaaatctaagtatgatcaataaattttaatggttgatggcatcctgtgtcagctggagtagttggttgtgaatattaaaacctagtactattttccctcagtaacatgtaattgctacattttttataagaaggtatggttagaaattggtttaccttcacctcagaactacaagaatattacaatacatagtgaatagttgtctgtaacatttctaccagttgtttcagtagcatattggtcttggcatttcttggcactgtggttctgctgtattatttgtgatgtcttattgtttgtgagcttttgttttttttttaaagaaaaaacaaaaactaagtgggactatgtatgtagatgtgtgtcagtaccaaaaagttattttctcaaatccctaaatttctgatttccattcaagtcttttaaactctttcctgctgaatagcaaagaacttttattttccactttcctatattcctaaaaagtgtgaacaatgcgtttcagttgactgtattgcatacttttttgctgaagactttttctgtaaacacaattgccttgttcagttttgttgtaaactgacttaccataagatgcactgttgataatgctttctgatgtgtgtttgataagagtgataaaataaaagcttaaaaataaa

SEQ ID NO: 453064 - DNA, 5399 bp, Homo sapiens
gaattaccaaagggtcttgtggcatgttccccaatacatgcccttagaaggaagaactattattttttattttggccctttcaggagttgattataaattggtttgttttcaagtcagaattcaagtgggcagaacccgtattgtgaagacctaaactttcctaaatgttcatatgggtagcagattttgtggtgattagaaacatcaggtccttaaatacgatgaacatgggatacaaaggaattctttataagggcaagtatcctaagttagcacatttacttttctctcccctccgcccccaaaagaaaaatccttacaaataaactgcaggtaggcttctaagcctagtcctgcagtatgctgctaacatcttgatgccaatcttcacagcattctttgattgtcatcttattgctgatacattcatacatatatttagtgcttgacactgtagaattttgttacagaagatggttactagattttaagggagctgagggaataattgatgagccttgaattaaccatgcatttaattagattttttgttgttgttgttgttgttttgagatgatgtcttgctctgttgcccaggctggagtgcagtggctcaatctcggctcactgcaacctctgcctcgcaggtttgagcgattctcctgtctcagcctccccagtagctgggtttacaggcgcttgccaccacacctggctagatgttttatattaaagccagagaattgaaaaagaaatgcctcctgtgattgaaattattttatagctcttagcccgttctaccaaagatcacattagcagattacccctccctcctgtgatattatctttcttaaacctgaaccaaatatcaaaagatacaagtttcatgattaggatgaaatatatacatagggattttggtttattgaagttattgaaagacctagaaattttctttttgagagaaagggtaaagaggtgagggttcatgtcacttaacccctacccttttgggcaaattttgtctcaggtagtgtttcattccctaaattaatacctgtgcttccttgcctctcaccttcccagttacttctttggggtattactgtggcacattgtacacccagaaaaggcacatacagtgattattttgtgggaaatacttgattcttttgaaatatatttggagggggtagctagctagccactgtcaaaactaatgctgtatttacaggacaaaaacaagtagagttggacacctcagtaagagacagcattaactaaaagtactgactgccttttaaaggaatttttaaaactattctcttgcaataagagatccgcatttattaccactggatgtcttccttttttgtggccaccaatatagcagctctctttagagggattccctttctgctatgccttgagccaaactggctgcttttagaacaaaaaccataagtatggttttactcgaacttctctttgtttttattgagagaaatattgccttctttttggtactccagctgctaaagagtgctgagatatgttaaattattttttaaaagaaaatctccaaatacttatttaacttgtcttctagattcatgttgcttatattttaactattgagcaagtttattataaggaatgctgccatatagagaaagctgaagagaaaccatgggcagaaggcttttttctgtcttattacactggaccttcactctggtaagggcatcagttacttttctggaataaaaggcggagttagagcacttatcagatgctgtttcatggcttgttttagttaatttatcatgcagataactaacatttgggtatctttttgttttaggtcttattttctgactgttaggcctatcttacacataagttctactatcagtatacttggcagcatgacttttttttttttacagttaatttaatgaaaatcagcaccattgtaaatgatagtaattgtaacaacatagttactgggtgaaggagtaggggagacactcagtaaccatctatttacctagacacttatgcaggggtacatgctaggtggctttattcagattcgggtacattggaatcacatcatgactttgagtctgatggctgtgtagataaagatttaagcaagtgccttgtgtttgctggaaaatattaaaactcatttgggtgaaagcttcccagatgatgataattaatagcacttctgcctttttcctggagtaacttttagattgagtcacatatgatagtataaaagtccaaaattttctgggtttacctttgttttatttttcatatatatattcactgtctgcctggaaatagccttggtttaccttatttttttgtatatgtaaaactattcatatttgattttattccaatattatatatgatggaaaagccagaattgtctggcagaatttaattcttccttggatctctagttctgtttttaatatcaggttccttcatcaaattttactactgtagctctgtgatataatttcatttcttgtcaattatggtcacatatagacaagtacttggtcacaattagctcaaaagaatccccatttcttaaggtgctcagtcaatcacctttattttgagatggtagtttttcaagttagtattacttactagctttcttgatgaatataaaaatgttgtctccatcatacagagctgagcctcttgtggtatattaagataagtcccattcttaatcacagaagaacatggatattttagtttttggagtacccagaattgtaaagattttgtttcattttgttttaggatagcttctctgcctaatactataggatatgtcatgttcgttattgtagccacctccctcagatgtttttcactatttttaaattatataatgaccagtagattcacagtagcatgtacttgacaagtgccatggatatttaagaagaaggtaaataattttaatattttttgctgtaattttataggagcagtggactgtaagagaaatatctataaatcagagagtatttaggaaactttgtattttataggtggtcattaaagtgatcttcaggatataagatagtttacacaaactttattctcctgataggaaatttttattcattttcctaccactcagcacttttgttctgccttgtactgcttatgaggattaatgttttaaatttgctttatttgtgcttttcagagagttgtcataattgtggcagttgtgtttgtggcactgtaaatgctgaaattcatgggaaacttaccaaatgactgcttgagtgttatttcccattaaattgggtagctgtcacaataaccagaagaaatcttgtggcccttttgaagaaagccatgtatgttttgttacctaggttcatagtattttaatttaaaggcaaagagaagcattctacttatttgtcttataaaccattaatcgttttttgtgcagaagagagcttattttgttatactgctttgtataatggaaataagtcacattctgggggaaaaaaactggaattgtttgtattttgtttttttggggggggatctttatgtgaaaaatcagagctacttgttaccataagcccttactatcaacaagataattatttgtaatcacttttttatcccaggttggaattgctttccccttctaagttatcttcccttaataatatttatgataccaggacagtgagggtataagagcaaatgtagtgaggtattcaaaaatcctgcatatatggactcaaaagttctttagttatttgaattatatatagctatattattttattagcttgggttgtcagaagattgccaattttaagagtaaagaggagagagataagtaataaaaatagaggaggggaagaaaatggctcccttactggtcttagtaatcttctatatagttaatgagctaaaaaatgatacttaaagttccaggtttggtaccgctagcatagaaacattgcctttcctacacattcctcatcattgtttcctcagaaaattattttaagagtttgtgaaaccagattaaatatctatattcagtttggcctaatttttaaaaataaatatttatactccagcttttgtgtatttggtgtacatcaccacttatgcaaatcaaggatcagaaaactggaggttagccatctccattatttccttttgcacattgggtacagtgggtggcattagtatgcactagctgcaaagtcacagcaccttatggaaataagtatgtttattataataaaaaaaagttaagctgcatctctgtagattatttactttgcagactgtaaagctgccctatcttttccagcagaatttactcttccattcttaattcttttttgaaatatcttaaataatttaacattcctttataacttcttaacagtgtcaaaactggggtagaagggattttattttttcccaaaagggttccatctttgctatctgttgatcagccttagaaaatctaagtatgatcaataaattttaatggttgatggcatcctgtgtcagctggagtagttggttgtgaatattaaaacctagtactattttccctcagtaacatgtaattgctacattttttataagaaggtatggttagaaaaaaatgtgaaagatcacttaaaccaaagccagttacaaggagtaatctctcctgttggtttaccttcacctcagaactacaagaatattacaatacatagtgaatagttgtctgtaacatttctaccagttgtttcagtagcatattggtcttggcatttcttggcactgtggttctgctgtattatttgtgatgtcttattgtttgtgagcttttgttttttttttaaagaaaaaacaaaaactaagtgggactatgtatgtagatgtgtgtcagtaccaaaaagttattttctcaaatccctaaatttctgatttccattcaagtcttttaaactctttcctgctgaatagcaaagaacttttattttccactttcctatattcctaaaaagtgtgaacaatgcgtttcagttgactgtattgcatacttttttgctgaagactttttctgtaaacacaattgccttgttcagttttgttgtaaactgacttaccataagatgcactgttgataatgctttctgatgtgtgtttgataagagtgataaaataaaagcttaaaaataaaggagttgctttttaatttcaactttttctatacttagtataaatattcagataacaggtaaatatatttattttctgatttaattttaactaaaagctgccaataaaaatttccatgtagctttaaccaccc

SEQ ID NO: 453065 - DNA, 5556 bp, Homo sapiens
gaattaccaaagggtcttgtggcatgttccccaatacatgcccttagaaggaagaactattattttttattttggccctttcaggagttgattataaattggtttgttttcaagtcagaattcaagtgggcagaacccgtattgtgaagacctaaactttcctaaatgttcatatgggtagcagattttgtggtgattagaaacatcaggtccttaaatacgatgaacatgggatacaaaggaattctttataagggcaagtatcctaagttagcacatttacttttctctcccctccgcccccaaaagaaaaatccttacaaataaactgcaggtaggcttctaagcctagtcctgcagtatgctgctaacatcttgatgccaatcttcacagcattctttgattgtcatcttattgctgatacattcatacatatatttagtgcttgacactgtagaattttgttacagaagatggttactagattttaagggagctgagggaataattgatgagccttgaattaaccatgcatttaattagattttttgttgttgttgttgttgttttgagatgatgtcttgctctgttgcccaggctggagtgcagtggctcaatctcggctcactgcaacctctgcctcgcaggtttgagcgattctcctgtctcagcctccccagtagctgggtttacaggcgcttgccaccacacctggctagatgttttatattaaagccagagaattgaaaaagaaatgcctcctgtgattgaaattattttatagctcttagcccgttctaccaaagatcacattagcagattacccctccctcctgtgatattatctttcttaaacctgaaccaaatatcaaaagatacaagtttcatgattaggatgaaatatatacatagggattttggtttattgaagttattgaaagacctagaaattttctttttgagagaaagggtaaagaggtgagggttcatgtcacttaacccctacccttttgggcaaattttgtctcaggtagtgtttcattccctaaattaatacctgtgcttccttgcctctcaccttcccagttacttctttggggtattactgtggcacattgtacacccagaaaaggcacatacagtgattattttgtgggaaatacttgattcttttgaaatatatttggagggggtagctagctagccactgtcaaaactaatgctgtatttacaggacaaaaacaagtagagttggacacctcagtaagagacagcattaactaaaagtactgactgccttttaaaggaatttttaaaactattctcttgcaataagagatccgcatttattaccactggatgtcttccttttttgtggccaccaatatagcagctctctttagagggattccctttctgctatgccttgagccaaactggctgcttttagaacaaaaaccataagtatggttttactcgaacttctctttgtttttattgagagaaatattgccttctttttggtactccagctgctaaagagtgctgagatatgttaaattattttttaaaagaaaatctccaaatacttatttaacttgtcttctagattcatgttgcttatattttaactattgagcaagtttattataaggaatgctgccatatagagaaagctgaagagaaaccatgggcagaaggcttttttctgtcttattacactggaccttcactctggtaagggcatcagttacttttctggaataaaaggcggagttagagcacttatcagatgctgtttcatggcttgttttagttaatttatcatgcagataactaacatttgggtatctttttgttttaggtcttattttctgactgttaggcctatcttacacataagttctactatcagtatacttggcagcatgacttttttttttttacagttaatttaatgaaaatcagcaccattgtaaatgatagtaattgtaacaacatagttactgggtgaaggagtaggggagacactcagtaaccatctatttacctagacacttatgcaggggtacatgctaggtggctttattcagattcgggtacattggaatcacatcatgactttgagtctgatggctgtgtagataaagatttaagcaagtgccttgtgtttgctggaaaatattaaaactcatttgggtgaaagcttcccagatgatgataattaatagcacttctgcctttttcctggagtaacttttagattgagtcacatatgatagtataaaagtccaaaattttctgggtttacctttgttttatttttcatatatatattcactgtctgcctggaaatagccttggtttaccttatttttttgtatatgtaaaactattcatatttgattttattccaatattatatatgatggaaaagccagaattgtctggcagaatttaattcttccttggatctctagttctgtttttaatatcaggttccttcatcaaattttactactgtagctctgtgatataatttcatttcttgtcaattatggtcacatatagacaagtacttggtcacaattagctcaaaagaatccccatttcttaaggtgctcagtcaatcacctttattttgagatggtagtttttcaagttagtattacttactagctttcttgatgaatataaaaatgttgtctccatcatacagagctgagcctcttgtggtatattaagataagtcccattcttaatcacagaagaacatggatattttagtttttggagtacccagaattgtaaagattttgtttcattttgttttaggatagcttctctgcctaatactataggatatgtcatgttcgttattgtagccacctccctcagatgtttttcactatttttaaattatataatgaccagtagattcacagtagcatgtacttgacaagtgccatggatatttaagaagaaggtaaataattttaatattttttgctgtaattttataggagcagtggactgtaagagaaatatctataaatcagagagtatttaggaaactttgtattttataggtggtcattaaagtgatcttcaggatataagatagtttacacaaactttattctcctgataggaaatttttattcattttcctaccactcagcacttttgttctgccttgtactgcttatgaggattaatgttttaaatttgctttatttgtgcttttcagagagttgtcataattgtggcagttgtgtttgtggcactgtaaatgctgaaattcatgggaaacttaccaaatgactgcttgagtgttatttcccattaaattgggtagctgtcacaataaccagaagaaatcttgtggcccttttgaagaaagccatgtatgttttgttacctaggttcatagtattttaatttaaaggcaaagagaagcattctacttatttgtcttataaaccattaatcgttttttgtgcagaagagagcttattttgttatactgctttgtataatggaaataagtcacattctgggggaaaaaaactggaattgtttgtattttgtttttttggggggggatctttatgtgaaaaatcagagctacttgttaccataagcccttactatcaacaagataattatttgtaatcacttttttatcccaggttggaattgctttccccttctaagttatcttcccttaataatatttatgataccaggacagtgagggtataagagcaaatgtagtgaggtattcaaaaatcctgcatatatggactcaaaagttctttagttatttgaattatatatagctatattattttattagcttgggttgtcagaagattgccaattttaagagtaaagaggagagagataagtaataaaaatagaggaggggaagaaaatggctcccttactggtcttagtaatcttctatatagttaatgagctaaaaaatgatacttaaagttccaggtttggtaccgctagcatagaaacattgcctttcctacacattcctcatcattgtttcctcagaaaattattttaagagtttgtgaaaccagattaaatatctatattcagtttggcctaatttttaaaaataaatatttatactccagcttttgtgtatttggtgtacatcaccacttatgcaaatcaaggatcagaaaactggaggttagccatctccattatttccttttgcacattgggtacagtgggtggcattagtatgcactagctgcaaagtcacagcaccttatggaaataagtatgtttattataataaaaaaaagttaagctgcatctctgtagattatttactttgcagactgtaaagctgccctatcttttccagcagaatttactcttccattcttaattcttttttgaaatatcttaaataatttaacattcctttataacttcttaacagtgtcaaaactggggtagaagggattttattttttcccaaaagggttccatctttgctatctgttgatcagccttagaaaatctaagtatgatcaataaattttaatggttgatggcatcctgtgtcagctggagtagttggttgtgaatattaaaacctagtactattttccctcagtaacatgtaattgctacattttttataagaaggtatggttagaaaaaaatgtgaaagatcacttaaaccaaagccagttacaaggagtaatctctcctgttggtttaccttcacctcagaactacaagaatattacaatacatagtgaatagttgtctgtaacatttctaccagttgtttcagtagcatattggtcttggcatttcttggcactgtggttctgctgtattatttgtgatgtcttattgtttgtgagcttttgttttttttttaaagaaaaaacaaaaactaagtgggactatgtatgtagatgtgtgtcagtaccaaaaagttattttctcaaatccctaaatttctgatttccattcaagtcttttaaactctttcctgctgaatagcaaagaacttttattttccactttcctatattcctaaaaagtgtgaacaatgcgtttcagttgactgtattgcatacttttttgctgaagactttttctgtaaacacaattgccttgttcagttttgttgtaaactgacttaccataagatgcactgttgataatgctttctgatgtgtgtttgataagagtgataaaataaaagcttaaaaataaagaaaaaaaaaaaaataaaaaaaaaaaaaaactttttgggcggcatagggcctaggaaaaagttttataaacaatcgttgggggggacgagccccagaaaggaaagtgagcaacaggcgaccaaaagcgtaaccatgagaagacaccctggcacaagaactaagaggctggaaattccacccaataaaaaaaaggcccggagaaccagaagcgtcgtgaaacaaacccgaagaaaccgagagacacacggaactaaaaaaggagtcaacaactgaaataatacgggaata

SEQ ID NO: 453066 - DNA, 5212 bp, Homo sapiens
gaattaccaaagggtcttgtggcatgttccccaatacatgcccttagaaggaagaactattattttttattttggccctttcaggagttgattataaattggtttgttttcaagtcagaattcaagtgggcagaacccgtattgtgaagacctaaactttcctaaatgttcatatgggtagcagattttgtggtgattagaaacatcaggtccttaaatacgatgaacatgggatacaaaggaattctttataagggcaagtatcctaagttagcacatttacttttctctcccctccgcccccaaaagaaaaatccttacaaataaactgcaggtaggcttctaagcctagtcctgcagtatgctgctaacatcttgatgccaatcttcacagcattctttgattgtcatcttattgctgatacattcatacatatatttagtgcttgacactgtagaattttgttacagaagatggttactagattttaagggagctgagggaataattgatgagccttgaattaaccatgcatttaattagattttttgttgttgttgttgttgttttgagatgatgtcttgctctgttgcccaggctggagtgcagtggctcaatctcggctcactgcaacctctgcctcgcaggtttgagcgattctcctgtctcagcctccccagtagctgggtttacaggcgcttgccaccacacctggctagatgttttatattaaagccagagaattgaaaaagaaatgcctcctgtgattgaaattattttatagctcttagcccgttctaccaaagatcacattagcagattacccctccctcctgtgatattatctttcttaaacctgaaccaaatatcaaaagatacaagtttcatgattaggatgaaatatatacatagggattttggtttattgaagttattgaaagacctagaaattttctttttgagagaaagggtaaagaggtgagggttcatgtcacttaacccctacccttttgggcaaattttgtctcaggtagtgtttcattccctaaattaatacctgtgcttccttgcctctcaccttcccagttacttctttggggtattactgtggcacattgtacacccagaaaaggcacatacagtgattattttgtgggaaatacttgattcttttgaaatatatttggagggggtagctagctagccactgtcaaaactaatgctgtatttacaggacaaaaacaagtagagttggacacctcagtaagagacagcattaactaaaagtactgactgccttttaaaggaatttttaaaactattctcttgcaataagagatccgcatttattaccactggatgtcttccttttttgtggccaccaatatagcagctctctttagagggattccctttctgctatgccttgagccaaactggctgcttttagaacaaaaaccataagtatggttttactcgaacttctctttgtttttattgagagaaatattgccttctttttggtactccagctgctaaagagtgctgagatatgttaaattattttttaaaagaaaatctccaaatacttatttaacttgtcttctagattcatgttgcttatattttaactattgagcaagtttattataaggaatgctgccatatagagaaagctgaagagaaaccatgggcagaaggcttttttctgtcttattacactggaccttcactctggtaagggcatcagttacttttctggaataaaaggcggagttagagcacttatcagatgctgtttcatggcttgttttagttaatttatcatgcagataactaacatttgggtatctttttgttttaggtcttattttctgactgttaggcctatcttacacataagttctactatcagtatacttggcagcatgacttttttttttttacagttaatttaatgaaaatcagcaccattgtaaatgatagtaattgtaacaacatagttactgggtgaaggagtaggggagacactcagtaaccatctatttacctagacacttatgcaggggtacatgctaggtggctttattcagattcgggtacattggaatcacatcatgactttgagtctgatggctgtgtagataaagatttaagcaagtgccttgtgtttgctggaaaatattaaaactcatttgggtgaaagcttcccagatgatgataattaatagcacttctgcctttttcctggagtaacttttagattgagtcacatatgatagtataaaagtccaaaattttctgggtttacctttgttttatttttcatatatatattcactgtctgcctggaaatagccttggtttaccttatttttttgtatatgtaaaactattcatatttgattttattccaatattatatatgatggaaaagccagaattgtctggcagaatttaattcttccttggatctctagttctgtttttaatatcaggttccttcatcaaattttactactgtagctctgtgatataatttcatttcttgtcaattatggtcacatatagacaagtacttggtcacaattagctcaaaagaatccccatttcttaaggtgctcagtcaatcacctttattttgagatggtagtttttcaagttagtattacttactagctttcttgatgaatataaaaatgttgtctccatcatacagagctgagcctcttgtggtatattaagataagtcccattcttaatcacagaagaacatggatattttagtttttggagtacccagaattgtaaagattttgtttcattttgttttaggatagcttctctgcctaatactataggatatgtcatgttcgttattgtagccacctccctcagatgtttttcactatttttaaattatataatgaccagtagattcacagtagcatgtacttgacaagtgccatggatatttaagaagaaggtaaataattttaatattttttgctgtaattttataggagcagtggactgtaagagaaatatctataaatcagagagtatttaggaaactttgtattttataggtggtcattaaagtgatcttcaggatataagatagtttacacaaactttattctcctgataggaaatttttattcattttcctaccactcagcacttttgttctgccttgtactgcttatgaggattaatgttttaaatttgctttatttgtgcttttcagagagttgtcataattgtggcagttgtgtttgtggcactgtaaatgctgaaattcatgggaaacttaccaaatgactgcttgagtgttatttcccattaaattgggtagctgtcacaataaccagaagaaatcttgtggcccttttgaagaaagccatgtatgttttgttacctaggttcatagtattttaatttaaaggcaaagagaagcattctacttatttgtcttataaaccattaatcgttttttgtgcagaagagagcttattttgttatactgctttgtataatggaaataagtcacattctgggggaaaaaaactggaattgtttgtattttgtttttttggggggggatctttatgtgaaaaatcagagctacttgttaccataagcccttactatcaacaagataattatttgtaatcacttttttatcccaggttggaattgctttccccttctaagttatcttcccttaataatatttatgataccaggacagtgagggtataagagcaaatgtagtgaggtattcaaaaatcctgcatatatggactcaaaagttctttagttatttgaattatatatagctatattattttattagcttgggttgtcagaagattgccaattttaagagtaaagaggagagagataagtaataaaaatagaggaggggaagaaaatggctcccttactggtcttagtaatcttctatatagttaatgagctaaaaaatgatacttaaagttccaggtttggtaccgctagcatagaaacattgcctttcctacacattcctcatcattgtttcctcagaaaattattttaagagtttgtgaaaccagattaaatatctatattcagtttggcctaatttttaaaaataaatatttatactccagcttttgtgtatttggtgtacatcaccacttatgcaaatcaaggatcagaaaactggaggttagccatctccattatttccttttgcacattgggtacagtgggtggcattagtatgcactagctgcaaagtcacagcaccttatggaaataagtatgtttattataataaactatcttttccagcagaatttactcttccattcttaattcttttttgaaatatcttaaataatttaacattcctttataacttcttaacagtgtcaaaactggggtagaagggattttattttttcccaaaagggttccatctttgctatctgttgatcagccttagaaaatctaagtatgatcaataaattttaatggttgatggcatcctgtgtcagctggagtagttggttgtgaatattaaaacctagtactattttccctcagtaacatgtaattgctacattttttataagaaggtatggttagaaaaaaatgtgaaagatcacttaaaccaaagccagttacaaggagtaatctctcctgttggtttaccttcacctcagaactacaagaatattacaatacatagtgaatagttgtctgtaacatttctaccagttgtttcagtagcatattggtcttggcatttcttggcactgtggttctgctgtattatttgtgatgtcttattgtttgtgagcttttgttttttttttaaagaaaaaacaaaaactaagtgggactatgtatgtagatgtgtgtcagtaccaaaaagttattttctcaaatccctaaatttctgatttccattcaagtcttttaaactctttcctgctgaatagcaaagaacttttattttccactttcctatattcctaaaaagtgtgaacaatgcgtttcagttgactgtattgcatacttttttgctgaagactttttctgtaaacacaattgccttgttcagttttgttgtaaactgacttaccataagatgcactgttgataatgctttctgatgtgtgtttgataagagtgataaaataaaagcttaaaaataaa

SEQ ID NO: 453067 - DNA, 5213 bp, Homo sapiens
gaattaccaaagggtcttgtggcatgttccccaatacatgcccttagaaggaagaactattattttttattttggccctttcaggagttgattataaattggtttgttttcaagtcagaattcaagtgggcagaacccgtattgtgaagacctaaactttcctaaatgttcatatgggtagcagattttgtggtgattagaaacatcaggtccttaaatacgatgaacatgggatacaaaggaattctttataagggcaagtatcctaagttagcacatttacttttctctcccctccgcccccaaaagaaaaatccttacaaataaactgcaggtaggcttctaagcctagtcctgcagtatgctgctaacatcttgatgccaatcttcacagcattctttgattgtcatcttattgctgatacattcatacatatatttagtgcttgacactgtagaattttgttacagaagatggttactagattttaagggagctgagggaataattgatgagccttgaattaaccatgcatttaattagattttttgttgttgttgttgttgttttgagatgatgtcttgctctgttgcccaggctggagtgcagtggctcaatctcggctcactgcaacctctgcctcgcaggtttgagcgattctcctgtctcagcctccccagtagctgggtttacaggcgcttgccaccacacctggctagatgttttatattaaagccagagaattgaaaaagaaatgcctcctgtgattgaaattattttatagctcttagcccgttctaccaaagatcacattagcagattacccctccctcctgtgatattatctttcttaaacctgaaccaaatatcaaaagatacaagtttcatgattaggatgaaatatatacatagggattttggtttattgaagttattgaaagacctagaaattttctttttgagagaaagggtaaagaggtgagggttcatgtcacttaacccctacccttttgggcaaattttgtctcaggtagtgtttcattccctaaattaatacctgtgcttccttgcctctcaccttcccagttacttctttggggtattactgtggcacattgtacacccagaaaaggcacatacagtgattattttgtgggaaatacttgattcttttgaaatatatttggagggggtagctagctagccactgtcaaaactaatgctgtatttacaggacaaaaacaagtagagttggacacctcagtaagagacagcattaactaaaagtactgactgccttttaaaggaatttttaaaactattctcttgcaataagagatccgcatttattaccactggatgtcttccttttttgtggccaccaatatagcagctctctttagagggattccctttctgctatgccttgagccaaactggctgcttttagaacaaaaaccataagtatggttttactcgaacttctctttgtttttattgagagaaatattgccttctttttggtactccagctgctaaagagtgctgagatatgttaaattattttttaaaagaaaatctccaaatacttatttaacttgtcttctagattcatgttgcttatattttaactattgagcaagtttattataaggaatgctgccatatagagaaagctgaagagaaaccatgggcagaaggcttttttctgtcttattacactggaccttcactctggtaagggcatcagttacttttctggaataaaaggcggagttagagcacttatcagatgctgtttcatggcttgttttagttaatttatcatgcagataactaacatttgggtatctttttgttttaggtcttattttctgactgttaggcctatcttacacataagttctactatcagtatacttggcagcatgacttttttttttttacagttaatttaatgaaaatcagcaccattgtaaatgatagtaattgtaacaacatagttactgggtgaaggagtaggggagacactcagtaaccatctatttacctagacacttatgcaggggtacatgctaggtggctttattcagattcgggtacattggaatcacatcatgactttgagtctgatggctgtgtagataaagatttaagcaagtgccttgtgtttgctggaaaatattaaaactcatttgggtgaaagcttcccagatgatgataattaatagcacttctgcctttttcctggagtaacttttagattgagtcacatatgatagtataaaagtccaaaattttctgggtttacctttgttttatttttcatatatatattcactgtctgcctggaaatagccttggtttaccttatttttttgtatatgtaaaactattcatatttgattttattccaatattatatatgatggaaaagccagaattgtctggcagaatttaattcttccttggatctctagttctgtttttaatatcaggttccttcatcaaattttactactgtagctctgtgatataatttcatttcttgtcaattatggtcacatatagacaagtacttggtcacaattagctcaaaagaatccccatttcttaaggtgctcagtcaatcacctttattttgagatggtagtttttcaagttagtattacttactagctttcttgatgaatataaaaatgttgtctccatcatacagagctgagcctcttgtggtatattaagataagtcccattcttaatcacagaagaacatggatattttagtttttggagtacccagaattgtaaagattttgtttcattttgttttaggatagcttctctgcctaatactataggatatgtcatgttcgttattgtagccacctccctcagatgtttttcactatttttaaattatataatgaccagtagattcacagtagcatgtacttgacaagtgccatggatatttaagaagaaggtaaataattttaatattttttgctgtaattttataggagcagtggactgtaagagaaatatctataaatcagagagtatttaggaaactttgtattttataggtggtcattaaagtgatcttcaggatataagatagtttacacaaactttattctcctgataggaaatttttattcattttcctaccactcagcacttttgttctgccttgtactgcttatgaggattaatgttttaaatttgctttatttgtgcttttcagagagttgtcataattgtggcagttgtgtttgtggcactgtaaatgctgaaattcatgggaaacttaccaaatgactgcttgagtgttatttcccattaaattgggtagctgtcacaataaccagaagaaatcttgtggcccttttgaagaaagccatgtatgttttgttacctaggttcatagtattttaatttaaaggcaaagagaagcattctacttatttgtcttataaaccattaatcgttttttgtgcagaagagagcttattttgttatactgctttgtataatggaaataagtcacattctgggggaaaaaaactggaattgtttgtattttgtttttttggggggggatctttatgtgaaaaatcagagctacttgttaccataagcccttactatcaacaagataattatttgtaatcacttttttatcccaggttggaattgctttccccttctaagttatcttcccttaataatatttatgataccaggacagtgagggtataagagcaaatgtagtgaggtattcaaaaatcctgcatatatggactcaaaagttctttagttatttgaattatatatagctatattattttattagcttgggttgtcagaagattgccaattttaagagtaaagaggagagagataagtaataaaaatagaggaggggaagaaaatggctcccttactggtcttagtaatcttctatatagttaatgagctaaaaaatgatacttaaagttccaggtttggtaccgctagcatagaaacattgcctttcctacacattcctcatcattgtttcctcagaaaattattttaagagtttgtgaaaccagattaaatatctatattcagtttggcctaatttttaaaaataaatatttatactccagcttttgtgtatttggtgtacatcaccacttatgcaaatcaaggatcagaaaactggaggttagccatctccattatttccttttgcacattgggtacagtgggtggcattagtatgcactagctgcaaagtcacagcaccttatggaaataagtatgtttattataataaaaaaaagttaagctgcatctctgtagattatttactttgcagactgtaaagctgccctatcttttccagcagaatttactcttccattcttaattcttttttgaaatatcttaaataatttaacattcctttataacttcttaacagtgtcaaaactggggtagaagggattttattttttcccaaaagggttccatctttgctatctgttgatcagccttagaaaatctaagtatgatcaataaattttaatggttgatggcatcctgtgtcagctggagtagttggttgtgaatattaaaacctagtactattttccctcagtaacatgtaattgctacattttttataagaaggtatggttagaaaaaaatgtgaaagatcacttaaaccaaagccagttacaaggagtaatctctcctgttggtttaccttcacctcagaactacaagaatattacaatacatagtgaatagttgtctgtaacatttctaccagttgtttcagtagcatattggtcttggcatttcttggcactgtggttctgctgtattatttgtgatgtcttattgtttgtgagcttttgttttttttttaaagaaaaaacaaaaactaagtgggactatgtatgtagatgtgtgtcagtaccaatctttcctgctgaatagcaaagaacttttattttccactttcctatattcctaaaaagtgtgaacaatgcgtttcagttgactgtattgcatacttttttgctgaagactttttctgtaaacacaattgccttgttcagttttgttgtaaactgacttaccataagatgcactgttgataatgctttctgatgtgtgtttgataagagtgataaaataaaagcttaaaaataaa

SEQ ID NO: 453068 - DNA, 4681 bp, Homo sapiens
gaattaccaaagggtcttgtggcatgttccccaatacatgcccttagaaggaagaactattattttttattttggccctttcaggagttgattataaattggtttgttttcaagtcagaattcaagtgggcagaacccgtattgtgaagacctaaactttcctaaatgttcatatgggtagcagattttgtggtgattagaaacatcaggtccttaaatacgatgaacatgggatacaaaggaattctttataagggcaagtatcctaagttagcacatttacttttctctcccctccgcccccaaaagaaaaatccttacaaataaactgcaggtaggcttctaagcctagtcctgcagtatgctgctaacatcttgatgccaatcttcacagcattctttgattgtcatcttattgctgatacattcatacatatatttagtgcttgacactgtagaattttgttacagaagatggttactagattttaagggagctgagggaataattgatgagccttgaattaaccatgcatttaattagattttttgttgttgttgttgttgttttgagatgatgtcttgctctgttgcccaggctggagtgcagtggctcaatctcggctcactgcaacctctgcctcgcaggtttgagcgattctcctgtctcagcctccccagtagctgggtttacaggcgcttgccaccacacctggctagatgttttatattaaagccagagaattgaaaaagaaatgcctcctgtgattgaaattattttatagctcttagcccgttctaccaaagatcacattagcagattacccctccctcctgtgatattatctttcttaaacctgaaccaaatatcaaaagatacaagtttcatgattaggatgaaatatatacatagggattttggtttattgaagttattgaaagacctagaaattttctttttgagagaaagggtaaagaggtgagggttcatgtcacttaacccctacccttttgggcaaattttgtctcaggtagtgtttcattccctaaattaatacctgtgcttccttgcctctcaccttcccagttacttctttggggtattactgtggcacattgtacacccagaaaaggcacatacagtgattattttgtgggaaatacttgattcttttgaaatatatttggagggggtagctagctagccactgtcaaaactaatgctgtatttacaggacaaaaacaagtagagttggacacctcagtaagagacagcattaactaaaagtactgactgccttttaaaggaatttttaaaactattctcttgcaataagagatccgcatttattaccactggatgtcttccttttttgtggccaccaatatagcagctctctttagagggattccctttctgctatgccttgagccaaactggctgcttttagaacaaaaaccataagtatggttttactcgaacttctctttgtttttattgagagaaatattgccttctttttggtactccagctgctaaagagtgctgagatatgttaaattattttttaaaagaaaatctccaaatacttatttaacttgtcttctagattcatgttgcttatattttaactattgagcaagtttattataaggaatgctgccatatagagaaagctgaagagaaaccatgggcagaaggcttttttctgtcttattacactggaccttcactctggtaagggcatcagttacttttctggaataaaaggcggagttagagcacttatcagatgctgtttcatggcttgttttagttaatttatcatgcagataactaacatttgggtatctttttgttttaggtcttattttctgactgttaggcctatcttacacataagttctactatcagtatacttggcagcatgacttttttttttttacagttaatttaatgaaaatcagcaccattgtaaatgatagtaattgtaacaacatagttactgggtgaaggagtaggggagacactcagtaaccatctatttacctagacacttatgcaggggtacatgctaggtggctttattcagattcgggtacattggaatcacatcatgactttgagtctgatggctgtgtagataaagatttaagcaagtgccttgtgtttgctggaaaatattaaaactcatttgggtgaaagcttcccagatgatgataattaatagcacttctgcctttttcctggagtaacttttagattgagtcacatatgatagtataaaagtccaaaattttctgggtttacctttgttttatttttcatatatatattcactgtctgcctggaaatagccttggtttaccttatttttttgtatatgtaaaactattcatatttgattttattccaatattatatatgatggaaaagccagaattgtctggcagaatttaattcttccttggatctctagttctgtttttaatatcaggttccttcatcaaattttactactgtagctctgtgatataatttcatttcttgtcaattatggtcacatatagacaagtacttggtcacaattagctcaaaagaatccccatttcttaaggtgctcagtcaatcacctttattttgagatggtagtttttcaagttagtattacttactagctttcttgatgaatataaaaatgttgtctccatcatacagagctgagcctcttgtggtatattaagataagtcccattcttaatcacagaagaacatggatattttagtttttggagtacccagaattgtaaagattttgtttcattttgttttaggatagcttctctgcctaatactataggatatgtcatgttcgttattgtagccacctccctcagatgtttttcactatttttaaattatataatgaccagtagattcacagtagcatgtacttgacaagtgccatggatatttaagaagaaggtaaataattttaatattttttgctgtaattttataggagcagtggactgtaagagaaatatctataaatcagagagtatttaggaaactttgtattttataggtggtcattaaagtgatcttcaggatataagatagtttacacaaactttattctcctgataggaaatttttattcattttcctaccactcagcacttttgttctgccttgtactgcttatgaggattaatgttttaaatttgctttatttgtgcttttcagagagttgtcataattgtggcagttgtgtttgtggcactgtaaatgctgaaattcatgggaaacttaccaaatgactgcttgagtgttatttcccattaaattgggtagctgtcacaataaccagaagaaatcttgtggcccttttgaagaaagccatgtatgttttgttacctaggttcatagtattttaatttaaaggcaaagagaagcattctacttatttgtcttataaaccattaatcgttttttgtgcagaagagagcttattttgttatactgctttgtataatggaaataagtcacattctgggggaaaaaaactggaattgtttgtattttgtttttttggggggggatctttatgtgaaaaatcagagctacttgttaccataagcccttactatcaacaagataattatttgtaatcacttttttatcccaggttggaattgctttccccttctaagttatcttcccttaataatatttatgataccaggacagtgagggtataagagcaaatgtagtgaggtattcaaaaatcctgcatatatggactcaaaagttctttagttatttgaattatatatagctatattattttattagcttgggttgtcagaagattgccaattttaagagtaaagaggagagagataagtaataaaaatagaggaggggaagaaaatggctcccttactggtcttagtaatcttctatatagttaatgagctaaaaaatgatacttaaagttccaggtttggtaccgctagcatagaaacattgcctttcctacacattcctcatcattgtttcctcagaaaattattttaagagtttgtgaaaccagattaaatatctatattcagtttggcctaatttttaaaaataaatatttatactccagcttttgtgtatttggtgtacatcaccacttatgcaaatcaaggatcagaaaactggaggttagccatctccattatttccttttgcacattgggtacagtgggtggcattagtatgcactagctgcaaagtcacagcaccttatggaaataagtatgtttattataataaaaaaaagttaagctgcatctctgtagattatttactttgcagactgtaaagctgccctatcttttccagcagaatttactcttccattcttaattcttttttgaaatatcttaaataatttaacattcctttataacttcttaacagtgtcaaaactggggtagaagggattttattttttcccaaaagggttccatctttgctatctgttgatcagccttagaaaatctaagtatgatcaataaattttaatggttgatggcatcctgtgtcagctggagtagttggttgtgaatattaaaacctagtactattttccctcagtacagctacctttccggtccgagcgcgat

SEQ ID NO: 453069 - DNA, 944 bp, Homo sapiens
  misc_feature (13)..(13): n is a, c, g, or t
tcggcggtccggnaaggtagctgtactgtagattatttactttgcagactgtaaagctgccctatcttttccagcagaatttactcttccattcttaattcttttttgaaatatcttaaataatttaacattcctttataacttcttaacagtgtcaaaactggggtagaagggattttattttttcccaaaagggttccatctttgctatctgttgatcagccttagaaaatctaagtatgatcaataaattttaatggttgatggcatcctgtgtcagctggagtagttggttgtgaatattaaaacctagtactattttccctcagtaacatgtaattgctacattttttataagaaggtatggttagaaaaaaatgtgaaagatcacttaaaccaaagccagttacaaggagtaatctctcctgttggtttaccttcacctcagaactacaagaatattacaatacatagtgaatagttgtctgtaacatttctaccagttgtttcagtagcatattggtcttggcatttcttggcactgtggttctgctgtattatttgtgatgtcttattgtttgtgagcttttgttttttttttaaagaaaaaacaaaaactaagtgggactatgtatgtagatgtgtgtcagtaccaaaaagttattttctcaaatccctaaatttctgatttccattcaagtcttttaaactctttcctgctgaatagcaaagaacttttattttccactttcctatattcctaaaaagtgtgaacaatgcgtttcagttgactgtattgcatacttttttgctgaagactttttctgtaaacacaattgccttgttcagttttgttgtaaactgacttaccataagatgcactgttgataatgctttctgatgtgtgtttgataagagtgataaaataaaagcttaaaaataaa

SEQ ID NO: 453070 - DNA, 911 bp, Homo sapiens
tgcttggcagacgttaactgggctatctatagccagacagaattccactctgtccattctaaattctactgtgaaatatctctatcatgatggaacattccttgattacttcatcatagtcttatctgtggggcctgagggattttattttttcccaaaagggttccatctttgctatctgttgatcagccttagaaaatctaagtatgatcaataaattttaatggttgatggcatcctgtgtcagctggagtagttggttgtgaatattaaaacctagtactattttccctcagtaacatgtaattgctacattttttataagaaggtatggttagaaaaaaatgtgaaagatcacttaaaccaaagccagttacaaggagtaatctctcctgttggtttaccttcacctcagaactacaagaatattacaatacatagtgaatagttgtctgtaacatttctaccagttgtttcagtagcatattggtcttggcatttcttggcactgtggttctgctgtattatttgtgatgtcttattgtttgtgagcttttgttttttttttaaagaaaaaacaaaaactaagtgggactatgtatgtagatgtgtgtcagtaccaaaaagttattttctcaaatccctaaatttctgatttccattcaagtcttttaaactctttcctgctgaatagcaaagaacttttattttccactttcctatattcctaaaaagtgtgaacaatgcgtttcagttgactgtattgcatacttttttgctgaagactttttctgtaaacacaattgccttgttcagttttgttgtaaactgacttaccataagatgcactgttgataatgctttctgatgtgtgtttgataagagtgataaaataaaagcttaaaaataaa

SEQ ID NO: 453071 - DNA, 4183 bp, Homo sapiens
gaattaccaaagggtcttgtggcatgttccccaatacatgcccttagaaggaagaactattattttttattttggccctttcaggagttgattataaattggtttgttttcaagtcagaattcaagtgggcagaacccgtattgtgaagacctaaactttcctaaatgttcatatgggtagcagattttgtggtgattagaaacatcaggtccttaaatacgatgaacatgggatacaaaggaattctttataagggcaagtatcctaagttagcacatttacttttctctcccctccgcccccaaaagaaaaatccttacaaataaactgcaggtaggcttctaagcctagtcctgcagtatgctgctaacatcttgatgccaatcttcacagcattctttgattgtcatcttattgctgatacattcatacatatatttagtgcttgacactgtagaattttgttacagaagatggttactagattttaagggagctgagggaataattgatgagccttgaattaaccatgcatttaattagattttttgttgttgttgttgttgttttgagatgatgtcttgctctgttgcccaggctggagtgcagtggctcaatctcggctcactgcaacctctgcctcgcaggtttgagcgattctcctgtctcagcctccccagtagctgggtttacaggcgcttgccaccacacctggctagatgttttatattaaagccagagaattgaaaaagaaatgcctcctgtgattgaaattattttatagctcttagcccgttctaccaaagatcacattagcagattacccctccctcctgtgatattatctttcttaaacctgaaccaaatatcaaaagatacaagtttcatgattaggatgaaatatatacatagggattttggtttattgaagttattgaaagacctagaaattttctttttgagagaaagggtaaagaggtgagggttcatgtcacttaacccctacccttttgggcaaattttgtctcaggtagtgtttcattccctaaattaatacctgtgcttccttgcctctcaccttcccagttacttctttggggtattactgtggcacattgtacacccagaaaaggcacatacagtgattattttgtgggaaatacttgattcttttgaaatatatttggagggggtagctagctagccactgtcaaaactaatgctgtatttacaggacaaaaacaagtagagttggacacctcagtaagagacagcattaactaaaagtactgactgccttttaaaggaatttttaaaactattctcttgcaataagagatccgcatttattaccactggatgtcttccttttttgtggccaccaatatagcagctctctttagagggattccctttctgctatgccttgagccaaactggctgcttttagaacaaaaaccataagtatggttttactcgaacttctctttgtttttattgagagaaatattgccttctttttggtactccagctgctaaagagtgctgagatatgttaaattattttttaaaagaaaatctccaaatacttatttaacttgtcttctagattcatgttgcttatattttaactattgagcaagtttattataaggaatgctgccatatagagaaagctgaagagaaaccatgggcagaaggcttttttctgtcttattacactggaccttcactctggtaagggcatcagttacttttctggaataaaaggcggagttagagcacttatcagatgctgtttcatggcttgttttagttaatttatcatgcagataactaacatttgggtatctttttgttttaggtcttattttctgactgttaggcctatcttacacataagttctactatcagtatacttggcagcatgacttttttttttttacagttaatttaatgaaaatcagcaccattgtaaatgatagtaattgtaacaacatagttactgggtgaaggagtaggggagacactcagtaaccatctatttacctagacacttatgcaggggtacatgctaggtggctttattcagattcgggtacattggaatcacatcatgactttgagtctgatggctgtgtagataaagatttaagcaagtgccttgtgtttgctggaaaatattaaaactcatttgggtgaaagcttcccagatgatgataattaatagcacttctgcctttttcctggagtaacttttagattgagtcacatatgatagtataaaagtccaaaattttctgggtttacctttgttttatttttcatatatatattcactgtctgcctggaaatagccttggtttaccttatttttttgtatatgtaaaactattcatatttgattttattccaatattatatatgatggaaaagccagaattgtctggcagaatttaattcttccttggatctctagttctgtttttaatatcaggttccttcatcaaattttactactgtagctctgtgatataatttcatttcttgtcaattatggtcacatatagacaagtacttggtcacaattagctcaaaagaatccccatttcttaaggtgctcagtcaatcacctttattttgagatggtagtttttcaagttagtattacttactagctttcttgatgaatataaaaatgttgtctccatcatacagagctgagcctcttgtggtatattaagataagtcccattcttaatcacagaagaacatggatattttagtttttggagtacccagaattgtaaagattttgtttcattttgttttaggatagcttctctgcctaatactataggatatgtcatgttcgttattgtagccacctccctcagatgtttttcactatttttaaattatataatgaccagtagattcacagtagcatgtacttgacaagtgccatggatatttaagaagaaggtaaataattttaatattttttgctgtaattttataggagcagtggactgtaagagaaatatctataaatcagagagtatttaggaaactttgtattttataggtggtcattaaagtgatcttcaggatataagatagtttacacaaactttattctcctgataggaaatttttattcattttcctaccactcagcacttttgttctgccttgtactgcttatgaggattaatgttttaaatttgctttatttgtgcttttcagagagttgtcataattgtggcagttgtgtttgtggcactgtaaatgctgaaattcatgggaaacttaccaaatgactgcttgagtgttatttcccattaaattgggtagctgtcacaataaccagaagaaatcttgtggcccttttgaagaaagccatgtatgttttgttacctaggttcatagtattttaatttaaaggcaaagagaagcattctacttatttgtcttataaaccattaatcgttttttgtgcagaagagagcttattttgttatactgctttgtataatggaaataagtcacattctgggggaaaaaaactggaattgtttgtattttgtttttttggggggggatctttatgtgaaaaatcagagctacttgttaccataagcccttactatcaacaagataattatttgtaatcacttttttatcccaggttggaattgctttccccttctaagttatcttcccttaataatatttatgataccaggacagtgagggtataagagcaaatgtagtgaggtattcaaaaatcctgcatatatggactcaaaagttctttagttatttgaattatatatagctatattattttattagcttgggttgtcagaagattgccaattttaagagtaaagaggagagagataagtaataaaaatagaggaggggaagaaaatggctcccttactggtcttagtaatcttctatatagttaatgagctaaaaaatgatacttaaagttccaggtttggtaccgctagcatagaaacattgcctttcctacacattcctcagtacattttcatgatttgagaagccttcgcattcgaagcgaaaagtcctcaatagtagaagaacccgtccataaatcctggagtgactatatggatgccccccaccctaccacacattcacttgta

SEQ ID NO: 453072 - DNA, 5823 bp, Homo sapiens
gaacaccgcggggcaagatggcggtagtgcgtcggctgctgccccgggtctggcagaactcgggtgttttgggctgagacagtggcagctgcggccccgaccccaagtgcggggacctccggcgaataaaggtcggcctgcgggtaggccggtagggcctgcggtccggcctgcgggagaactgggtcgtcagtcctccgagtggtggggctggggactttgagggagttggctctagggcacagtccctgcctggccaggtcggaggaacaagtgctgggatctggcgtgtgtgctccaggggctctttccgcggccctttccacctcttttcactttggggacggtaggcctttataaacggactaatgctgggtgatttgttcctgtggttgttgatgccgaggaaagactctgggccccaggactcacctaaactggagttcgaatactgttcgctcgctgtgtgaccttggaaaaaataacaagcttttctgaagtgagaagctgttctcagccacgagtcctgtgcaagatcactaatgattacctggcatttctgcgacacaggcaggtcctcagggtttgtgcaagtttgcaaacatgttcaccctgtctcagacctcgagagcatggttcatcgatagagcccgtcaggcacgagaagaaaggcttgtgcagaaggaacgggagcgggcagctgttgtgatccaggcccatgtccggagttttctctgtcggagtcgactgcagagagatatcaggagagagattgatgacttttttaaagcagatgaccctgagtccactaaaagaagtgcactttgtattttcaagattgccaggaaactgctgttcctattcagaatcaaagaggataatgagagatttgagaagttgtgtcgcagcatcctgagcagcatggatgctgagaatgagcctaaggtgtggtatgtgtccctggcttgttctaaggacctcaccctcctttggattcaacagatcaagaacattttgtggtactgctgtgattttctcaagcagctcaagcctgaaatcctgcaggactcccgactcatcaccctgtacctcacgatgcttgtcaccttcacagacacttcaacgtggaaaattcttcggggaaaaggtgaaagtcttcgaccagcgatgaaccacatttgtgcaaatataatgggacatctcaaccagcatggattttattctgtgctgcagatattgttaacccgtggcctggcaagaccccgtccttgtctatccaaaggcactttaacagcagctttttctctagcgttacgccctgtgattgctgcacagttctcagacaatctgattcggccgttcctcatccacatcatgtctgtgcctgctctggtgactcatctcagcacagtgacccctgagcgcctcactgttttagaatcccatgacatgcttcgtaaattcatcatatttttaagagaccaagatcgatgccgtgatgtatgtgaaagtttagaaggatgccatacgctttgtctaatgggcaacctcctacacttgggctccctcagccccagagtgttagaggaggagacagatgggttcgtgagtttgctcacccagacgctgtgctactgtcggaagtatgtgtctcagaagaagtccaacctgacccactggcatcctgtccttggctggttctcccaatctgtggattatggccttaacgagtcaatgcacttgatcaccaaacagctgcagttcttgtggggggtgcctctgatccggatcttcttctgtgacatcctgagcaagaagctactggagagccaggagccagcccacgcacagccagcatcccctcagaatgtgctcccagtgaagagtctcctaaagcgtgcttttcaaaagtcggcatcagtccggaatattctcaggcctgtcgggggtaaacgggtcgactctgcagaagtccagaaggtttgcaacatctgtgtcctctaccagacctcgctgacaactctcacacagattcggctgcagatactcacaggtctcacttaccttgatgacctgcttcccaaactgtgggcatttatctgtgagctcgggccccacggagggttaaagctcttcttggaatgcctgaacaatgacactgaagagtccaagcaactcttggccatgctgatgctgttctgtgactgttcgcggcacctcatcacaatccttgatgacattgaagtttatgaagaacagatttcattcaaactggaagagctggtcactatctcctctttcctgaattcttttgtgtttaagatgatctgggatggaattgtagagaacgccaagggtgagaccttggagctgttccagtctgtccacgggtggcttatggtgctgtacgagcgggactgccggcggcgcttcacccccgaggaccactggctgcgaaaggatctcaaacctagcgtgctcttccaagaactcgacagggacagaaaacgggcacagttgatcctgcagtacatcccacatgtcatccctcacaaaaacagagttctactgtttcgaaccatggttaccaaggagaaggagaaactggggctggtggaaaccagctctgcctccccgcatgtcactcacatcaccatccgccggtccaggatgctggagagcttgtttgagtgcccctggccactggtgatcaatgccgagagctgctaggaaggcagtgtgtgctgaacagtggatgtttctgacattcttcaaggacggctacgagcagcttaggcagctctcccagcacgccatgaagggggtcatccgtgtgaagtttgtcaatgacctcggggtggacgaagcagggattgatcaagacggtgtttttaaggagttcttggaagagatcatcaagagagtttttgacccagcactcaatctgttcaagacaaccagtggggatgagaggctgtacccctcacccacatcctacatccatgagaattacctgcagctcttcgagtttgtggggaagatgctggggaaggctgtgtatgagggaattgtggtggacgtgccatttgcatccttcttcctgagccaactgcttgggcaccaccacagcgtcttctatagctcggtggatgaactgccttctctggactccgagttctataaaaacctcacctccatcaagcgctatgatggggacatcactgacctgggcctgacgctgtcttacgacgaggacgtcatgggtcagcttgtttgccatgaactgattcctggagggaagaccattcctgttacaaatgaaaataaaattagctacatccatctgatggcacattttcgaatgcacactcaaataaaaaaccaaacagctgccctcattagcggattccgttccattatcaaacccgagtggatccgaatgttctcaactcctgaactgcagcgtctcatctctggcgacaatgctgagattgatctggaagatttaaagaagcacacagtctactacggtggtttccatggaagtcacagagtcatcatctggctctgggatattctggcctccgacttcacaccggatgagagagctatgtttctgaagttcgtgaccagctgctccagacccccgctcctgggattcgcctacctcaagcctccattctccatccgctgcgtggaggtgtcggacgatcaggacaccggggacactctgggcagcgtcctccggggcttcttcaccatccgcaagcgggagccaggcggccgcctgcccacctcctccacctgcttcaacctgctcaagctgcccaactacagcaagaagagcgtcctccgcgagaagctgcgctacgccatcagcatgaacacgggctttgaactctcctagctcctgtcccagccctgcctccagggctcctgggctgccagggaccttcagctcccagaggcagtgtggtcctgggaatgtgaccaacatgccaggtgacattggcccctagaccctctctatagccatgagactccttgtggcctcaagaaatttagacgcccacgacagcactacacagcatctccaggtgatgcccaaggcacagggctgcagaaaataaacctccagattccaccaacacgggtccattcttcctggtgatggcagaggggcttcttttagctagtttgatcttttgggagtctgtctttccttagccgtctgagtgagctgtgtatgaacaagtcccaggagttccaagagtctagagtggtttttgcagcatgggttgagtgtacaaagcctactgtgcgtgagatcctctccttccgtttctgaaatctcttactcaggtaaggcctcgccaagcctctatgcaccccacaaagtttctgcctccatgccgtccacagcgcctcttcccagacagccaggcccatctgctgcccagggaagcgcaggcgcctgctagggacgctatggacaccgtgagtccaaggcgctgctcctgccttgaagccacgcgctccacgccgcggccctcccattttctgcgtcctcagcgggctgagctgccagagagccttcccggacctattcccgtcctatgcattcacattggcatcctggtttgggggaagaaaaacaacggcccttagcagcagccccgtttccagaatgtgctgcctgttccccaaagcctgcttgtcccgcggaggacggctgcctttgaccctgcttatttgtctcactggttatctaatgaggaacaaacactaacctaaggtacacatcccatctgggcggtggcttcactcctgagtctgcaaaatcccaggaaacttgggtcttgctgcccatccttcctcagcacagggaacccggaagcccgttgcactgacagaggctcacaccctctgggttttttgttttttttttaaacttcatttctcttccaacccattgtgttcctctgccctcattctttacctttgttgtaagaactttagctccagggaactgaggcagaggccctgtttgtggtctgtgttgacagccacccaccctctcccacctcatgctcctgcacctgcaccaccaaggttgatgccggattcgaagccaggaaggcccagtccctcctctgctctcctcaaagacgcaaaacattttccaacaagagctgtcacagtggcagcaaagcaggggccacccgtctccacagtccttcagagtttcagctgcatcctggtgtcccacccaggtcgagcccccaggcttctggaaaacagtgtgtgctctactttgatggaaacatggcaaggaatttaaagacaggaatgtattaatattattgaaggtgtgttcgtaacctctgattctgtggacttgccactttctccaaacgctcggttcctttgaagatttcttctgaacgtgtgtgcgcacgctgggcgggttcgtgcatacatgcggggaccccagactgtcagcacagggaagatggatcccatcctaatttttatcacctgaaggttggaaccagtgagggactgggagagagtgatttataagcaccaatatcaacttcatgtggatttttgacagaggggtagtttgtaatttcatttaaattcttttcagcagctggaaatattgcactatctgaaacactgaatctccttttgtaactggtgttcactgacaccttgatggctcttgatggctctaaaaagttgtaggattttttgtttttgtagctaacttatggattgagatgtgatcaaaggctttattaaatttgtacttcagca

SEQ ID NO: 453073 - DNA, 5199 bp, Homo sapiens
gaacaccgcggggcaagatggcggtagtgcgtcggctgctgccccgggtctggcagaactcgggtgttttgggctgagacagtggcagctgcggccccgaccccaagtgcggggacctccggcgaataaaggtcggcctgcgggtaggccggtagggcctgcggtccggcctgcgggagaactgggtcgtcagtcctccgagtggtggggctggggactttgagggagttggctctagggcacagtccctgcctggccaggtcggaggaacaagtgctgggatctggcgtgtgtgctccaggggctctttccgcggccctttccacctcttttcactttggggacggtaggcctttataaacggactaatgctgggtgatttgttcctgtggttgttgatgccgaggaaagactctgggccccaggactcacctaaactggagttcgaatactgttcgctcgctgtgtgaccttggaaaaaataacaagcttttctgaagtgagaagctgttctcagccacgagtcctgtgcaagatcactaatgattacctggcatttctgcgacacaggcaggtcctcagggtttgtgcaagtttgcaaacatgttcaccctgtctcagacctcgagagcatggttcatcgatagagcccgtcaggcacgagaagaaaggcttgtgcagaaggaacgggagcgggcagctgttgtgatccaggcccatgtccggagttttctctgtcggagtcgactgcagagagatatcaggagagagattgatgacttttttaaagcagatgaccctgagtccactaaaagaagtgcactttgtattttcaagattgccaggaaactgctgttcctattcagaatcaaagaggataatgagagatttgagaagttgtgtcgcagcatcctgagcagcatggatgctgagaatgagcctaaggtgtggtatgtgtccctggcttgttctaaggacctcaccctcctttggattcaacagatcaagaacattttgtggtactgctgtgattttctcaagcagctcaagcctgaaatcctgcaggactcccgactcatcaccctgtacctcacgatgcttgtcaccttcacagacacttcaacgtggaaaattcttcggggaaaaggtgaaagtcttcgaccagcgatgaaccacatttgtgcaaatataatgggacatctcaaccagcatggattttattctgtgctgcagatattgttaacccgtggcctggcaagaccccgtccttgtctatccaaaggcactttaacagcagctttttctctagcgttacgccctgtgattgctgcacagttctcagacaatctgattcggccgttcctcatccacatcatgtctgtgcctgctctggtgactcatctcagcacagtgacccctgagcgcctcactgttttagaatcccatgacatgcttcgtaaattcatcatatttttaagagaccaagatcgatgccgtgatgtatgtgaaagtttagaaggatgccatacgctttgtctaatgggcaacctcctacacttgggctccctcagccccagagtgttagaggaggagacagatgggttcgtgagtttgctcacccagacgctgtgctactgtcggaagtatgtgtctcagaagaagtccaacctgacccactggcatcctgtccttggctggttctcccaatctgtggattatggccttaacgagtcaatgcacttgatcaccaaacagctgcagttcttgtggggggtgcctctgatccggatcttcttctgtgacatcctgagcaagaagctactggagagccaggagccagcccacgcacagccagcatcccctcagaatgtgctcccagtgaagagtctcctaaagcgtgcttttcaaaagtcggcatcagtccggaatattctcaggcctgtcgggggtaaacgggtcgactctgcagaagtccagaaggtttgcaacatctgtgtcctctaccagacctcgctgacaactctcacacagattcggctgcagatactcacaggtctcacttaccttgatgacctgcttcccaaactgtgggcatttatctgtgagctcgggccccacggagggttaaagctcttcttggaatgcctgaacaatgacactgaagagtccaagcaactcttggccatgctgatgctgttctgtgactgttcgcggcacctcatcacaatccttgatgacattgaagtttatgaagaacagatttcattcaaactggaagagctggtcactatctcctctttcctgaattcttttgtgtttaagatgatctgggatggaattgtagagaacgccaagggtgagaccttggagctgttccagtctgtccacgggtggcttatggtgctgtacgagcgggactgccggcggcgcttcacccccgaggaccactggctgcgaaaggatctcaaacctagcgtgctcttccaagaactcgacagggacagaaaacgggcacagttgatcctgcagtacatcccacatgtcatccctcacaaaaacagagttctactgtttcgaaccatggttaccaaggagaaggagaaactggggctggtggaaaccagctctgcctccccgcatgtcactcacatcaccatccgccggtccaggatgctggagagcttgtttgagtgcccctggccactggtgatcaatgccgagagctgctaggaaggcagtgtgtgctgaacagtggatgtttctgacattcttcaaggacggctacgagcagcttaggcagctctcccagcacgccatgaagggggtcatccgtgtgaagtttgtcaatgacctcggggtggacgaagcagggattgatcaagacggtgtttttaaggagttcttggaagagatcatcaagagagtttttgacccagcactcaatctgttcaagacaaccagtggggatgagaggctgtacccctcacccacatcctacatccatgagaattacctgcagctcttcgagtttgtggggaagatgctggggaaggctgtgtatgagggaattgtggtggacgtgccatttgcatccttcttcctgagccaactgcttgggcaccaccacagcgtcttctatagctcggtggatgaactgccttctctggactccgagttctataaaaacctcacctccatcaagcgctatgatggggacatcactgacctgggcctgacgctgtcttacgacgaggacgtcatgggtcagcttgtttgccatgaactgattcctggagggaagaccattcctgttacaaatgaaaataaaattagctacatccatctgatggcacattttcgaatgcacactcaaataaaaaaccaaacagctgccctcattagcggattccgttccattatcaaacccgagtggatccgaatgttctcaactcctgaactgcagcgtctcatctctggcgacaatgctgagattgatctggaagatttaaagaagcacacagtctactacggtggtttccatggaagtcacagagtcatcatctggctctgggatattctggcctccgacttcacaccggatgagagagctatgtttctgaagttcgtgaccagctgctccagacccccgctcctgggattcgcctacctcaagcctccattctccatccgctgcgtggaggtgtcggacgatcaggacaccggggacactctgggcagcgtcctccggggcttcttcaccatccgcaagcgggagccaggcggccgcctgcccacctcctccacctgcttcaacctgctcaagctgcccaactacagcaagaagagcgtcctccgcgagaagctgcgctacgccatcagcatgaacacgggctttgaactctcctagctcctgtcccagccctgcctccagggctcctgggctgccagggaccttcagctcccagaggcagtgtggtcctgggaatgtgaccaacatgccaggtgacattggcccctagaccctctctatagccatgagactccttgtggcctcaagaaatttagacgcccacgacagcactacacagcatctccaggtgatgcccaaggcacagggctgcagaaaataaacctccagattccaccaacacgggtccattcttcctggtgatggcagaggggcttcttttagctagtttgatcttttgggagtctgtctttccttagccgtctgagtgagctgtgtatgaacaagtcccaggagttccaagagtctagagtggtttttgcagcatgggttgagtgtacaaagcctactgtgcgtgagatcctctccttccgtttctgaaatctcttactcaggtaaggcctcgccaagcctctatgcaccccacaaagtttctgcctccatgccaggccctgtttgtggtctgtgttgacagccacccaccctctcccacctcatgctcctgcacctgcaccaccaaggttgatgccggattcgaagccaggaaggcccagtccctcctctgctctcctcaaagacgcaaaacattttccaacaagagctgtcacagtggcagcaaagcaggggccacccgtctccacagtccttcagagtttcagctgcatcctggtgtcccacccaggtcgagcccccaggcttctggaaaacagtgtgtgctctactttgatggaaacatggcaaggaatttaaagacaggaatgtattaatattattgaaggtgtgttcgtaacctctgattctgtggacttgccactttctccaaacgctcggttcctttgaagatttcttctgaacgtgtgtgcgcacgctgggcgggttcgtgcatacatgcggggaccccagactgtcagcacagggaagatggatcccatcctaatttttatcacctgaaggttggaaccagtgagggactgggagagagtgatttataagcaccaatatcaacttcatgtggatttttgacagaggggtagtttgtaatttcatttaaattcttttcagcagctggaaatattgcactatctgaaacactgaatctccttttgtaactggtgttcactgacaccttgatggctcttgatggctctaaaaagttgtaggattttttgtttttgtagctaacttatggattgagatgtgatcaaaggctttattaaatttgtacttcagca

SEQ ID NO: 453074 - DNA, 6217 bp, Homo sapiens
gaacaccgcggggcaagatggcggtagtgcgtcggctgctgccccgggtctggcagaactcgggtgttttgggctgagacagtggcagctgcggccccgaccccaagtgcggggacctccggcgaataaaggtcggcctgcgggtaggccggtagggcctgcggtccggcctgcgggagaactgggtcgtcagtcctccgagtggtggggctggggactttgagggagttggctctagggcacagtccctgcctggccaggtcggaggaacaagtgctgggatctggcgtgtgtgctccaggggctctttccgcggccctttccacctcttttcactttggggacggtaggcctttataaacggactaatgctgggtgatttgttcctgtggttgttgatgccgaggaaagactctgggccccaggactcacctaaactggagttcgaatactgttcgctcgctgtgtgaccttggaaaaaataacaagcttttctgaagtgagaagctgttctcagccacgagtcctgtgcaagatcactaatgattacctggcatttctgcgacacaggcaggtcctcagggtttgtgcaagtttgcaaacatgttcaccctgtctcagacctcgagagcatggttcatcgatagagcccgtcaggcacgagaagaaaggcttgtgcagaaggaacgggagcgggcagctgttgtgatccaggcccatgtccggagttttctctgtcggagtcgactgcagagagatatcaggagagagattgatgacttttttaaagcagatgaccctgagtccactaaaagaagtgcactttgtattttcaagattgccaggaaactgctgttcctattcagaatcaaagaggataatgagagatttgagaagttgtgtcgcagcatcctgagcagcatggatgctgagaatgagcctaaggtgtggtatgtgtccctggcttgttctaaggacctcaccctcctttggattcaacagatcaagaacattttgtggtactgctgtgattttctcaagcagctcaagcctgaaatcctgcaggactcccgactcatcaccctgtacctcacgatgcttgtcaccttcacagacacttcaacgtggaaaattcttcggggaaaaggtgaaagtcttcgaccagcgatgaaccacatttgtgcaaatataatgggacatctcaaccagcatggattttattctgtgctgcagatattgttaacccgtggcctggcaagaccccgtccttgtctatccaaaggcactttaacagcagctttttctctagcgttacgccctgtgattgctgcacagttctcagacaatctgattcggccgttcctcatccacatcatgtctgtgcctgctctggtgactcatctcagcacagtgacccctgagcgcctcactgttttagaatcccatgacatgcttcgtaaattcatcatatttttaagagaccaagatcgatgccgtgatgtatgtgaaagtttagaaggatgccatacgctttgtctaatgggcaacctcctacacttgggctccctcagccccagagtgttagaggaggagacagatgggttcgtgagtttgctcacccagacgctgtgctactgtcggaagtatgtgtctcagaagaagtccaacctgacccactggcatcctgtccttggctggttctcccaatctgtggattatggccttaacgagtcaatgcacttgatcaccaaacagctgcagttcttgtggggggtgcctctgatccggatcttcttctgtgacatcctgagcaagaagctactggagagccaggagccagcccacgcacagccagcatcccctcagaatgtgctcccagtgaagagtctcctaaagcgtgcttttcaaaagtcggcatcagtccggaatattctcaggcctgtcgggggtaaacgggtcgactctgcagaagtccagaaggtttgcaacatctgtgtcctctaccagacctcgctgacaactctcacacagattcggctgcagatactcacaggtctcacttaccttgatgacctgcttcccaaactgtgggcatttatctgtgagctcgggccccacggagggttaaagctcttcttggaatgcctgaacaatgacactgaagagtccaagcaactcttggccatgctgatgctgttctgtgactgttcgcggcacctcatcacaatccttgatgacattgaagtttatgaagaacagatttcattcaaactggaagagctggtcactatctcctctttcctgaattcttttgtgtttaagatgatctgggatggaattgtagagaacgccaagggtgagaccttggagctgttccagtctgtccacgggtggcttatggtgctgtacgagcgggactgccggcggcgcttcacccccgaggaccactggctgcgaaaggatctcaaacctagcgtgctcttccaagaactcgacagggacagaaaacgggcacagttgatcctgcagtacatcccacatgtcatccctcacaaaaacagagttctactgtttcgaaccatggttaccaaggagaaggagaaactggggctggtggaaaccagctctgcctccccgcatgtcactcacatcaccatccgccggtccaggatgctggagagcttgtttgagtgcccctggccactggtgatcaatgccgagagctgctaggaaggcagtgtgtgctgaacagtggatgtttctgacattcttcaaggacggctacgagcagcttaggcagctctcccagcacgccatgaagggggtcatccgtgtgaagtttgtcaatgacctcggggtggacgaagcagggattgatcaagacggtgtttttaaggagttcttggaagagatcatcaagagagtttttgacccagcactcaatctgttcaagacaaccagtggggatgagaggctgtacccctcacccacatcctacatccatgagaattacctgcagctcttcgagtttgtggggaagatgctggggaaggctgtgtatgagggaattgtggtggacgtgccatttgcatccttcttcctgagccaactgcttgggcaccaccacagcgtcttctatagctcggtggatgaactgccttctctggactccgagttctataaaaacctcacctccatcaagcgctatgatggggacatcactgacctgggcctgacgctgtcttacgacgaggacgtcatgggtcagcttgtttgccatgaactgattcctggagggaagaccattcctgttacaaatgaaaataaaattagctacatccatctgatggcacattttcgaatgcacactcaaataaaaaaccaaacagctgccctcattagcggattccgttccattatcaaacccgagtggatccgaatgttctcaactcctgaactgcagcgtctcatctctggcgacaatgctgagattgatctggaagatttaaagaagcacacagtctactacggtggtttccatggaagtcacagagtcatcatctggctctgggatattctggcctccgacttcacaccggatgagagagctatgtttctgaagttcgtgaccagctgctccagacccccgctcctgggattcgcctacctcaagcctccattctccatccgctgcgtggaggtgtcggacgatcaggacaccggggacactctgggcagcgtcctccggggcttcttcaccatccgcaagcgggagccaggcggccgcctgcccacctcctccacctgcttcaacctgctcaagctgcccaactacagcaagaagagcgtcctccgcgagaagctgcgctacgccatcagcatgaacacgggctttgaactctcctagctcctgtcccagccctgcctccagggctcctgggctgccagggaccttcagctcccagaggcagtgtggtcctgggaatgtgaccaacatgccaggtgacattggcccctagaccctctctatagccatgagactccttgtggcctcaagaaatttagacgcccacgacagcactacacagcatctccaggtgatgcccaaggcacagggctgcagaaaataaacctccagattccaccaacacgggtccattcttcctggtgatggcagaggggcttcttttagctagtttgatcttttgggagtctgtctttccttagccgtctgagtgagctgtgtatgaacaagtcccaggagttccaagagtctagagtggtttttgcagcatgggttgagtgtacaaagcctactgtgcgtgagatcctctccttccgtttctgaaatctcttactcaggtaaggcctcgccaagcctctatgcaccccacaaagtttctgcctccatgccgtccacagcgcctcttcccagacagccaggcccatctgctgcccagggaagcgcaggcgcctgctagggacgctatggacaccgtgagtccaaggcgctgctcctgccttgaagccacgcgctccacgccgcggccctcccattttctgcgtcctcagcgggctgagctgccagagagccttcccggacctattcccgtcctatgcattcacattggcatcctggtttgggggaagaaaaacaacggcccttagcagcagccccgtttccagaatgtgctgcctgttccccaaagcctgcttgtcccgcggaggacggctgcctttgaccctgcttatttgtctcactggttatctaatgaggaacaaacactaacctaaggtacacatcccatctgggcggtggcttcactcctgagtctgcaaaatcccaggaaacttgggtcttgctgcccatccttcctcagcacagggaacccggaagcccgttgcactgacagaggctcacaccctctgggttttttgttttttttttaaacttcatttctcttccaacccattgtgttcctctgccctcattctttacctttgttgtaagaactttagctccagggaactgaggcagaggccctgtttgtggtctgtgttgacagccacccaccctctcccacctcatgctcctgcacctgcaccaccaaggttgatgccggattcgaagccaggaaggcccagtccctcctctgctctcctcaaagacgcaaaacattttccaacaagagctgtcacagtggcagcaaagcaggggccacccgtctccacagtccttcagagtttcagctgcatcctggtgtcccacccaggtcgagcccccaggcttctggaaaacagtgtgtgctctactttgatggaaacatggcaaggaatttaaagacaggaatgtattaatattattgaaggtgtgttcgtaacctctgattctgtggacttgccactttctccaaacgctcggttcctttgaagatttcttctgaacgtgtgtgcgcacgctgggcgggttcgtgcatacatgcggggaccccagactgtcagcacagggaagatggatcccatcctaatttttatcacctgaaggttggaaccagtgagggactgggagagagtgatttataagcaccaatatcaacttcatgtggatttttgacagaggggtagtttgtaatttcatttaaattcttttcagcagctggaaatattgcactatctgaaacactgaatctccttttgtaactggtgttcactgacaccttgatggctcttgatggctctaaaaagttgtaggattttttgtttttgtagctaacttatggattgagatgtgatcaaaggctttattaaatttgtacttcagcaaaaaaaaaaaaaaaaaaaaaaaaaaaaaaaaaaaaaaaaaaaacaaaaaaaaaaaaaaaaaacaaaaaaaaagaaaaaaaaaagagagaaaacaaaaaacaaaaccagaaaacaaaaaaaaaggagggggggcggggccgcgcgcacgaggagaggacgccgacacacaagggggtgggggcgggcgccgcacataacaatagaagaagaaggagggcaagacagagtggcgacaccaaaagatgacatgggactcaaaaagaagagggggtgagcctcccacacaaaaaaaacaagcggggggggacaaaaagactgtggtaaaacaacacaaacaaaggcacgaggagaacagcgaggacaacacaagggggcaagaggaggacaaataacc

SEQ ID NO: 453075 - DNA, 5275 bp, Homo sapiens
gaacaccgcggggcaagatggcggtagtgcgtcggctgctgccccgggtctggcagaactcgggtgttttgggctgagacagtggcagctgcggccccgaccccaagtgcggggacctccggcgaataaagggtttgtgcaagtttgcaaacatgttcaccctgtctcagacctcgagagcatggttcatcgatagagcccgtcaggcacgagaagaaaggcttgtgcagaaggaacgggagcgggcagctgttgtgatccaggcccatgtccggagttttctctgtcggagtcgactgcagagagatatcaggagagagattgatgacttttttaaagcagatgaccctgagtccactaaaagaagtgcactttgtattttcaagattgccaggaaactgctgttcctattcagaatcaaagaggataatgagagatttgagaagttgtgtcgcagcatcctgagcagcatggatgctgagaatgagcctaaggtgtggtatgtgtccctggcttgttctaaggacctcaccctcctttggattcaacagatcaagaacattttgtggtactgctgtgattttctcaagcagctcaagcctgaaatcctgcaggactcccgactcatcaccctgtacctcacgatgcttgtcaccttcacagacacttcaacgtggaaaattcttcggggaaaaggtgaaagtcttcgaccagcgatgaaccacatttgtgcaaatataatgggacatctcaaccagcatggattttattctgtgctgcagatattgttaacccgtggcctggcaagaccccgtccttgtctatccaaaggcactttaacagcagctttttctctagcgttacgccctgtgattgctgcacagttctcagacaatctgattcggccgttcctcatccacatcatgtctgtgcctgctctggtgactcatctcagcacagtgacccctgagcgcctcactgttttagaatcccatgacatgcttcgtaaattcatcatatttttaagagaccaagatcgatgccgtgatgtatgtgaaagtttagaaggatgccatacgctttgtctaatgggcaacctcctacacttgggctccctcagccccagagtgttagaggaggagacagatgggttcgtgagtttgctcacccagacgctgtgctactgtcggaagtatgtgtctcagaagaagtccaacctgacccactggcatcctgtccttggctggttctcccaatctgtggattatggccttaacgagtcaatgcacttgatcaccaaacagctgcagttcttgtggggggtgcctctgatccggatcttcttctgtgacatcctgagcaagaagctactggagagccaggagccagcccacgcacagccagcatcccctcagaatgtgctcccagtgaagagtctcctaaagcgtgcttttcaaaagtcggcatcagtccggaatattctcaggcctgtcgggggtaaacgggtcgactctgcagaagtccagaaggtttgcaacatctgtgtcctctaccagacctcgctgacaactctcacacagattcggctgcagatactcacaggtctcacttaccttgatgacctgcttcccaaactgtgggcatttatctgtgagctcgggccccacggagggttaaagctcttcttggaatgcctgaacaatgacactgaagagtccaagcaactcttggccatgctgatgctgttctgtgactgttcgcggcacctcatcacaatccttgatgacattgaagtttatgaagaacagatttcattcaaactggaagagctggtcactatctcctctttcctgaattcttttgtgtttaagatgatctgggatggaattgtagagaacgccaagggtgagaccttggagctgttccagtctgtccacgggtggcttatggtgctgtacgagcgggactgccggcggcgcttcacccccgaggaccactggctgcgaaaggatctcaaacctagcgtgctcttccaagaactcgacagggacagaaaacgggcacagttgatcctgcagtacatcccacatgtcatccctcacaaaaacagagttctactgtttcgaaccatggttaccaaggagaaggagaaactggggctggtggaaaccagctctgcctccccgcatgtcactcacatcaccatccgccggtccaggatgctggaggacggctacgagcagcttaggcagctctcccagcacgccatgaagggggtcatccgtgtgaagtttgtcaatgacctcggggtggacgaagcagggattgatcaagacggtgtttttaaggagttcttggaagagatcatcaagagagtttttgacccagcactcaatctgttcaagacaaccagtggggatgagaggctgtacccctcacccacatcctacatccatgagaattacctgcagctcttcgagtttgtggggaagatgctggggaaggctgtgtatgagggaattgtggtggacgtgccatttgcatccttcttcctgagccaactgcttgggcaccaccacagcgtcttctatagctcggtggatgaactgccttctctggactccgagttctataaaaacctcacctccatcaagcgctatgatggggacatcactgacctgggcctgacgctgtcttacgacgaggacgtcatgggtcagcttgtttgccatgaactgattcctggagggaagaccattcctgttacaaatgaaaataaaattagctacatccatctgatggcacattttcgaatgcacactcaaataaaaaaccaaacagctgccctcattagcggattccgttccattatcaaacccgagtggatccgaatgttctcaactcctgaactgcagcgtctcatctctggcgacaatgctgagattgatctggaagatttaaagaagcacacagtctactacggtggtttccatggaagtcacagagtcatcatctggctctgggatattctggcctccgacttcacaccggatgagagagctatgtttctgaagttcgtgaccagctgctccagacccccgctcctgggattcgcctacctcaagcctccattctccatccgctgcgtggaggtgtcggacgatcaggacaccggggacactctgggcagcgtcctccggggcttcttcaccatccgcaagcgggagccaggcggccgcctgcccacctcctccacctgcttcaacctgctcaagctgcccaactacagcaagaagagcgtcctccgcgagaagctgcgctacgccatcagcatgaacacgggctttgaactctcctagctcctgtcccagccctgcctccagggctcctgggctgccagggaccttcagctcccagaggcagtgtggtcctgggaatgtgaccaacatgccaggtgacattggcccctagaccctctctatagccatgagactccttgtggcctcaagaaatttagacgcccacgacagcactacacagcatctccaggtgatgcccaaggcacagggctgcagaaaataaacctccagattccaccaacacgggtccattcttcctggtgatggcagaggggcttcttttagctagtttgatcttttgggagtctgtctttccttagccgtctgagtgagctgtgtatgaacaagtcccaggagttccaagagtctagagtggtttttgcagcatgggttgagtgtacaaagcctactgtgcgtgagatcctctccttccgtttctgaaatctcttactcaggtaaggcctcgccaagcctctatgcaccccacaaagtttctgcctccatgccgtccacagcgcctcttcccagacagccaggcccatctgctgcccagggaagcgcaggcgcctgctagggacgctatggacaccgtgagtccaaggcgctgctcctgccttgaagccacgcgctccacgccgcggccctcccattttctgcgtcctcagcgggctgagctgccagagagccttcccggacctattcccgtcctatgcattcacattggcatcctggtttgggggaagaaaaacaacggcccttagcagcagccccgtttccagaatgtgctgcctgttccccaaagcctgcttgtcccgcggaggacggctgcctttgaccctgcttatttgtctcactggttatctaatgaggaacaaacactaacctaaggtacacatcccatctgggcggtggcttcactcctgagtctgcaaaatcccaggaaacttgggtcttgctgcccatccttcctcagcacagggaacccggaagcccgttgcactgacagaggctcacaccctctgggttttttgttttttttttaaacttcatttctcttccaacccattgtgttcctctgccctcattctttacctttgttgtaagaactttagctccagggaactgaggcagaggccctgtttgtggtctgtgttgacagccacccaccctctcccacctcatgctcctgcacctgcaccaccaaggttgatgccggattcgaagccaggaaggcccagtccctcctctgctctcctcaaagacgcaaaacattttccaacaagagctgtcacagtggcagcaaagcaggggccacccgtctccacagtccttcagagtttcagctgcatcctggtgtcccacccaggtcgagcccccaggcttctggaaaacagtgtgtgctctactttgatggaaacatggcaaggaatttaaagacaggaatgtattaatattattgaaggtgtgttcgtaacctctgattctgtggacttgccactttctccaaacgctcggttcctttgaagatttcttctgaacgtgtgtgcgcacgctgggcgggttcgtgcatacatgcggggaccccagactgtcagcacagggaagatggatcccatcctaatttttatcacctgaaggttggaaccagtgagggactgggagagagtgatttataagcaccaatatcaacttcatgtggatttttgacagaggggtagtttgtaatttcatttaaattcttttcagcagctggaaatattgcactatctgaaacactgaatctccttttgtaactggtgttcactgacaccttgatggctcttgatggctctaaaaagttgtaggattttttgtttttgtagctaacttatggattgagatgtgatcaaaggctttattaaatttgtacttcagca

SEQ ID NO: 453076 - DNA, 6924 bp, Homo sapiens
gaacaccgcggggcaagatggcggtagtgcgtcggctgctgccccgggtctggcagaactcgggtgttttgggctgagacagtggcagctgcggccccgaccccaagtgcggggacctccggcgaataaaggtcggcctgcgggtaggccggtagggcctgcggtccggcctgcgggagaactgggtcgtcagtcctccgagtggtggggctggggactttgagggagttggctctagggcacagtccctgcctggccaggtcggaggaacaagtgctgggatctggcgtgtgtgctccaggggctctttccgcggccctttccacctcttttcactttggggacggtaggcctttataaacggactaatgctgggtgatttgttcctgtggttgttgatgccgaggaaagactctgggccccaggactcacctaaactggagttcgaatactgttcgctcgctgtgtgaccttggaaaaaataacaagcttttctgaagtgagaagctgttctcagccacgagtcctgtgcaagatcactaatgattacctggcatttctgcgacacaggcaggtcctcagggtttgtgcaagtttgcaaacatgttcaccctgtctcagacctcgagagcatggttcatcgatagagcccgtcaggcacgagaagaaaggcttgtgcagaaggaacgggagcgggcagctgttgtgatccaggcccatgtccggagttttctctgtcggagtcgactgcagagagatatcaggagagagattgatgacttttttaaagcagatgaccctgagtccactaaaagaagtgcactttgtattttcaagattgccaggaaactgctgttcctattcagaatcaaagaggataatgagagatttgagaagttgtgtcgcagcatcctgagcagcatggatgctgagaatgagcctaaggtgtggtatgtgtccctggcttgttctaaggacctcaccctcctttggattcaacagatcaagaacattttgtggtactgctgtgattttctcaagcagctcaagcctgaaatcctgcaggactcccgactcatcaccctgtacctcacgatgcttgtcaccttcacagacacttcaacgtggaaaattcttcggggaaaaggtgaaagtcttcgaccagcgatgaaccacatttgtgcaaatataatgggacatctcaaccagcatggattttattctgtgctgcagtgctgtgatgggctgtttcctgatttggtttcatatgctcctcacaacaaccctgtgaggtggtccgttggcagaagctggtatgactggcagttgtctcgctagaggaaccttctacttcataccataattaaacggcttctaaaataatatgatgtctttaaattttaagtctggcattatttgtattagctgtttttttaactttattattaaagaatttctaaccataatatttagagaaagagtggtagagttaacctcgttacccaatactttcttccctttccttttataaaaacactgcatacggttttttgtttttttgtttttttgttttttttttaagagacagggttgccctgtcacccaggctggcctcaaggaatcttcctgcctcagcctcctgagctgggactgtaggtacaagccaccatgcctggctcacaatacagtttttttatctgaagcactcagtttacttttttgctcttttatgtacaaatgaatataaagttgatatcatcctctgaccaattaaaacattcttttcagatattgttaacccgtggcctggcaagaccccgtccttgtctatccaaaggcactttaacagcagctttttctctagcgttacgccctgtgattgctgcacagttctcagacaatctgattcggccgttcctcatccacatcatgtctgtgcctgctctggtgactcatctcagcacagtgacccctgagcgcctcactgttttagaatcccatgacatgcttcgtaaattcatcatatttttaagagaccaagatcgatgccgtgatgtatgtgaaagtttagaaggatgccatacgctttgtctaatgggcaacctcctacacttgggctccctcagccccagagtgttagaggaggagacagatgggttcgtgagtttgctcacccagacgctgtgctactgtcggaagtatgtgtctcagaagaagtccaacctgacccactggcatcctgtccttggctggttctcccaatctgtggattatggccttaacgagtcaatgcacttgatcaccaaacagctgcagttcttgtggggggtgcctctgatccggatcttcttctgtgacatcctgagcaagaagctactggagagccaggagccagcccacgcacagccagcatcccctcagaatgtgctcccagtgaagagtctcctaaagcgtgcttttcaaaagtcggcatcagtccggaatattctcaggcctgtcgggggtaaacgggtcgactctgcagaagtccagaaggtttgcaacatctgtgtcctctaccagacctcgctgacaactctcacacagattcggctgcagatactcacaggtctcacttaccttgatgacctgcttcccaaactgtgggcatttatctgtgagctcgggccccacggagggttaaagctcttcttggaatgcctgaacaatgacactgaagagtccaagcaactcttggccatgctgatgctgttctgtgactgttcgcggcacctcatcacaatccttgatgacattgaagtttatgaagaacagatttcattcaaactggaagagctggtcactatctcctctttcctgaattcttttgtgtttaagatgatctgggatggaattgtagagaacgccaagggtgagaccttggagctgttccagtctgtccacgggtggcttatggtgctgtacgagcgggactgccggcggcgcttcacccccgaggaccactggctgcgaaaggatctcaaacctagcgtgctcttccaagaactcgacagggacagaaaacgggcacagttgatcctgcagtacatcccacatgtcatccctcacaaaaacagagttctactgtttcgaaccatggttaccaaggagaaggagaaactggggctggtggaaaccagctctgcctccccgcatgtcactcacatcaccatccgccggtccaggatgctggaggacggctacgagcagcttaggcagctctcccagcacgccatgaagggggtcatccgtgtgaagtttgtcaatgacctcggggtggacgaagcagggattgatcaagacggtgtttttaaggagttcttggaagagatcatcaagagagtttttgacccagcactcaatctgttcaagacaaccagtggggatgagaggctgtacccctcacccacatcctacatccatgagaattacctgcagctcttcgagtttgtggggaagatgctggggaaggctgtgtatgagggaattgtggtggacgtgccatttgcatccttcttcctgagccaactgcttgggcaccaccacagcgtcttctatagctcggtggatgaactgccttctctggactccgagttctataaaaacctcacctccatcaagcgctatgatggggacatcactgacctgggcctgacgctgtcttacgacgaggacgtcatgggtcagcttgtttgccatgaactgattcctggagggaagaccattcctgttacaaatgaaaataaaattagctacatccatctgatggcacattttcgaatgcacactcaaataaaaaaccaaacagctgccctcattagcggattccgttccattatcaaacccgagtggatccgaatgttctcaactcctgaactgcagcgtctcatctctggcgacaatgctgagattgatctggaagatttaaagaagcacacagtctactacggtggtttccatggaagtcacagagtcatcatctggctctgggatattctggcctccgacttcacaccggatgagagagctatgtttctgaagttcgtgaccagctgctccagacccccgctcctgggattcgcctacctcaagcctccattctccatccgctgcgtggaggtgtcggacgatcaggctgtgcacgtccaggctcgctgcttcatttcctcattggccaaaggagaaggaaagccttcagggttacggagctctgtgtgtctcaagcctggcccactgtgggtgctcaaatgagagtcctactccccataaaaacccagtggccgcctctgggtgtagctgcctctcatgatgcagtttgagcccgtgatgccaccttgtacaggaagctacacagtcctcggcctccatgcttaagggaaagttggcccaagtcatggtctgccaccggccacagcaccggtgaggagggaggagtgcattcagaaatgtttgggcacctaacagtttttacagcattctactttttgtcaattggttaaccagtaattcgctgtgaaccggaaggccccatttccaaaagcttacttagtgcaggaattctctgtgcaggccccagggagaaggggttccttctctggaagccagtcgtcttgtgtctggggcttgacctcgggtagtggtgccagggcagcgccctgcactctgcccagcatccagggactggccagatcccctccctgggctccctggccttggcatcagcctgggctcccaaactaggcccttcccaattcaaggccacgatgtgtgccttcaggacaccggggacactctgggcagcgtcctccggggcttcttcaccatccgcaagcgggagccaggcggccgcctgcccacctcctccacctgcttcaacctgctcaagctgcccaactacagcaagaagagcgtcctccgcgagaagctgcgctacgccatcagcatgaacacgggctttgaactctcctagctcctgtcccagccctgcctccagggctcctgggctgccagggaccttcagctcccagaggcagtgtggtcctgggaatgtgaccaacatgccaggtgacattggcccctagaccctctctatagccatgagactccttgtggcctcaagaaatttagacgcccacgacagcactacacagcatctccaggtgatgcccaaggcacagggctgcagaaaataaacctccagattccaccaacacgggtccattcttcctggtgatggcagaggggcttcttttagctagtttgatcttttgggagtctgtctttccttagccgtctgagtgagctgtgtatgaacaagtcccaggagttccaagagtctagagtggtttttgcagcatgggttgagtgtacaaagcctactgtgcgtgagatcctctccttccgtttctgaaatctcttactcaggtaaggcctcgccaagcctctatgcaccccacaaagtttctgcctccatgccgtccacagcgcctcttcccagacagccaggcccatctgctgcccagggaagcgcaggcgcctgctagggacgctatggacaccgtgagtccaaggcgctgctcctgccttgaagccacgcgctccacgccgcggccctcccattttctgcgtcctcagcgggctgagctgccagagagccttcccggacctattcccgtcctatgcattcacattggcatcctggtttgggggaagaaaaacaacggcccttagcagcagccccgtttccagaatgtgctgcctgttccccaaagcctgcttgtcccgcggaggacggctgcctttgaccctgcttatttgtctcactggttatctaatgaggaacaaacactaacctaaggtacacatcccatctgggcggtggcttcactcctgagtctgcaaaatcccaggaaacttgggtcttgctgcccatccttcctcagcacagggaacccggaagcccgttgcactgacagaggctcacaccctctgggttttttgttttttttttaaacttcatttctcttccaacccattgtgttcctctgccctcattctttacctttgttgtaagaactttagctccagggaactgaggcagaggccctgtttgtggtctgtgttgacagccacccaccctctcccacctcatgctcctgcacctgcaccaccaaggttgatgccggattcgaagccaggaaggcccagtccctcctctgctctcctcaaagacgcaaaacattttccaacaagagctgtcacagtggcagcaaagcaggggccacccgtctccacagtccttcagagtttcagctgcatcctggtgtcccacccaggtcgagcccccaggcttctggaaaacagtgtgtgctctactttgatggaaacatggcaaggaatttaaagacaggaatgtattaatattattgaaggtgtgttcgtaacctctgattctgtggacttgccactttctccaaacgctcggttcctttgaagatttcttctgaacgtgtgtgcgcacgctgggcgggttcgtgcatacatgcggggaccccagactgtcagcacagggaagatggatcccatcctaatttttatcacctgaaggttggaaccagtgagggactgggagagagtgatttataagcaccaatatcaacttcatgtggatttttgacagaggggtagtttgtaatttcatttaaattcttttcagcagctggaaatattgcactatctgaaacactgaatctccttttgtaactggtgttcactgacaccttgatggctcttgatggctctaaaaagttgtaggattttttgtttttgtagctaacttatggattgagatgtgatcaaaggctttattaaatttgtacttcagca

SEQ ID NO: 453077 - DNA, 6143 bp, Homo sapiens
gaacaccgcggggcaagatggcggtagtgcgtcggctgctgccccgggtctggcagaactcgggtgttttgggctgagacagtggcagctgcggccccgaccccaagtgcggggacctccggcgaataaaggtcggcctgcgggtaggccggtagggcctgcggtccggcctgcgggagaactgggtcgtcagtcctccgagtggtggggctggggactttgagggagttggctctagggcacagtccctgcctggccaggtcggaggaacaagtgctgggatctggcgtgtgtgctccaggggctctttccgcggccctttccacctcttttcactttggggacggtaggcctttataaacggactaatgctgggtgatttgttcctgtggttgttgatgccgaggaaagactctgggccccaggactcacctaaactggagttcgaatactgttcgctcgctgtgtgaccttggaaaaaataacaagcttttctgaagtgagaagctgttctcagccacgagtcctgtgcaagatcactaatgattacctggcatttctgcgacacaggcaggtcctcagggtttgtgcaagtttgcaaacatgttcaccctgtctcagacctcgagagcatggttcatcgatagagcccgtcaggcacgagaagaaaggcttgtgcagaaggaacgggagcgggcagctgttgtgatccaggcccatgtccggagttttctctgtcggagtcgactgcagagagatatcaggagagagattgatgacttttttaaagcagatgaccctgagtccactaaaagaagtgcactttgtattttcaagattgccaggaaactgctgttcctattcagaatcaaagaggataatgagagatttgagaagttgtgtcgcagcatcctgagcagcatggatgctgagaatgagcctaaggtgtggtatgtgtccctggcttgttctaaggacctcaccctcctttggattcaacagatcaagaacattttgtggtactgctgtgattttctcaagcagctcaagcctgaaatcctgcaggactcccgactcatcaccctgtacctcacgatgcttgtcaccttcacagacacttcaacgtggaaaattcttcggggaaaaggtgaaagtcttcgaccagcgatgaaccacatttgtgcaaatataatgggacatctcaaccagcatggattttattctgtgctgcagtgctgtgatgggctgtttcctgatttggtttcatatgctcctcacaacaaccctgtgaggtggtccgttggcagaagctggtatgactggcagttgtctcgctagaggaaccttctacttcataccataattaaacggcttctaaaataatatgatgtctttaaattttaagtctggcattatttgtattagctgtttttttaactttattattaaagaatttctaaccataatatttagagaaagagtggtagagttaacctcgttacccaatactttcttccctttccttttataaaaacactgcatacggttttttgtttttttgtttttttgttttttttttaagagacagggttgccctgtcacccaggctggcctcaaggaatcttcctgcctcagcctcctgagctgggactgtaggtacaagccaccatgcctggctcacaatacagtttttttatctgaagcactcagtttacttttttgctcttttatgtacaaatgaatataaagttgatatcatcctctgaccaattaaaacattcttttcagatattgttaacccgtggcctggcaagaccccgtccttgtctatccaaaggcactttaacagcagctttttctctagcgttacgccctgtgattgctgcacagttctcagacaatctgattcggccgttcctcatccacatcatgtctgtgcctgctctggtgactcatctcagcacagtgacccctgagcgcctcactgttttagaatcccatgacatgcttcgtaaattcatcatatttttaagagaccaagatcgatgccgtgatgtatgtgaaagtttagaaggatgccatacgctttgtctaatgggcaacctcctacacttgggctccctcagccccagagtgttagaggaggagacagatgggttcgtgagtttgctcacccagacgctgtgctactgtcggaagtatgtgtctcagaagaagtccaacctgacccactggcatcctgtccttggctggttctcccaatctgtggattatggccttaacgagtcaatgcacttgatcaccaaacagctgcagttcttgtggggggtgcctctgatccggatcttcttctgtgacatcctgagcaagaagctactggagagccaggagccagcccacgcacagccagcatcccctcagaatgtgctcccagtgaagagtctcctaaagcgtgcttttcaaaagtcggcatcagtccggaatattctcaggcctgtcgggggtaaacgggtcgactctgcagaagtccagaaggtttgcaacatctgtgtcctctaccagacctcgctgacaactctcacacagattcggctgcagatactcacaggtctcacttaccttgatgacctgcttcccaaactgtgggcatttatctgtgagctcgggccccacggagggttaaagctcttcttggaatgcctgaacaatgacactgaagagtccaagcaactcttggccatgctgatgctgttctgtgactgttcgcggcacctcatcacaatccttgatgacattgaagtttatgaagaacagatttcattcaaactggaagagctggtcactatctcctctttcctgaattcttttgtgtttaagatgatctgggatggaattgtagagaacgccaagggtgagaccttggagctgttccagtctgtccacgggtggcttatggtgctgtacgagcgggactgccggcggcgcttcacccccgaggaccactggctgcgaaaggatctcaaacctagcgtgctcttccaagaactcgacagggacagaaaacgggcacagttgatcctgcagtacatcccacatgtcatccctcacaaaaacagagttctactgtttcgaaccatggttaccaaggagaaggagaaactggggctggtggaaaccagctctgcctccccgcatgtcactcacatcaccatccgccggtccaggatgctggaggacggctacgagcagcttaggcagctctcccagcacgccatgaagggggtcatccgtgtgaagtttgtcaatgacctcggggtggacgaagcagggattgatcaagacggtgtttttaaggagttcttggaagagatcatcaagagagtttttgacccagcactcaatctgttcaagacaaccagtggggatgagaggctgtacccctcacccacatcctacatccatgagaattacctgcagctcttcgagtttgtggggaagatgctggggaaggctgtgtatgagcgctatgatggggacatcactgacctgggcctgacgctgtcttacgacgaggacgtcatgggtcagcttgtttgccatgaactgattcctggagggaagaccattcctgttacaaatgaaaataaaattagctacatccatctgatggcacattttcgaatgcacactcaaataaaaaaccaaacagctgccctcattagcggattccgttccattatcaaacccgagtggatccgaatgttctcaactcctgaactgcagcgtctcatctctggcgacaatgctgagattgatctggaagatttaaagaagcacacagtctactacggtggtttccatggaagtcacagagtcatcatctggctctgggatattctggcctccgacttcacaccggatgagagagctatgtttctgaagttcgtgaccagctgctccagacccccgctcctgggattcgcctacctcaagcctccattctccatccgctgcgtggaggtgtcggacgatcaggacaccggggacactctgggcagcgtcctccggggcttcttcaccatccgcaagcgggagccaggcggccgcctgcccacctcctccacctgcttcaacctgctcaagctgcccaactacagcaagaagagcgtcctccgcgagaagctgcgctacgccatcagcatgaacacgggctttgaactctcctagctcctgtcccagccctgcctccagggctcctgggctgccagggaccttcagctcccagaggcagtgtggtcctgggaatgtgaccaacatgccaggtgacattggcccctagaccctctctatagccatgagactccttgtggcctcaagaaatttagacgcccacgacagcactacacagcatctccaggtgatgcccaaggcacagggctgcagaaaataaacctccagattccaccaacacgggtccattcttcctggtgatggcagaggggcttcttttagctagtttgatcttttgggagtctgtctttccttagccgtctgagtgagctgtgtatgaacaagtcccaggagttccaagagtctagagtggtttttgcagcatgggttgagtgtacaaagcctactgtgcgtgagatcctctccttccgtttctgaaatctcttactcaggtaaggcctcgccaagcctctatgcaccccacaaagtttctgcctccatgccgtccacagcgcctcttcccagacagccaggcccatctgctgcccagggaagcgcaggcgcctgctagggacgctatggacaccgtgagtccaaggcgctgctcctgccttgaagccacgcgctccacgccgcggccctcccattttctgcgtcctcagcgggctgagctgccagagagccttcccggacctattcccgtcctatgcattcacattggcatcctggtttgggggaagaaaaacaacggcccttagcagcagccccgtttccagaatgtgctgcctgttccccaaagcctgcttgtcccgcggaggacggctgcctttgaccctgcttatttgtctcactggttatctaatgaggaacaaacactaacctaaggtacacatcccatctgggcggtggcttcactcctgagtctgcaaaatcccaggaaacttgggtcttgctgcccatccttcctcagcacagggaacccggaagcccgttgcactgacagaggctcacaccctctgggttttttgttttttttttaaacttcatttctcttccaacccattgtgttcctctgccctcattctttacctttgttgtaagaactttagctccagggaactgaggcagaggccctgtttgtggtctgtgttgacagccacccaccctctcccacctcatgctcctgcacctgcaccaccaaggttgatgccggattcgaagccaggaaggcccagtccctcctctgctctcctcaaagacgcaaaacattttccaacaagagctgtcacagtggcagcaaagcaggggccacccgtctccacagtccttcagagtttcagctgcatcctggtgtcccacccaggtcgagcccccaggcttctggaaaacagtgtgtgctctactttgatggaaacatggcaaggaatttaaagacaggaatgtattaatattattgaaggtgtgttcgtaacctctgattctgtggacttgccactttctccaaacgctcggttcctttgaagatttcttctgaacgtgtgtgcgcacgctgggcgggttcgtgcatacatgcggggaccccagactgtcagcacagggaagatggatcccatcctaatttttatcacctgaaggttggaaccagtgagggactgggagagagtgatttataagcaccaatatcaacttcatgtggatttttgacagaggggtagtttgtaatttcatttaaattcttttcagcagctggaaatattgcactatctgaaacactgaatctccttttgtaactggtgttcactgacaccttgatggctcttgatggctctaaaaagttgtaggattttttgtttttgtagctaacttatggattgagatgtgatcaaaggctttattaaatttgtacttcagca

SEQ ID NO: 453078 - DNA, 6423 bp, Homo sapiens
gaacaccgcggggcaagatggcggtagtgcgtcggctgctgccccgggtctggcagaactcgggtgttttgggctgagacagtggcagctgcggccccgaccccaagtgcggggacctccggcgaataaagaaaaaataacaagcttttctgaagtgagaagctgttctcagccacgagtcctgtgcaagatcactaatgattacctggcatttctgcgacacaggcaggtcctcagggtttgtgcaagtttgcaaacatgttcaccctgtctcagacctcgagagcatggttcatcgatagagcccgtcaggcacgagaagaaaggcttgtgcagaaggaacgggagcgggcagctgttgtgatccaggcccatgtccggagttttctctgtcggagtcgactgcagagagatatcaggagagagattgatgacttttttaaagcagatgaccctgagtccactaaaagaagtgcactttgtattttcaagattgccaggaaactgctgttcctattcagaatcaaagaggataatgagagatttgagaagttgtgtcgcagcatcctgagcagcatggatgctgagaatgagcctaaggtgtggtatgtgtccctggcttgttctaaggacctcaccctcctttggattcaacagatcaagaacattttgtggtactgctgtgattttctcaagcagctcaagcctgaaatcctgcaggactcccgactcatcaccctgtacctcacgatgcttgtcaccttcacagacacttcaacgtggaaaattcttcggggaaaaggtgaaagtcttcgaccagcgatgaaccacatttgtgcaaatataatgggacatctcaaccagcatggattttattctgtgctgcagaggtctgtgactcctgccccccagtgtgcaacttctccactctccaacacctgcacttggatttttacatttgcattcagcatacctggtgtcctcctcagaaacacttttcataggaagagcttgatgcctgctgtcctcttcttccttcccctgccttgtctcacttgtgggtcaggtaaagggaggacagtggtgctgggatcccttgaatgctctacatttttggctgcaagggtaatccagtcttttgacatttaaactctggaaggagacctcagggcttgttccctcagattccttcttggttgatgtctagaatcatatttctagctctgtgtcctcaaacagccctttccactttgtaccttgttgtgccagatcatacctctagggaattgttgagaaagcctgattgctgtttaaaggtacaatggaagtcttgagtttgagaagtaatgttgactttgcccttccttctccctagtgctgtgatgggctgtttcctgatttggtttcatatgctcctcacaacaaccctgtgaggtggtccgttggcagaagctggtatgactggcagttgtctcgctagaggaaccttctacttcataccataattaaacggcttctaaaataatatgatgtctttaaattttaagtctggcattatttgtattagctgtttttttaactttattattaaagaatttctaaccataatatttagagaaagagtggtagagttaacctcgttacccaatactttcttccctttccttttataaaaacactgcatacggttttttgtttttttgtttttttgttttttttttaagagacagggttgccctgtcacccaggctggcctcaaggaatcttcctgcctcagcctcctgagctgggactgtaggtacaagccaccatgcctggctcacaatacagtttttttatctgaagcactcagtttacttttttgctcttttatgtacaaatgaatataaagttgatatcatcctctgaccaattaaaacattcttttcagatattgttaacccgtggcctggcaagaccccgtccttgtctatccaaaggcactttaacagcagctttttctctagcgttacgccctgtgattgctgcacagttctcagacaatctgattcggccgttcctcatccacatcatgtctgtgcctgctctggtgactcatctcagcacagtgacccctgagcgcctcactgttttagaatcccatgacatgcttcgtaaattcatcatatttttaagagaccaagatcgatgccgtgatgtatgtgaaagtttagaaggatgccatacgctttgtctaatgggcaacctcctacacttgggctccctcagccccagagtgttagaggaggagacagatgggttcgtgagtttgctcacccagacgctgtgctactgtcggaagtatgtgtctcagaagaagtccaacctgacccactggcatcctgtccttggctggttctcccaatctgtggattatggccttaacgagtcaatgcacttgatcaccaaacagctgcagttcttgtggggggtgcctctgatccggatcttcttctgtgacatcctgagcaagaagctactggagagccaggagccagcccacgcacagccagcatcccctcagaatgtgctcccagtgaagagtctcctaaagcgtgcttttcaaaagtcggcatcagtccggaatattctcaggcctgtcgggggtaaacgggtcgactctgcagaagtccagaaggtttgcaacatctgtgtcctctaccagacctcgctgacaactctcacacagattcggctgcagatactcacaggtctcacttaccttgatgacctgcttcccaaactgtgggcatttatctgtgagctcgggccccacggagggttaaagctcttcttggaatgcctgaacaatgacactgaagagtccaagcaactcttggccatgctgatgctgttctgtgactgttcgcggcacctcatcacaatccttgatgacattgaagtttatgaagaacagatttcattcaaactggaagagctggtcactatctcctctttcctgaattcttttgtgtttaagatgatctgggatggaattgtagagaacgccaagggtgagaccttggagctgttccagtctgtccacgggtggcttatggtgctgtacgagcgggactgccggcggcgcttcacccccgaggaccactggctgcgaaaggatctcaaacctagcgtgctcttccaagaactcgacagggacagaaaacgggcacagttgatcctgcagtacatcccacatgtcatccctcacaaaaacagagttctactgtttcgaaccatggttaccaaggagaaggagaaactggggctggtggaaaccagctctgcctccccgcatgtcactcacatcaccatccgccggtccaggatgctggaggacggctacgagcagcttaggcagctctcccagcacgccatgaagggggtcatccgtgtgaagtttgtcaatgacctcggggtggacgaagcagggattgatcaagacggtgtttttaaggagttcttggaagagatcatcaagagagtttttgacccagcactcaatctgttcaagacaaccagtggggatgagaggctgtacccctcacccacatcctacatccatgagaattacctgcagctcttcgagtttgtggggaagatgctggggaaggctgtgtatgagggaattgtggtggacgtgccatttgcatccttcttcctgagccaactgcttgggcaccaccacagcgtcttctatagctcggtggatgaactgccttctctggactccgagttctataaaaacctcacctccatcaagcgctatgatggggacatcactgacctgggcctgacgctgtcttacgacgaggacgtcatgggtcagcttgtttgccatgaactgattcctggagggaagaccattcctgttacaaatgaaaataaaattagctacatccatctgatggcacattttcgaatgcacactcaaataaaaaaccaaacagctgccctcattagcggattccgttccattatcaaacccgagtggatccgaatgttctcaactcctgaactgcagcgtctcatctctggcgacaatgctgagattgatctggaagatttaaagaagcacacagtctactacggtggtttccatggaagtcacagagtcatcatctggctctgggatattctggcctccgacttcacaccggatgagagagctatgtttctgaagttcgtgaccagctgctccagacccccgctcctgggattcgcctacctcaagcctccattctccatccgctgcgtggaggtgtcggacgatcaggacaccggggacactctgggcagcgtcctccggggcttcttcaccatccgcaagcgggagccaggcggccgcctgcccacctcctccacctgcttcaacctgctcaagctgcccaactacagcaagaagagcgtcctccgcgagaagctgcgctacgccatcagcatgaacacgggctttgaactctcctagctcctgtcccagccctgcctccagggctcctgggctgccagggaccttcagctcccagaggcagtgtggtcctgggaatgtgaccaacatgccaggtgacattggcccctagaccctctctatagccatgagactccttgtggcctcaagaaatttagacgcccacgacagcactacacagcatctccaggtgatgcccaaggcacagggctgcagaaaataaacctccagattccaccaacacgggtccattcttcctggtgatggcagaggggcttcttttagctagtttgatcttttgggagtctgtctttccttagccgtctgagtgagctgtgtatgaacaagtcccaggagttccaagagtctagagtggtttttgcagcatgggttgagtgtacaaagcctactgtgcgtgagatcctctccttccgtttctgaaatctcttactcaggtaaggcctcgccaagcctctatgcaccccacaaagtttctgcctccatgccgtccacagcgcctcttcccagacagccaggcccatctgctgcccagggaagcgcaggcgcctgctagggacgctatggacaccgtgagtccaaggcgctgctcctgccttgaagccacgcgctccacgccgcggccctcccattttctgcgtcctcagcgggctgagctgccagagagccttcccggacctattcccgtcctatgcattcacattggcatcctggtttgggggaagaaaaacaacggcccttagcagcagccccgtttccagaatgtgctgcctgttccccaaagcctgcttgtcccgcggaggacggctgcctttgaccctgcttatttgtctcactggttatctaatgaggaacaaacactaacctaaggtacacatcccatctgggcggtggcttcactcctgagtctgcaaaatcccaggaaacttgggtcttgctgcccatccttcctcagcacagggaacccggaagcccgttgcactgacagaggctcacaccctctgggttttttgttttttttttaaacttcatttctcttccaacccattgtgttcctctgccctcattctttacctttgttgtaagaactttagctccagggaactgaggcagaggccctgtttgtggtctgtgttgacagccacccaccctctcccacctcatgctcctgcacctgcaccaccaaggttgatgccggattcgaagccaggaaggcccagtccctcctctgctctcctcaaagacgcaaaacattttccaacaagagctgtcacagtggcagcaaagcaggggccacccgtctccacagtccttcagagtttcagctgcatcctggtgtcccacccaggtcgagcccccaggcttctggaaaacagtgtgtgctctactttgatggaaacatggcaaggaatttaaagacaggaatgtattaatattattgaaggtgtgttcgtaacctctgattctgtggacttgccactttctccaaacgctcggttcctttgaagatttcttctgaacgtgtgtgcgcacgctgggcgggttcgtgcatacatgcggggaccccagactgtcagcacagggaagatggatcccatcctaatttttatcacctgaaggttggaaccagtgagggactgggagagagtgatttataagcaccaatatcaacttcatgtggatttttgacagaggggtagtttgtaatttcatttaaattcttttcagcagctggaaatattgcactatctgaaacactgaatctccttttgtaactggtgttcactgacaccttgatggctcttgatggctctaaaaagttgtaggattttttgtttttgtagctaacttatggattgagatgtgatcaaaggctttattaaatttgtacttcagca

SEQ ID NO: 453079 - DNA, 4112 bp, Homo sapiens
gggggtaaacgggtcgactctgcagaagtccagaaggtttgcaacatctgtgtcctctaccagacctcgctgacaactctcacacagattcggctgcagatactcacaggtctcacttaccttgatgacctgcttcccaaactgtgggcacaattatggaggcctctgatccggatcttcttctgtgacatcctgagcaagaagctactggagagccaggagccagcccacgcacagccagcatcccctcagaatgtgctcccagtgaagagtctcctaaagcgtgcttttcaaaagtcggcatcagtccggaatattctcaggcctgtcgggggtaaacgggtcgactctgcagaagtccagaaggtttgcaacatctgtgtcctctaccagacctcgctgacaactctcacacagattcggctgcagatactcacaggtctcacttaccttgatgacctgcttcccaaactgtgggcatttatctgtgagctcgggccccacggagggttaaagctcttcttggaatgcctgaacaatgacactgaagagtccaagcaactcttggccatgctgatgctgttctgtgactgttcgcggcacctcatcacaatccttgatgacattgaagtttatgaagaacagatttcattcaaactggaagagctggtcactatctcctctttcctgaattcttttgtgtttaagatgatctgggatggaattgtagagaacgccaagggtgagaccttggagctgttccagtctgtccacgggtggcttatggtgctgtacgagcgggactgccggcggcgcttcacccccgaggaccactggctgcgaaaggatctcaaacctagcgtgctcttccaagaactcgacagggacagaaaacgggcacagttgatcctgcagtacatcccacatgtcatccctcacaaaaacagagttctactgtttcgaaccatggttaccaaggagaaggagaaactggggctggtggaaaccagctctgcctccccgcatgtcactcacatcaccatccgccggtccaggatgctggaggacggctacgagcagcttaggcagctctcccagcacgccatgaagggggtcatccgtgtgaagtttgtcaatgacctcggggtggacgaagcagggattgatcaagacggtgtttttaaggagttcttggaagagatcatcaagagagtttttgacccagcactcaatctgttcaagacaaccagtggggatgagaggctgtacccctcacccacatcctacatccatgagaattacctgcagctcttcgagtttgtggggaagatgctggggaaggctgtgtatgagggaattgtggtggacgtgccatttgcatccttcttcctgagccaactgcttgggcaccaccacagcgtcttctatagctcggtggatgaactgccttctctggactccgagttctataaaaacctcacctccatcaagcgctatgatggggacatcactgacctgggcctgacgctgtcttacgacgaggacgtcatgggtcagcttgtttgccatgaactgattcctggagggaagaccattcctgttacaaatgaaaataaaattagctacatccatctgatggcacattttcgaatgcacactcaaataaaaaaccaaacagctgccctcattagcggattccgttccattatcaaacccgagtggatccgaatgttctcaactcctgaactgcagcgtctcatctctggcgacaatgctgagattgatctggaagatttaaagaagcacacagtctactacggtggtttccatggaagtcacagagtcatcatctggctctgggatattctggcctccgacttcacaccggatgagagagctatgtttctgaagttcgtgaccagctgctccagacccccgctcctgggattcgcctacctcaagcctccattctccatccgctgcgtggaggtgtcggacgatcaggacaccggggacactctgggcagcgtcctccggggcttcttcaccatccgcaagcgggagccaggcggccgcctgcccacctcctccacctgcttcaacctgctcaagctgcccaactacagcaagaagagcgtcctccgcgagaagctgcgctacgccatcagcatgaacacgggctttgaactctcctagctcctgtcccagccctgcctccagggctcctgggctgccagggaccttcagctcccagaggcagtgtggtcctgggaatgtgaccaacatgccaggtgacattggcccctagaccctctctatagccatgagactccttgtggcctcaagaaatttagacgcccacgacagcactacacagcatctccaggtgatgcccaaggcacagggctgcagaaaataaacctccagattccaccaacacgggtccattcttcctggtgatggcagaggggcttcttttagctagtttgatcttttgggagtctgtctttccttagccgtctgagtgagctgtgtatgaacaagtcccaggagttccaagagtctagagtggtttttgcagcatgggttgagtgtacaaagcctactgtgcgtgagatcctctccttccgtttctgaaatctcttactcaggtaaggcctcgccaagcctctatgcaccccacaaagtttctgcctccatgccgtccacagcgcctcttcccagacagccaggcccatctgctgcccagggaagcgcaggcgcctgctagggacgctatggacaccgtgagtccaaggcgctgctcctgccttgaagccacgcgctccacgccgcggccctcccattttctgcgtcctcagcgggctgagctgccagagagccttcccggacctattcccgtcctatgcattcacattggcatcctggtttgggggaagaaaaacaacggcccttagcagcagccccgtttccagaatgtgctgcctgttccccaaagcctgcttgtcccgcggaggacggctgcctttgaccctgcttatttgtctcactggttatctaatgaggaacaaacactaacctaaggtacacatcccatctgggcggtggcttcactcctgagtctgcaaaatcccaggaaacttgggtcttgctgcccatccttcctcagcacagggaacccggaagcccgttgcactgacagaggctcacaccctctgggttttttgttttttttttaaacttcatttctcttccaacccattgtgttcctctgccctcattctttacctttgttgtaagaactttagctccagggaactgaggcagaggccctgtttgtggtctgtgttgacagccacccaccctctcccacctcatgctcctgcacctgcaccaccaaggttgatgccggattcgaagccaggaaggcccagtccctcctctgctctcctcaaagacgcaaaacattttccaacaagagctgtcacagtggcagcaaagcaggggccacccgtctccacagtccttcagagtttcagctgcatcctggtgtcccacccaggtcgagcccccaggcttctggaaaacagtgtgtgctctactttgatggaaacatggcaaggaatttaaagacaggaatgtattaatattattgaaggtgtgttcgtaacctctgattctgtggacttgccactttctccaaacgctcggttcctttgaagatttcttctgaacgtgtgtgcgcacgctgggcgggttcgtgcatacatgcggggaccccagactgtcagcacagggaagatggatcccatcctaatttttatcacctgaaggttggaaccagtgagggactgggagagagtgatttataagcaccaatatcaacttcatgtggatttttgacagaggggtagtttgtaatttcatttaaattcttttcagcagctggaaatattgcactatctgaaacactgaatctccttttgtaactggtgttcactgacaccttgatggctcttgatggctctaaaaagttgtaggattttttgtttttgtagctaacttatggattgagatgtgatcaaaggctttattaaatttgtacttcagca

SEQ ID NO: 453080 - DNA, 3993 bp, Homo sapiens
gggggtaaacgggtcgactctgcagaagtccagaaggtttgcaacatctgtgtcctctaccagacctcgctgacaactctcacacagattcggctgcagatactcacaggtctcacttaccttgatgacctgcttcccaaactgtgggcacaattatggaggcctctgatccggatcttcttctgtgacatcctgagcaagaagctactggagagccaggagccagcccacgcacagccagcatcccctcagaatgtgctcccagtgaagagtctcctaaagcgtgcttttcaaaagtcggcatcagtccggaatattctcaggcctgtcgggggtaaacgggtcgactctgcagaagtccagaaggtttgcaacatctgtgtcctctaccagacctcgctgacaactctcacacagattcggctgcagatactcacaggtctcacttaccttgatgacctgcttcccaaactgtgggcatttatctgtgagctcgggccccacggagggttaaagctcttcttggaatgcctgaacaatgacactgaagagtccaagcaactcttggccatgctgatgctgttctgtgactgttcgcggcacctcatcacagaacgccaagggtgagaccttggagctgttccagtctgtccacgggtggcttatggtgctgtacgagcgggactgccggcggcgcttcacccccgaggaccactggctgcgaaaggatctcaaacctagcgtgctcttccaagaactcgacagggacagaaaacgggcacagttgatcctgcagtacatcccacatgtcatccctcacaaaaacagagttctactgtttcgaaccatggttaccaaggagaaggagaaactggggctggtggaaaccagctctgcctccccgcatgtcactcacatcaccatccgccggtccaggatgctggaggacggctacgagcagcttaggcagctctcccagcacgccatgaagggggtcatccgtgtgaagtttgtcaatgacctcggggtggacgaagcagggattgatcaagacggtgtttttaaggagttcttggaagagatcatcaagagagtttttgacccagcactcaatctgttcaagacaaccagtggggatgagaggctgtacccctcacccacatcctacatccatgagaattacctgcagctcttcgagtttgtggggaagatgctggggaaggctgtgtatgagggaattgtggtggacgtgccatttgcatccttcttcctgagccaactgcttgggcaccaccacagcgtcttctatagctcggtggatgaactgccttctctggactccgagttctataaaaacctcacctccatcaagcgctatgatggggacatcactgacctgggcctgacgctgtcttacgacgaggacgtcatgggtcagcttgtttgccatgaactgattcctggagggaagaccattcctgttacaaatgaaaataaaattagctacatccatctgatggcacattttcgaatgcacactcaaataaaaaaccaaacagctgccctcattagcggattccgttccattatcaaacccgagtggatccgaatgttctcaactcctgaactgcagcgtctcatctctggcgacaatgctgagattgatctggaagatttaaagaagcacacagtctactacggtggtttccatggaagtcacagagtcatcatctggctctgggatattctggcctccgacttcacaccggatgagagagctatgtttctgaagttcgtgaccagctgctccagacccccgctcctgggattcgcctacctcaagcctccattctccatccgctgcgtggaggtgtcggacgatcaggacaccggggacactctgggcagcgtcctccggggcttcttcaccatccgcaagcgggagccaggcggccgcctgcccacctcctccacctgcttcaacctgctcaagctgcccaactacagcaagaagagcgtcctccgcgagaagctgcgctacgccatcagcatgaacacgggctttgaactctcctagctcctgtcccagccctgcctccagggctcctgggctgccagggaccttcagctcccagaggcagtgtggtcctgggaatgtgaccaacatgccaggtgacattggcccctagaccctctctatagccatgagactccttgtggcctcaagaaatttagacgcccacgacagcactacacagcatctccaggtgatgcccaaggcacagggctgcagaaaataaacctccagattccaccaacacgggtccattcttcctggtgatggcagaggggcttcttttagctagtttgatcttttgggagtctgtctttccttagccgtctgagtgagctgtgtatgaacaagtcccaggagttccaagagtctagagtggtttttgcagcatgggttgagtgtacaaagcctactgtgcgtgagatcctctccttccgtttctgaaatctcttactcaggtaaggcctcgccaagcctctatgcaccccacaaagtttctgcctccatgccgtccacagcgcctcttcccagacagccaggcccatctgctgcccagggaagcgcaggcgcctgctagggacgctatggacaccgtgagtccaaggcgctgctcctgccttgaagccacgcgctccacgccgcggccctcccattttctgcgtcctcagcgggctgagctgccagagagccttcccggacctattcccgtcctatgcattcacattggcatcctggtttgggggaagaaaaacaacggcccttagcagcagccccgtttccagaatgtgctgcctgttccccaaagcctgcttgtcccgcggaggacggctgcctttgaccctgcttatttgtctcactggttatctaatgaggaacaaacactaacctaaggtacacatcccatctgggcggtggcttcactcctgagtctgcaaaatcccaggaaacttgggtcttgctgcccatccttcctcagcacagggaacccggaagcccgttgcactgacagaggctcacaccctctgggttttttgttttttttttaaacttcatttctcttccaacccattgtgttcctctgccctcattctttacctttgttgtaagaactttagctccagggaactgaggcagaggccctgtttgtggtctgtgttgacagccacccaccctctcccacctcatgctcctgcacctgcaccaccaaggttgatgccggattcgaagccaggaaggcccagtccctcctctgctctcctcaaagacgcaaaacattttccaacaagagctgtcacagtggcagcaaagcaggggccacccgtctccacagtccttcagagtttcagctgcatcctggtgtcccacccaggtcgagcccccaggcttctggaaaacagtgtgtgctctactttgatggaaacatggcaaggaatttaaagacaggaatgtattaatattattgaaggtgtgttcgtaacctctgattctgtggacttgccactttctccaaacgctcggttcctttgaagatttcttctgaacgtgtgtgcgcacgctgggcgggttcgtgcatacatgcggggaccccagactgtcagcacagggaagatggatcccatcctaatttttatcacctgaaggttggaaccagtgagggactgggagagagtgatttataagcaccaatatcaacttcatgtggatttttgacagaggggtagtttgtaatttcatttaaattcttttcagcagctggaaatattgcactatctgaaacactgaatctccttttgtaactggtgttcactgacaccttgatggctcttgatggctctaaaaagttgtaggattttttgtttttgtagctaacttatggattgagatgtgatcaaaggctttattaaatttgtacttcagca

SEQ ID NO: 453081 - DNA, 3327 bp, Homo sapiens
ggccaacagactcttccctgggccctgtgctgttcagcactgtttttatagtcactgctctgaaataaaaacctcagcaccccaagtactaggaatgcattagatgatggaaccagaagccaggaaggcctcaacagattagaatcaagagacaaactaaacagatgatttagtaggagaactccaaagttgtggttctggggctgtgcatgttgaggtctggatggagtagatgtgctgaatggctgtgtcctaacagagctgaccaccagccagaagtccaggcccagcaccacccccacatctcggtctctgctccctgcgttgatccctgccatccacctgctctgctgccaatagaaagatctgacagcagccagattcaagaagtgaagagctgggcttgctccttgcaaggcacttgacctctgcctctccccgtctttttgccttgcagacaaccagtggggatgagaggctgtacccctcacccacatcctacatccatgagaattacctgcagctcttcgagtttgtggggaagatgctggggaaggctgtgtatgagggaattgtggtggacgtgccatttgcatccttcttcctgagccaactgcttgggcaccaccacagcgtcttctatagctcggtggatgaactgccttctctggactccgagttctataaaaacctcacctccatcaagcgctatgatggggacatcactgacctgggcctgacgctgtcttacgacgaggacgtcatgggtcagcttgtttgccatgaactgattcctggagggaagaccattcctgttacaaatgaaaataaaattagctacatccatctgatggcacattttcgaatgcacactcaaataaaaaaccaaacagctgccctcattagcggattccgttccattatcaaacccgagtggatccgaatgttctcaactcctgaactgcagcgtctcatctctggcgacaatgctgagattgatctggaagatttaaagaagcacacagtctactacggtggtttccatggaagtcacagagtcatcatctggctctgggatattctggcctccgacttcacaccggatgagagagctatgtttctgaagttcgtgaccagctgctccagacccccgctcctgggattcgcctacctcaagcctccattctccatccgctgcgtggaggtgtcggacgatcaggacaccggggacactctgggcagcgtcctccggggcttcttcaccatccgcaagcgggagccaggcggccgcctgcccacctcctccacctgcttcaacctgctcaagctgcccaactacagcaagaagagcgtcctccgcgagaagctgcgctacgccatcagcatgaacacgggctttgaactctcctagctcctgtcccagccctgcctccagggctcctgggctgccagggaccttcagctcccagaggcagtgtggtcctgggaatgtgaccaacatgccaggtgacattggcccctagaccctctctatagccatgagactccttgtggcctcaagaaatttagacgcccacgacagcactacacagcatctccaggtgatgcccaaggcacagggctgcagaaaataaacctccagattccaccaacacgggtccattcttcctggtgatggcagaggggcttcttttagctagtttgatcttttgggagtctgtctttccttagccgtctgagtgagctgtgtatgaacaagtcccaggagttccaagagtctagagtggtttttgcagcatgggttgagtgtacaaagcctactgtgcgtgagatcctctccttccgtttctgaaatctcttactcaggtaaggcctcgccaagcctctatgcaccccacaaagtttctgcctccatgccgtccacagcgcctcttcccagacagccaggcccatctgctgcccagggaagcgcaggcgcctgctagggacgctatggacaccgtgagtccaaggcgctgctcctgccttgaagccacgcgctccacgccgcggccctcccattttctgcgtcctcagcgggctgagctgccagagagccttcccggacctattcccgtcctatgcattcacattggcatcctggtttgggggaagaaaaacaacggcccttagcagcagccccgtttccagaatgtgctgcctgttccccaaagcctgcttgtcccgcggaggacggctgcctttgaccctgcttatttgtctcactggttatctaatgaggaacaaacactaacctaaggtacacatcccatctgggcggtggcttcactcctgagtctgcaaaatcccaggaaacttgggtcttgctgcccatccttcctcagcacagggaacccggaagcccgttgcactgacagaggctcacaccctctgggttttttgttttttttttaaacttcatttctcttccaacccattgtgttcctctgccctcattctttacctttgttgtaagaactttagctccagggaactgaggcagaggccctgtttgtggtctgtgttgacagccacccaccctctcccacctcatgctcctgcacctgcaccaccaaggttgatgccggattcgaagccaggaaggcccagtccctcctctgctctcctcaaagacgcaaaacattttccaacaagagctgtcacagtggcagcaaagcaggggccacccgtctccacagtccttcagagtttcagctgcatcctggtgtcccacccaggtcgagcccccaggcttctggaaaacagtgtgtgctctactttgatggaaacatggcaaggaatttaaagacaggaatgtattaatattattgaaggtgtgttcgtaacctctgattctgtggacttgccactttctccaaacgctcggttcctttgaagatttcttctgaacgtgtgtgcgcacgctgggcgggttcgtgcatacatgcggggaccccagactgtcagcacagggaagatggatcccatcctaatttttatcacctgaaggttggaaccagtgagggactgggagagagtgatttataagcaccaatatcaacttcatgtggatttttgacagaggggtagtttgtaatttcatttaaattcttttcagcagctggaaatattgcactatctgaaacactgaatctccttttgtaactggtgttcactgacaccttgatggctcttgatggctctaaaaagttgtaggattttttgtttttgtagctaacttatggattgagatgtgatcaaaggctttattaaatttgtacttcagca

SEQ ID NO: 453082 - DNA, 4269 bp, Homo sapiens
gaacaccgcggggcaagatggcggtagtgcgtcggctgctgccccgggtctggcagaactcgggtgttttgggctgagacagtggcagctgcggccccgaccccaagtgcggggacctccggcgaataaaggtcggcctgcgggtaggccggtagggcctgcggtccggcctgcgggagaactgggtcgtcagtcctccgagtggtggggctggggactttgagggagttggctctagggcacagtccctgcctggccaggtcggaggaacaagtgctgggatctggcgtgtgtgctccaggggctctttccgcggccctttccacctcttttcactttggggacggtaggcctttataaacggactaatgctgggtgatttgttcctgtggttgttgatgccgaggaaagactctgggccccaggactcacctaaactggagttcgaatactgttcgctcgctgtgtgaccttggaaaaaataacaagcttttctgaagtgagaagctgttctcagccacgagtcctgtgcaagatcactaatgattacctggcatttctgcgacacaggcaggtcctcagggtttgtgcaagtttgcaaacatgttcaccctgtctcagacctcgagagcatggttcatcgatagagcccgtcaggcacgagaagaaaggcttgtgcagaaggaacgggagcgggcagctgttgtgatccaggcccatgtccggagttttctctgtcggagtcgactgcagagagatatcaggagagagattgatgacttttttaaagcagatgaccctgagtccactaaaagaagtgcactttgtattttcaagattgccaggaaactgctgttcctattcagaatcaaagaggataatgagagatttgagaagttgtgtcgcagcatcctgagcagcatggatgctgagaatgagcctaaggtgtggtatgtgtccctggcttgttctaaggacctcaccctcctttggattcaacagatcaagaacattttgtggtactgctgtgattttctcaagcagctcaagcctgaaatcctgcaggactcccgactcatcaccctgtacctcacgatgcttgtcaccttcacagacacttcaacgtggaaaattcttcggggaaaaggtgaaagtcttcgaccagcgatgaaccacatttgtgcaaatataatgggacatctcaaccagcatggattttattctgtgctgcagatattgttaacccgtggcctggcaagaccccgtccttgtctatccaaaggcactttaacagcagctttttctctagcgttacgccctgtgattgctgcacagttctcagacaatctgattcggccgttcctcatccacatcatgtctgtgcctgctctggtgactcatctcagcacagtgacccctgagcgcctcactgttttagaatcccatgacatgcttcgtaaattcatcatatttttaagagaccaagatcgatgccgtgatgtatgtgaaagtttagaaggatgccatacgctttgtctaatgggcaacctcctacacttgggctccctcagccccagagtgttagaggaggagacagatgggttcgtgagtttgctcacccagacgctgtgctactgtcggaagtatgtgtctcagaagaagtccaacctgacccactggcatcctgtccttggctggttctcccaatctgtggattatggccttaacgagtcaatgcacttgatcaccaaacagctgcagttcttgtggggggtgcctctgatccggatcttcttctgtgacatcctgagcaagaagctactggagagccaggagccagcccacgcacagccagcatcccctcagaatgtgctcccagtgaagagtctcctaaagcgtgcttttcaaaagtcggcatcagtccggaatattctcaggcctgtcgggggtaaacgggtcgactctgcagaagtccagaaggtttgcaacatctgtgtcctctaccagacctcgctgacaactctcacacagattcggctgcagatactcacaggtctcacttaccttgatgacctgcttcccaaactgtgggcatttatctgtgagctcgggccccacggagggttaaagctcttcttggaatgcctgaacaatgacactgaagagtccaagcaactcttggccatgctgatgctgttctgtgactgttcgcggcacctcatcacaatccttgatgacattgaagtttatgaagaacagatttcattcaaactggaagagctggtcactatctcctctttcctgaattcttttgtgtttaagatgatctgggatggaattgtagagaacgccaagggtgagaccttggagctgttccagtctgtccacgggtggcttatggtgctgtacgagcgggactgccggcggcgcttcacccccgaggaccactggctgcgaaaggatctcaaacctagcgtgctcttccaagaactcgacagggacagaaaacgggcacagttgatcctgcagtacatcccacatgtcatccctcacaaaaacagagttctactgtttcgaaccatggttaccaaggagaaggagaaactggggctggtggaaaccagctctgcctccccgcatgtcactcacatcaccatccgccggtccaggatgctggagagcttgtttgagtgcccctggccactggtgatcaatgccgagagctgctaggaaggcagtgtgtgctgaacagtggatgtttctgacattcttcaaggacggctacgagcagcttaggcagctctcccagcacgccatgaagggggtcatccgtgtgaagtttgtcaatgacctcggggtggacgaagcagggattgatcaagacggtgtttttaaggagttcttggaagagatcatcaagagagtttttgacccagcactcaatctgttcaagacaaccagtggggatgagaggctgtacccctcacccacatcctacatccatgagaattacctgcagctcttcgagtttgtggggaagatgctggggaaggctgtgtatgagggaattgtggtggacgtgccatttgcatccttcttcctgagccaactgcttgggcaccaccacagcgtcttctatagctcggtggatgaactgccttctctggactccgagttctataaaaacctcacctccatcaagcgctatgatggggacatcactgacctgggcctgacgctgtcttacgacgaggacgtcatgggtcagcttgtttgccatgaactgattcctggagggaagaccattcctgttacaaatgaaaataaaattagctacatccatctgatggcacattttcgaatgcacactcaaataaaaaaccaaacagctgccctcattagcggattccgttccattatcaaacccgagtggatccgaatgttctcaactcctgaactgcagcgtctcatctctggcgacaatgctgagattgatctggaagatttaaagaagcacacagtctactacggtggtttccatggaagtcacagagtcatcatctggctctgggatattctggcctccgacttcacaccggatgagagagctatgtttctgaagttcgtgaccagctgctccagacccccgctcctgggattcgcctacctcaagcctccattctccatccgctgcgtggaggtgtcggacgatcaggacaccggggacactctgggcagcgtcctccggggcttcttcaccatccgcaagcgggagccaggcggccgcctgcccacctcctccacctgcttcaacctgctcaagctgcccaactacagcaagaagagcgtcctccgcgagaagctgcgctacgccatcagcatgaacacgggctttgaactctcctagctcctgtcccagccctgcctccagggctcctgggctgccagggaccttcagctcccagaggcagtgtggtcctgggaatgtgaccaacatgccaggtgacattggcccctagaccctctctatagccatgagactccttgtggcctcaagaaatttagacgcccacgacagcactacacagcatctccaggtgatgcccaaggcacagggctgcagaaaataaacctccagattccaaaaaaaaaaaaaaaaaaaaaaaaaagggtattggaagcaagtcggacccattgccgttggtcccttctgcctcttcatatttgacatgtgtgagagaggggtacaactcacgaatcccttctaca

SEQ ID NO: 453083 - DNA, 2552 bp, Homo sapiens
ccgtcctactctactccgaaatgccaacacattcccctccatgacatcccgaagtcttaatacaaatgtttgaacaaggattgggtgagaaaaaaaccttttgtattgatcatgcagggtctgcttgttgatatttcagccttgactttttatgagaaaggatggttcccaagcatgtgccatcttaattccatcattatcatggatgtttgtgctgggccctctcatctccgggaagctttatttccccattagagtcctccctattaattactcccatcttctcccccagcttgtttgccatgaactgattcctggagggaagaccattcctgttacaaatgaaaataattcgtgaccagctgctccagacccccgctcctgggattcgcctacctcaagcctccattctccatccgctgcgtggaggtgtcggacgatcaggacaccggggacactctgggcagcgtcctccggggcttcttcaccatccgcaagcgggagccaggcggccgcctgcccacctcctccacctgcttcaacctgctcaagctgcccaactacagcaagaagagcgtcctccgcgagaagctgcgctacgccatcagcatgaacacgggctttgaactctcctagctcctgtcccagccctgcctccagggctcctgggctgccagggaccttcagctcccagaggcagtgtggtcctgggaatgtgaccaacatgccaggtgacattggcccctagaccctctctatagccatgagactccttgtggcctcaagaaatttagacgcccacgacagcactacacagcatctccaggtgatgcccaaggcacagggctgcagaaaataaacctccagattccaccaacacgggtccattcttcctggtgatggcagaggggcttcttttagctagtttgatcttttgggagtctgtctttccttagccgtctgagtgagctgtgtatgaacaagtcccaggagttccaagagtctagagtggtttttgcagcatgggttgagtgtacaaagcctactgtgcgtgagatcctctccttccgtttctgaaatctcttactcaggtaaggcctcgccaagcctctatgcaccccacaaagtttctgcctccatgccgtccacagcgcctcttcccagacagccaggcccatctgctgcccagggaagcgcaggcgcctgctagggacgctatggacaccgtgagtccaaggcgctgctcctgccttgaagccacgcgctccacgccgcggccctcccattttctgcgtcctcagcgggctgagctgccagagagccttcccggacctattcccgtcctatgcattcacattggcatcctggtttgggggaagaaaaacaacggcccttagcagcagccccgtttccagaatgtgctgcctgttccccaaagcctgcttgtcccgcggaggacggctgcctttgaccctgcttatttgtctcactggttatctaatgaggaacaaacactaacctaaggtacacatcccatctgggcggtggcttcactcctgagtctgcaaaatcccaggaaacttgggtcttgctgcccatccttcctcagcacagggaacccggaagcccgttgcactgacagaggctcacaccctctgggttttttgttttttttttaaacttcatttctcttccaacccattgtgttcctctgccctcattctttacctttgttgtaagaactttagctccagggaactgaggcagaggccctgtttgtggtctgtgttgacagccacccaccctctcccacctcatgctcctgcacctgcaccaccaaggttgatgccggattcgaagccaggaaggcccagtccctcctctgctctcctcaaagacgcaaaacattttccaacaagagctgtcacagtggcagcaaagcaggggccacccgtctccacagtccttcagagtttcagctgcatcctggtgtcccacccaggtcgagcccccaggcttctggaaaacagtgtgtgctctactttgatggaaacatggcaaggaatttaaagacaggaatgtattaatattattgaaggtgtgttcgtaacctctgattctgtggacttgccactttctccaaacgctcggttcctttgaagatttcttctgaacgtgtgtgcgcacgctgggcgggttcgtgcatacatgcggggaccccagactgtcagcacagggaagatggatcccatcctaatttttatcacctgaaggttggaaccagtgagggactgggagagagtgatttataagcaccaatatcaacttcatgtggatttttgacagaggggtagtttgtaatttcatttaaattcttttcagcagctggaaatattgcactatctgaaacactgaatctccttttgtaactggtgttcactgacaccttgatggctcttgatggctctaaaaagttgtaggattttttgtttttgtagctaacttatggattgagatgtgatcaaaggctttattaaatttgtacttcagca

SEQ ID NO: 453084 - DNA, 3688 bp, Homo sapiens
gaacaccgcggggcaagatggcggtagtgcgtcggctgctgccccgggtctggcagaactcgggtgttttgggctgagacagtggcagctgcggccccgaccccaagtgcggggacctccggcgaataaaggtcggcctgcgggtaggccggtagggcctgcggtccggcctgcgggagaactgggtcgtcagtcctccgagtggtggggctggggactttgagggagttggctctagggcacagtccctgcctggccaggtcggaggaacaagtgctgggatctggcgtgtgtgctccaggggctctttccgcggccctttccacctcttttcactttggggacggtaggcctttataaacggactaatgctgggtgatttgttcctgtggttgttgatgccgaggaaagactctgggccccaggactcacctaaactggagttcgaatactgttcgctcgctgtgtgaccttggaaaaaataacaagcttttctgaagtgagaagctgttctcagccacgagtcctgtgcaagatcactaatgattacctggcatttctgcgacacaggcaggtcctcagggtttgtgcaagtttgcaaacatgttcaccctgtctcagacctcgagagcatggttcatcgatagagcccgtcaggcacgagaagaaaggcttgtgcagaaggaacgggagcgggcagctgttgtgatccaggcccatgtccggagttttctctgtcggagtcgactgcagagagatatcaggagagagattgatgacttttttaaagcagatgaccctgagtccactaaaagaagtgcactttgtattttcaagattgccaggaaactgctgttcctattcagaatcaaagaggataatgagagatttgagaagttgtgtcgcagcatcctgagcagcatggatgctgagaatgagcctaaggtgtggtatgtgtccctggcttgttctaaggacctcaccctcctttggattcaacagatcaagaacattttgtggtactgctgtgattttctcaagcagctcaagcctgaaatcctgcaggactcccgactcatcaccctgtacctcacgatgcttgtcaccttcacagacacttcaacgtggaaaattcttcggggaaaaggtgaaagtcttcgaccagcgatgaaccacatttgtgcaaatataatgggacatctcaaccagcatggattttattctgtgctgcagtgctgtgatgggctgtttcctgatttggtttcatatgctcctcacaacaaccctgtgaggtggtccgttggcagaagctggtatgactggcagttgtctcgctagaggaaccttctacttcataccataattaaacggcttctaaaataatatgatgtctttaaattttaagtctggcattatttgtattagctgtttttttaactttattattaaagaatttctaaccataatatttagagaaagagtggtagagttaacctcgttacccaatactttcttccctttccttttataaaaacactgcatacggttttttgtttttttgtttttttgttttttttttaagagacagggttgccctgtcacccaggctggcctcaaggaatcttcctgcctcagcctcctgagctgggactgtaggtacaagccaccatgcctggctcacaatacagtttttttatctgaagcactcagtttacttttttgctcttttatgtacaaatgaatataaagttgatatcatcctctgaccaattaaaacattcttttcagatattgttaacccgtggcctggcaagaccccgtccttgtctatccaaaggcactttaacagcagctttttctctagcgttacgccctgtgattgctgcacagttctcagacaatctgattcggccgttcctcatccacatcatgtctgtgcctgctctggtgactcatctcagcacagtgacccctgagcgcctcactgttttagaatcccatgacatgcttcgtaaattcatcatatttttaagagaccaagatcgatgccgtgatgtatgtgaaagtttagaaggatgccatacgctttgtctaatgggcaacctcctacacttgggctccctcagccccagagtgttagaggaggagacagatgggttcgtgagtttgctcacccagacgctgtgctactgtcggaagtatgtgtctcagaagaagtccaacctgacccactggcatcctgtccttggctggttctcccaatctgtggattatggccttaacgagtcaatgcacttgatcaccaaacagctgcagttcttgtggggggtgcctctgatccggatcttcttctgtgacatcctgagcaagaagctactggagagccaggagccagcccacgcacagccagcatcccctcagaatgtgctcccagtgaagagtctcctaaagcgtgcttttcaaaagtcggcatcagtccggaatattctcaggcctgtcgggggtaaacgggtcgactctgcagaagtccagaaggtttgcaacatctgtgtcctctaccagacctcgctgacaactctcacacagattcggctgcagatactcacaggtctcacttaccttgatgacctgcttcccaaactgtgggcatttatctgtgagctcgggccccacggagggttaaagctcttcttggaatgcctgaacaatgacactgaagagtccaagcaactcttggccatgctgatgctgttctgtgactgttcgcggcacctcatcacaatccttgatgacattgaagtttatgaagaacagatttcattcaaactggaagagctggtcactatctcctctttcctgaattcttttgtgtttaagatgatctgggatggaattgtagagaacgccaagggtgagaccttggagctgttccagtctgtccacgggtggcttatggtgctgtacgagcgggactgccggcggcgcttcacccccgaggaccactggctgcgaaaggatctcaaacctagcgtgctcttccaagaactcgacagggacagaaaacgggcacagttgatcctgcagtacatcccacatgtcatccctcacaaaaacagagttctactgtttcgaaccatggttaccaaggagaaggagaaactggggctggtggaaaccagctctgcctccccgcatgtcactcacatcaccatccgccggtccaggatgctggaggacggctacgagcagcttaggcagctctcccagcacgccatgaagggggtcatccgtgtgaagtttgtcaatgacctcggggtggacgaagcagggattgatcaagacggtgtttttaaggagttcttggaagagatcatcaagagagtttttgacccagcactcaatctgttcaagacaaccagtggggatgagaggctgtacccctcacccacatcctacatccatgagaattacctgcagctcttcgagtttgtggggaagatgctggggaaggctgtgtatgaggtaggaacgttaagaaacagagaaatgtaaaataaaatgttaacggtaccatgggcttcttcacatacacatatgtgatcaggcttggccatgtaaactgtcactaggatacaagcgaggacaggggcaggaaccaaggtttgttgtacaccagtgctaggtactt

SEQ ID NO: 453085 - DNA, 1377 bp, Homo sapiens
gaacaccgcggggcaagatggcggtagtgcgtcggctgctgccccgggtctggcagaactcgggtgttttgggctgagacagtggcagctgcggccccgaccccaagtgcggggacctccggcgaataaaggtcggcctgcgggtaggccggtagggcctgcggtccggcctgcgggagaactgggtcgtcagtcctccgagtggtggggctggggactttgagggagttggctctagggcacagtccctgcctggccaggtcggaggaacaagtgctgggatctggcgtgtgtgctccaggggctctttccgcggccctttccacctcttttcactttggggacggtaggcctttataaacggactaatgctgggtgatttgttcctgtggttgttgatgccgaggaaagactctgggccccaggactcacctaaactggagttcgaatactgttcgctcgctgtgtgaccttggaaaaaataacaagcttttctgaagtgagaagctgttctcagccacgagtcctgtgcaagatcactaatgattacctggcatttctgcgacacaggcaggtcctcagggtttgtgcaagtttgcaaacatgttcaccctgtctcagacctcgagagcatggttcatcgatagagcccgtcaggcacgagaagaaaggcttgtgcagaaggaacgggagcgggcagctgttgtgatccaggcccatgtccggagttttctctgtcggagtcgactgcagagagatatcaggagagagattgatgacttttttaaagcagatgaccctgagtccactaaaagaagtgcactttgtattttcaagattgccaggaaactgctgttcctattcagaatcaaagaggataatgagagatttgagaagttgtgtcgcagcatcctgagcagcatggatgctgagaatgagcctaaggtgtggtatgtgtccctggcttgttctaaggacctcaccctcctttggattcaacagatcaagaacattttgtggtactgctgtgattttctcaagcagctcaagcctgaaatcctgcaggactcccgactcatcaccctgtacctcacgatgcttgtcaccttcacagacacttcaacgtggaaaattcttcggggaaaaggtgaaagtcttcgaccagcgatgaaccacatttgtgcaaatataatgggacatctcaaccagcatggattttattctgtgctgcagtgctgtgatgggctgtttcctgatttggtttcatatgctcctcacaacaaccctgtgaggtggtccgttggcagaagctggtatgactggcagttgtctcgctagaggaaccttctacttcataccataattaaacggcttcta

SEQ ID NO: 453086 - DNA, 1864 bp, Homo sapiens
gaacaccgcggggcaagatggcggtagtgcgtcggctgctgccccgggtctggcagaactcgggtgttttgggctgagacagtggcagctgcggccccgaccccaagtgcggggacctccggcgaataaaggtcggcctgcgggtaggccggtagggcctgcggtccggcctgcgggagaactgggtcgtcagtcctccgagtggtggggctggggactttgagggagttggctctagggcacagtccctgcctggccaggtcggaggaacaagtgctgggatctggcgtgtgtgctccaggggctctttccgcggccctttccacctcttttcactttggggacggtaggcctttataaacggactaatgctgggtgatttgttcctgtggttgttgatgccgaggaaagactctgggccccaggactcacctaaactggagttcgaatactgttcgctcgctgtgtgaccttggaaaaaataacaagcttttctgaagtgagaagctgttctcagccacgagtcctgtgcaagatcactaatgattacctggcatttctgcgacacaggcaggtcctcagggtttgtgcaagtttgcaaacatgttcaccctgtctcagacctcgagagcatggttcatcgatagagcccgtcaggcacgagaagaaaggcttgtgcagaaggaacgggagcgggcagctgttgtgatccaggcccatgtccggagttttctctgtcggagtcgactgcagagagatatcaggagagagattgatgacttttttaaagcagatgaccctgagtccactaaaagaagtgcactttgtattttcaagattgccaggaaactgctgttcctattcagaatcaaagaggataatgagagatttgagaagttgtgtcgcagcatcctgagcagcatggatgctgagaatgagcctaaggtgtggtatgtgtccctggcttgttctaaggacctcaccctcctttggattcaacagatcaagaacattttgtggtactgctgtgattttctcaagcagctcaagcctgaaatcctgcaggactcccgactcatcaccctgtacctcacgatgcttgtcaccttcacagacacttcaacgtggaaaattcttcggggaaaaggtgaaagtcttcgaccagcgatgaaccacatttgtgcaaatataatgggacatctcaaccagcatggattttattctgtgctgcagaggtctgtgactcctgccccccagtgtgcaacttctccactctccaacacctgcacttggatttttacatttgcattcagcatacctggtgtcctcctcagaaacacttttcataggaagagcttgatgcctgctgtcctcttcttccttcccctgccttgtctcacttgtgggtcaggtaaagggaggacagtggtgctgggatcccttgaatgctctacatttttggctgcaagggtaatccagtcttttgacatttaaactctggaaggagacctcagggcttgttccctcagattccttcttggttgatgtctagaatcatatttctagctctgtgtcctcaaacagccctttccactttgtaccttgttgtgccagatcatacctctagggaattgttgagaaagcctgattgctgtttaaaggtacaatggaagtcttgagtttgagaagtaatgttgactttgcccttccttctccctagtgctgtgatgggctgtttcctgatttggtttcatatgctcctcacaacaaccctgtgaggtggtccgttggcagaagctggtatgactggcagttgtctcgctagaggaaccttctacttcataccataattaaacggcttcta

SEQ ID NO: 453087 - DNA, 5726 bp, Homo sapiens
gaacaccgcggggcaagatggcggtagtgcgtcggctgctgccccgggtctggcagaactcgggtgttttgggctgagacagtggcagctgcggccccgaccccaagtgcggggacctccggcgaataaaggtcggcctgcgggtaggccggtagggcctgcggtccggcctgcgggagaactgggtcgtcagtcctccgagtggtggggctggggactttgagggagttggctctagggcacagtccctgcctggccaggtcggaggaacaagtgctgggatctggcgtgtgtgctccaggggctctttccgcggccctttccacctcttttcactttggggacggtaggcctttataaacggactaatgctgggtgatttgttcctgtggttgttgatgccgaggaaagactctgggccccaggactcacctaaactggagttcgaatactgttcgctcgctgtgtgaccttggaaaaaataacaagcttttctgaagtgagaagctgttctcagccacgagtcctgtgcaagatcactaatgattacctggcatttctgcgacacaggcaggtcctcagggtttgtgcaagtttgcaaacatgttcaccctgtctcagacctcgagagcatggttcatcgatagagcccgtcaggcacgagaagaaaggcttgtgcagaaggaacgggagcgggcagctgttgtgatccaggcccatgtccggagttttctctgtcggagtcgactgcagagagatatcaggagagagattgatgacttttttaaagcagatgaccctgagtccactaaaagaagtgcactttgtattttcaagattgccaggaaactgctgttcctattcagaatcaaagaggataatgagagatttgagaagttgtgtcgcagcatcctgagcagcatggatgctgagaatgagcctaaggtgtggtatgtgtccctggcttgttctaaggacctcaccctcctttggattcaacagatcaagaacattttgtggtactgctgtgattttctcaagcagctcaagcctgaaatcctgcaggactcccgactcatcaccctgtacctcacgatgcttgtcaccttcacagacacttcaacgtggaaaattcttcggggaaaaggtgaaagtcttcgaccagcgatgaaccacatttgtgcaaatataatgggacatctcaaccagcatggattttattctgtgctgcagatattgttaacccgtggcctggcaagaccccgtccttgtctatccaaaggcactttaacagcagctttttctctagcgttacgccctgtgattgctgcacagttctcagacaatctgattcggccgttcctcatccacatcatgtctgtgcctgctctggtgactcatctcagcacagtgacccctgagcgcctcactgttttagaatcccatgacatgcttcgtaaattcatcatatttttaagagaccaagatcgatgccgtgatgtatgtgaaagtttagaaggatgccatacgctttgtctaatgggcaacctcctacacttgggctccctcagccccagagtgttagaggaggagacagatgggttcgtgagtttgctcacccagacgctgtgctactgtcggaagtatgtgtctcagaagaagtccaacctgacccactggcatcctgtccttggctggttctcccaatctgtggattatggccttaacgagtcaatgcacttgatcaccaaacagctgcagttcttgtggggggtgcctctgatccggatcttcttctgtgacatcctgagcaagaagctactggagagccaggagccagcccacgcacagccagcatcccctcagaatgtgctcccagtgaagagtctcctaaagcgtgcttttcaaaagtcggcatcagtccggaatattctcaggcctgtcgggggtaaacgggtcgactctgcagaagtccagaaggtttgcaacatctgtgtcctctaccagacctcgctgacaactctcacacagattcggctgcagatactcacaggtctcacttaccttgatgacctgcttcccaaactgtgggcatttatctgtgagctcgggccccacggagggttaaagctcttcttggaatgcctgaacaatgacactgaagagtccaagcaactcttggccatgctgatgctgttctgtgactgttcgcggcacctcatcacaatccttgatgacattgaagtttatgaagaacagatttcattcaaactggaagagctggtcactatctcctctttcctgaattcttttgtgtttaagatgatctgggatggaattgtagagaacgccaagggtgagaccttggagctgttccagtctgtccacgggtggcttatggtgctgtacgagcgggactgccggcggcgcttcacccccgaggaccactggctgcgaaaggatctcaaacctagcgtgctcttccaagaactcgacagggacagaaaacgggcacagttgatcctgcagtacatcccacatgtcatccctcacaaaaacagagttctactgtttcgaaccatggttaccaaggagaaggagaaactggggctggtggaaaccagctctgcctccccgcatgtcactcacatcaccatccgccggtccaggatgctggaggacggctacgagcagcttaggcagctctcccagcacgccatgaagggggtcatccgtgtgaagtttgtcaatgacctcggggtggacgaagcagggattgatcaagacggtgtttttaaggagttcttggaagagatcatcaagagagtttttgacccagcactcaatctgttcaagacaaccagtggggatgagaggctgtacccctcacccacatcctacatccatgagaattacctgcagctcttcgagtttgtggggaagatgctggggaaggctgtgtatgagggaattgtggtggacgtgccatttgcatccttcttcctgagccaactgcttgggcaccaccacagcgtcttctatagctcggtggatgaactgccttctctggactccgagttctataaaaacctcacctccatcaagcgctatgatggggacatcactgacctgggcctgacgctgtcttacgacgaggacgtcatgggtcagcttgtttgccatgaactgattcctggagggaagaccattcctgttacaaatgaaaataaaattagctacatccatctgatggcacattttcgaatgcacactcaaataaaaaaccaaacagctgccctcattagcggattccgttccattatcaaacccgagtggatccgaatgttctcaactcctgaactgcagcgtctcatctctggcgacaatgctgagattgatctggaagatttaaagaagcacacagtctactacggtggtttccatggaagtcacagagtcatcatctggctctgggatattctggcctccgacttcacaccggatgagagagctatgtttctgaagttcgtgaccagctgctccagacccccgctcctgggattcgcctacctcaagcctccattctccatccgctgcgtggaggtgtcggacgatcaggacaccggggacactctgggcagcgtcctccggggcttcttcaccatccgcaagcgggagccaggcggccgcctgcccacctcctccacctgcttcaacctgctcaagctgcccaactacagcaagaagagcgtcctccgcgagaagctgcgctacgccatcagcatgaacacgggctttgaactctcctagctcctgtcccagccctgcctccagggctcctgggctgccagggaccttcagctcccagaggcagtgtggtcctgggaatgtgaccaacatgccaggtgacattggcccctagaccctctctatagccatgagactccttgtggcctcaagaaatttagacgcccacgacagcactacacagcatctccaggtgatgcccaaggcacagggctgcagaaaataaacctccagattccaccaacacgggtccattcttcctggtgatggcagaggggcttcttttagctagtttgatcttttgggagtctgtctttccttagccgtctgagtgagctgtgtatgaacaagtcccaggagttccaagagtctagagtggtttttgcagcatgggttgagtgtacaaagcctactgtgcgtgagatcctctccttccgtttctgaaatctcttactcaggtaaggcctcgccaagcctctatgcaccccacaaagtttctgcctccatgccgtccacagcgcctcttcccagacagccaggcccatctgctgcccagggaagcgcaggcgcctgctagggacgctatggacaccgtgagtccaaggcgctgctcctgccttgaagccacgcgctccacgccgcggccctcccattttctgcgtcctcagcgggctgagctgccagagagccttcccggacctattcccgtcctatgcattcacattggcatcctggtttgggggaagaaaaacaacggcccttagcagcagccccgtttccagaatgtgctgcctgttccccaaagcctgcttgtcccgcggaggacggctgcctttgaccctgcttatttgtctcactggttatctaatgaggaacaaacactaacctaaggtacacatcccatctgggcggtggcttcactcctgagtctgcaaaatcccaggaaacttgggtcttgctgcccatccttcctcagcacagggaacccggaagcccgttgcactgacagaggctcacaccctctgggttttttgttttttttttaaacttcatttctcttccaacccattgtgttcctctgccctcattctttacctttgttgtaagaactttagctccagggaactgaggcagaggccctgtttgtggtctgtgttgacagccacccaccctctcccacctcatgctcctgcacctgcaccaccaaggttgatgccggattcgaagccaggaaggcccagtccctcctctgctctcctcaaagacgcaaaacattttccaacaagagctgtcacagtggcagcaaagcaggggccacccgtctccacagtccttcagagtttcagctgcatcctggtgtcccacccaggtcgagcccccaggcttctggaaaacagtgtgtgctctactttgatggaaacatggcaaggaatttaaagacaggaatgtattaatattattgaaggtgtgttcgtaacctctgattctgtggacttgccactttctccaaacgctcggttcctttgaagatttcttctgaacgtgtgtgcgcacgctgggcgggttcgtgcatacatgcggggaccccagactgtcagcacagggaagatggatcccatcctaatttttatcacctgaaggttggaaccagtgagggactgggagagagtgatttataagcaccaatatcaacttcatgtggatttttgacagaggggtagtttgtaatttcatttaaattcttttcagcagctggaaatattgcactatctgaaacactgaatctccttttgtaactggtgttcactgacaccttgatggctcttgatggctctaaaaagttgtaggattttttgtttttgtagctaacttatggattgagatgtgatcaaaggctttattaaatttgtacttcagca

SEQ ID NO: 453088 - DNA, 5381 bp, Homo sapiens
gaacaccgcggggcaagatggcggtagtgcgtcggctgctgccccgggtctggcagaactcgggtgttttgggctgagacagtggcagctgcggccccgaccccaagtgcggggacctccggcgaataaagaaaaaataacaagcttttctgaagtgagaagctgttctcagccacgagtcctgtgcaagatcactaatgattacctggcatttctgcgacacaggcaggtcctcagggtttgtgcaagtttgcaaacatgttcaccctgtctcagacctcgagagcatggttcatcgatagagcccgtcaggcacgagaagaaaggcttgtgcagaaggaacgggagcgggcagctgttgtgatccaggcccatgtccggagttttctctgtcggagtcgactgcagagagatatcaggagagagattgatgacttttttaaagcagatgaccctgagtccactaaaagaagtgcactttgtattttcaagattgccaggaaactgctgttcctattcagaatcaaagaggataatgagagatttgagaagttgtgtcgcagcatcctgagcagcatggatgctgagaatgagcctaaggtgtggtatgtgtccctggcttgttctaaggacctcaccctcctttggattcaacagatcaagaacattttgtggtactgctgtgattttctcaagcagctcaagcctgaaatcctgcaggactcccgactcatcaccctgtacctcacgatgcttgtcaccttcacagacacttcaacgtggaaaattcttcggggaaaaggtgaaagtcttcgaccagcgatgaaccacatttgtgcaaatataatgggacatctcaaccagcatggattttattctgtgctgcagatattgttaacccgtggcctggcaagaccccgtccttgtctatccaaaggcactttaacagcagctttttctctagcgttacgccctgtgattgctgcacagttctcagacaatctgattcggccgttcctcatccacatcatgtctgtgcctgctctggtgactcatctcagcacagtgacccctgagcgcctcactgttttagaatcccatgacatgcttcgtaaattcatcatatttttaagagaccaagatcgatgccgtgatgtatgtgaaagtttagaaggatgccatacgctttgtctaatgggcaacctcctacacttgggctccctcagccccagagtgttagaggaggagacagatgggttcgtgagtttgctcacccagacgctgtgctactgtcggaagtatgtgtctcagaagaagtccaacctgacccactggcatcctgtccttggctggttctcccaatctgtggattatggccttaacgagtcaatgcacttgatcaccaaacagctgcagttcttgtggggggtgcctctgatccggatcttcttctgtgacatcctgagcaagaagctactggagagccaggagccagcccacgcacagccagcatcccctcagaatgtgctcccagtgaagagtctcctaaagcgtgcttttcaaaagtcggcatcagtccggaatattctcaggcctgtcgggggtaaacgggtcgactctgcagaagtccagaaggtttgcaacatctgtgtcctctaccagacctcgctgacaactctcacacagattcggctgcagatactcacaggtctcacttaccttgatgacctgcttcccaaactgtgggcatttatctgtgagctcgggccccacggagggttaaagctcttcttggaatgcctgaacaatgacactgaagagtccaagcaactcttggccatgctgatgctgttctgtgactgttcgcggcacctcatcacaatccttgatgacattgaagtttatgaagaacagatttcattcaaactggaagagctggtcactatctcctctttcctgaattcttttgtgtttaagatgatctgggatggaattgtagagaacgccaagggtgagaccttggagctgttccagtctgtccacgggtggcttatggtgctgtacgagcgggactgccggcggcgcttcacccccgaggaccactggctgcgaaaggatctcaaacctagcgtgctcttccaagaactcgacagggacagaaaacgggcacagttgatcctgcagtacatcccacatgtcatccctcacaaaaacagagttctactgtttcgaaccatggttaccaaggagaaggagaaactggggctggtggaaaccagctctgcctccccgcatgtcactcacatcaccatccgccggtccaggatgctggaggacggctacgagcagcttaggcagctctcccagcacgccatgaagggggtcatccgtgtgaagtttgtcaatgacctcggggtggacgaagcagggattgatcaagacggtgtttttaaggagttcttggaagagatcatcaagagagtttttgacccagcactcaatctgttcaagacaaccagtggggatgagaggctgtacccctcacccacatcctacatccatgagaattacctgcagctcttcgagtttgtggggaagatgctggggaaggctgtgtatgagggaattgtggtggacgtgccatttgcatccttcttcctgagccaactgcttgggcaccaccacagcgtcttctatagctcggtggatgaactgccttctctggactccgagttctataaaaacctcacctccatcaagcgctatgatggggacatcactgacctgggcctgacgctgtcttacgacgaggacgtcatgggtcagcttgtttgccatgaactgattcctggagggaagaccattcctgttacaaatgaaaataaaattagctacatccatctgatggcacattttcgaatgcacactcaaataaaaaaccaaacagctgccctcattagcggattccgttccattatcaaacccgagtggatccgaatgttctcaactcctgaactgcagcgtctcatctctggcgacaatgctgagattgatctggaagatttaaagaagcacacagtctactacggtggtttccatggaagtcacagagtcatcatctggctctgggatattctggcctccgacttcacaccggatgagagagctatgtttctgaagttcgtgaccagctgctccagacccccgctcctgggattcgcctacctcaagcctccattctccatccgctgcgtggaggtgtcggacgatcaggacaccggggacactctgggcagcgtcctccggggcttcttcaccatccgcaagcgggagccaggcggccgcctgcccacctcctccacctgcttcaacctgctcaagctgcccaactacagcaagaagagcgtcctccgcgagaagctgcgctacgccatcagcatgaacacgggctttgaactctcctagctcctgtcccagccctgcctccagggctcctgggctgccagggaccttcagctcccagaggcagtgtggtcctgggaatgtgaccaacatgccaggtgacattggcccctagaccctctctatagccatgagactccttgtggcctcaagaaatttagacgcccacgacagcactacacagcatctccaggtgatgcccaaggcacagggctgcagaaaataaacctccagattccaccaacacgggtccattcttcctggtgatggcagaggggcttcttttagctagtttgatcttttgggagtctgtctttccttagccgtctgagtgagctgtgtatgaacaagtcccaggagttccaagagtctagagtggtttttgcagcatgggttgagtgtacaaagcctactgtgcgtgagatcctctccttccgtttctgaaatctcttactcaggtaaggcctcgccaagcctctatgcaccccacaaagtttctgcctccatgccgtccacagcgcctcttcccagacagccaggcccatctgctgcccagggaagcgcaggcgcctgctagggacgctatggacaccgtgagtccaaggcgctgctcctgccttgaagccacgcgctccacgccgcggccctcccattttctgcgtcctcagcgggctgagctgccagagagccttcccggacctattcccgtcctatgcattcacattggcatcctggtttgggggaagaaaaacaacggcccttagcagcagccccgtttccagaatgtgctgcctgttccccaaagcctgcttgtcccgcggaggacggctgcctttgaccctgcttatttgtctcactggttatctaatgaggaacaaacactaacctaaggtacacatcccatctgggcggtggcttcactcctgagtctgcaaaatcccaggaaacttgggtcttgctgcccatccttcctcagcacagggaacccggaagcccgttgcactgacagaggctcacaccctctgggttttttgttttttttttaaacttcatttctcttccaacccattgtgttcctctgccctcattctttacctttgttgtaagaactttagctccagggaactgaggcagaggccctgtttgtggtctgtgttgacagccacccaccctctcccacctcatgctcctgcacctgcaccaccaaggttgatgccggattcgaagccaggaaggcccagtccctcctctgctctcctcaaagacgcaaaacattttccaacaagagctgtcacagtggcagcaaagcaggggccacccgtctccacagtccttcagagtttcagctgcatcctggtgtcccacccaggtcgagcccccaggcttctggaaaacagtgtgtgctctactttgatggaaacatggcaaggaatttaaagacaggaatgtattaatattattgaaggtgtgttcgtaacctctgattctgtggacttgccactttctccaaacgctcggttcctttgaagatttcttctgaacgtgtgtgcgcacgctgggcgggttcgtgcatacatgcggggaccccagactgtcagcacagggaagatggatcccatcctaatttttatcacctgaaggttggaaccagtgagggactgggagagagtgatttataagcaccaatatcaacttcatgtggatttttgacagaggggtagtttgtaatttcatttaaattcttttcagcagctggaaatattgcactatctgaaacactgaatctccttttgtaactggtgttcactgacaccttgatggctcttgatggctctaaaaagttgtaggattttttgtttttgtagctaacttatggattgagatgtgatcaaaggctttattaaatttgtacttcagca

SEQ ID NO: 453089 - DNA, 6281 bp, Homo sapiens
gaacaccgcggggcaagatggcggtagtgcgtcggctgctgccccgggtctggcagaactcgggtgttttgggctgagacagtggcagctgcggccccgaccccaagtgcggggacctccggcgaataaaggtcggcctgcgggtaggccggtagggcctgcggtccggcctgcgggagaactgggtcgtcagtcctccgagtggtggggctggggactttgagggagttggctctagggcacagtccctgcctggccaggtcggaggaacaagtgctgggatctggcgtgtgtgctccaggggctctttccgcggccctttccacctcttttcactttggggacggtaggcctttataaacggactaatgctgggtgatttgttcctgtggttgttgatgccgaggaaagactctgggccccaggactcacctaaactggagttcgaatactgttcgctcgctgtgtgaccttggaaaaaataacaagcttttctgaagtgagaagctgttctcagccacgagtcctgtgcaagatcactaatgattacctggcatttctgcgacacaggcaggtcctcagggtttgtgcaagtttgcaaacatgttcaccctgtctcagacctcgagagcatggttcatcgatagagcccgtcaggcacgagaagaaaggcttgtgcagaaggaacgggagcgggcagctgttgtgatccaggcccatgtccggagttttctctgtcggagtcgactgcagagagatatcaggagagagattgatgacttttttaaagcagatgaccctgagtccactaaaagaagtgcactttgtattttcaagattgccaggaaactgctgttcctattcagaatcaaagaggataatgagagatttgagaagttgtgtcgcagcatcctgagcagcatggatgctgagaatgagcctaaggtgtggtatgtgtccctggcttgttctaaggacctcaccctcctttggattcaacagatcaagaacattttgtggtactgctgtgattttctcaagcagctcaagcctgaaatcctgcaggactcccgactcatcaccctgtacctcacgatgcttgtcaccttcacagacacttcaacgtggaaaattcttcggggaaaaggtgaaagtcttcgaccagcgatgaaccacatttgtgcaaatataatgggacatctcaaccagcatggattttattctgtgctgcagtgctgtgatgggctgtttcctgatttggtttcatatgctcctcacaacaaccctgtgaggtggtccgttggcagaagctggtatgactggcagttgtctcgctagaggaaccttctacttcataccataattaaacggcttctaaaataatatgatgtctttaaattttaagtctggcattatttgtattagctgtttttttaactttattattaaagaatttctaaccataatatttagagaaagagtggtagagttaacctcgttacccaatactttcttccctttccttttataaaaacactgcatacggttttttgtttttttgtttttttgttttttttttaagagacagggttgccctgtcacccaggctggcctcaaggaatcttcctgcctcagcctcctgagctgggactgtaggtacaagccaccatgcctggctcacaatacagtttttttatctgaagcactcagtttacttttttgctcttttatgtacaaatgaatataaagttgatatcatcctctgaccaattaaaacattcttttcagatattgttaacccgtggcctggcaagaccccgtccttgtctatccaaaggcactttaacagcagctttttctctagcgttacgccctgtgattgctgcacagttctcagacaatctgattcggccgttcctcatccacatcatgtctgtgcctgctctggtgactcatctcagcacagtgacccctgagcgcctcactgttttagaatcccatgacatgcttcgtaaattcatcatatttttaagagaccaagatcgatgccgtgatgtatgtgaaagtttagaaggatgccatacgctttgtctaatgggcaacctcctacacttgggctccctcagccccagagtgttagaggaggagacagatgggttcgtgagtttgctcacccagacgctgtgctactgtcggaagtatgtgtctcagaagaagtccaacctgacccactggcatcctgtccttggctggttctcccaatctgtggattatggccttaacgagtcaatgcacttgatcaccaaacagctgcagttcttgtggggggtgcctctgatccggatcttcttctgtgacatcctgagcaagaagctactggagagccaggagccagcccacgcacagccagcatcccctcagaatgtgctcccagtgaagagtctcctaaagcgtgcttttcaaaagtcggcatcagtccggaatattctcaggcctgtcgggggtaaacgggtcgactctgcagaagtccagaaggtttgcaacatctgtgtcctctaccagacctcgctgacaactctcacacagattcggctgcagatactcacaggtctcacttaccttgatgacctgcttcccaaactgtgggcatttatctgtgagctcgggccccacggagggttaaagctcttcttggaatgcctgaacaatgacactgaagagtccaagcaactcttggccatgctgatgctgttctgtgactgttcgcggcacctcatcacaatccttgatgacattgaagtttatgaagaacagatttcattcaaactggaagagctggtcactatctcctctttcctgaattcttttgtgtttaagatgatctgggatggaattgtagagaacgccaagggtgagaccttggagctgttccagtctgtccacgggtggcttatggtgctgtacgagcgggactgccggcggcgcttcacccccgaggaccactggctgcgaaaggatctcaaacctagcgtgctcttccaagaactcgacagggacagaaaacgggcacagttgatcctgcagtacatcccacatgtcatccctcacaaaaacagagttctactgtttcgaaccatggttaccaaggagaaggagaaactggggctggtggaaaccagctctgcctccccgcatgtcactcacatcaccatccgccggtccaggatgctggaggacggctacgagcagcttaggcagctctcccagcacgccatgaagggggtcatccgtgtgaagtttgtcaatgacctcggggtggacgaagcagggattgatcaagacggtgtttttaaggagttcttggaagagatcatcaagagagtttttgacccagcactcaatctgttcaagacaaccagtggggatgagaggctgtacccctcacccacatcctacatccatgagaattacctgcagctcttcgagtttgtggggaagatgctggggaaggctgtgtatgagggaattgtggtggacgtgccatttgcatccttcttcctgagccaactgcttgggcaccaccacagcgtcttctatagctcggtggatgaactgccttctctggactccgagttctataaaaacctcacctccatcaagcgctatgatggggacatcactgacctgggcctgacgctgtcttacgacgaggacgtcatgggtcagcttgtttgccatgaactgattcctggagggaagaccattcctgttacaaatgaaaataaaattagctacatccatctgatggcacattttcgaatgcacactcaaataaaaaaccaaacagctgccctcattagcggattccgttccattatcaaacccgagtggatccgaatgttctcaactcctgaactgcagcgtctcatctctggcgacaatgctgagattgatctggaagatttaaagaagcacacagtctactacggtggtttccatggaagtcacagagtcatcatctggctctgggatattctggcctccgacttcacaccggatgagagagctatgtttctgaagttcgtgaccagctgctccagacccccgctcctgggattcgcctacctcaagcctccattctccatccgctgcgtggaggtgtcggacgatcaggacaccggggacactctgggcagcgtcctccggggcttcttcaccatccgcaagcgggagccaggcggccgcctgcccacctcctccacctgcttcaacctgctcaagctgcccaactacagcaagaagagcgtcctccgcgagaagctgcgctacgccatcagcatgaacacgggctttgaactctcctagctcctgtcccagccctgcctccagggctcctgggctgccagggaccttcagctcccagaggcagtgtggtcctgggaatgtgaccaacatgccaggtgacattggcccctagaccctctctatagccatgagactccttgtggcctcaagaaatttagacgcccacgacagcactacacagcatctccaggtgatgcccaaggcacagggctgcagaaaataaacctccagattccaccaacacgggtccattcttcctggtgatggcagaggggcttcttttagctagtttgatcttttgggagtctgtctttccttagccgtctgagtgagctgtgtatgaacaagtcccaggagttccaagagtctagagtggtttttgcagcatgggttgagtgtacaaagcctactgtgcgtgagatcctctccttccgtttctgaaatctcttactcaggtaaggcctcgccaagcctctatgcaccccacaaagtttctgcctccatgccgtccacagcgcctcttcccagacagccaggcccatctgctgcccagggaagcgcaggcgcctgctagggacgctatggacaccgtgagtccaaggcgctgctcctgccttgaagccacgcgctccacgccgcggccctcccattttctgcgtcctcagcgggctgagctgccagagagccttcccggacctattcccgtcctatgcattcacattggcatcctggtttgggggaagaaaaacaacggcccttagcagcagccccgtttccagaatgtgctgcctgttccccaaagcctgcttgtcccgcggaggacggctgcctttgaccctgcttatttgtctcactggttatctaatgaggaacaaacactaacctaaggtacacatcccatctgggcggtggcttcactcctgagtctgcaaaatcccaggaaacttgggtcttgctgcccatccttcctcagcacagggaacccggaagcccgttgcactgacagaggctcacaccctctgggttttttgttttttttttaaacttcatttctcttccaacccattgtgttcctctgccctcattctttacctttgttgtaagaactttagctccagggaactgaggcagaggccctgtttgtggtctgtgttgacagccacccaccctctcccacctcatgctcctgcacctgcaccaccaaggttgatgccggattcgaagccaggaaggcccagtccctcctctgctctcctcaaagacgcaaaacattttccaacaagagctgtcacagtggcagcaaagcaggggccacccgtctccacagtccttcagagtttcagctgcatcctggtgtcccacccaggtcgagcccccaggcttctggaaaacagtgtgtgctctactttgatggaaacatggcaaggaatttaaagacaggaatgtattaatattattgaaggtgtgttcgtaacctctgattctgtggacttgccactttctccaaacgctcggttcctttgaagatttcttctgaacgtgtgtgcgcacgctgggcgggttcgtgcatacatgcggggaccccagactgtcagcacagggaagatggatcccatcctaatttttatcacctgaaggttggaaccagtgagggactgggagagagtgatttataagcaccaatatcaacttcatgtggatttttgacagaggggtagtttgtaatttcatttaaattcttttcagcagctggaaatattgcactatctgaaacactgaatctccttttgtaactggtgttcactgacaccttgatggctcttgatggctctaaaaagttgtaggattttttgtttttgtagctaacttatggattgagatgtgatcaaaggctttattaaatttgtacttcagca

SEQ ID NO: 453090 - DNA, 6768 bp, Homo sapiens
gaacaccgcggggcaagatggcggtagtgcgtcggctgctgccccgggtctggcagaactcgggtgttttgggctgagacagtggcagctgcggccccgaccccaagtgcggggacctccggcgaataaaggtcggcctgcgggtaggccggtagggcctgcggtccggcctgcgggagaactgggtcgtcagtcctccgagtggtggggctggggactttgagggagttggctctagggcacagtccctgcctggccaggtcggaggaacaagtgctgggatctggcgtgtgtgctccaggggctctttccgcggccctttccacctcttttcactttggggacggtaggcctttataaacggactaatgctgggtgatttgttcctgtggttgttgatgccgaggaaagactctgggccccaggactcacctaaactggagttcgaatactgttcgctcgctgtgtgaccttggaaaaaataacaagcttttctgaagtgagaagctgttctcagccacgagtcctgtgcaagatcactaatgattacctggcatttctgcgacacaggcaggtcctcagggtttgtgcaagtttgcaaacatgttcaccctgtctcagacctcgagagcatggttcatcgatagagcccgtcaggcacgagaagaaaggcttgtgcagaaggaacgggagcgggcagctgttgtgatccaggcccatgtccggagttttctctgtcggagtcgactgcagagagatatcaggagagagattgatgacttttttaaagcagatgaccctgagtccactaaaagaagtgcactttgtattttcaagattgccaggaaactgctgttcctattcagaatcaaagaggataatgagagatttgagaagttgtgtcgcagcatcctgagcagcatggatgctgagaatgagcctaaggtgtggtatgtgtccctggcttgttctaaggacctcaccctcctttggattcaacagatcaagaacattttgtggtactgctgtgattttctcaagcagctcaagcctgaaatcctgcaggactcccgactcatcaccctgtacctcacgatgcttgtcaccttcacagacacttcaacgtggaaaattcttcggggaaaaggtgaaagtcttcgaccagcgatgaaccacatttgtgcaaatataatgggacatctcaaccagcatggattttattctgtgctgcagaggtctgtgactcctgccccccagtgtgcaacttctccactctccaacacctgcacttggatttttacatttgcattcagcatacctggtgtcctcctcagaaacacttttcataggaagagcttgatgcctgctgtcctcttcttccttcccctgccttgtctcacttgtgggtcaggtaaagggaggacagtggtgctgggatcccttgaatgctctacatttttggctgcaagggtaatccagtcttttgacatttaaactctggaaggagacctcagggcttgttccctcagattccttcttggttgatgtctagaatcatatttctagctctgtgtcctcaaacagccctttccactttgtaccttgttgtgccagatcatacctctagggaattgttgagaaagcctgattgctgtttaaaggtacaatggaagtcttgagtttgagaagtaatgttgactttgcccttccttctccctagtgctgtgatgggctgtttcctgatttggtttcatatgctcctcacaacaaccctgtgaggtggtccgttggcagaagctggtatgactggcagttgtctcgctagaggaaccttctacttcataccataattaaacggcttctaaaataatatgatgtctttaaattttaagtctggcattatttgtattagctgtttttttaactttattattaaagaatttctaaccataatatttagagaaagagtggtagagttaacctcgttacccaatactttcttccctttccttttataaaaacactgcatacggttttttgtttttttgtttttttgttttttttttaagagacagggttgccctgtcacccaggctggcctcaaggaatcttcctgcctcagcctcctgagctgggactgtaggtacaagccaccatgcctggctcacaatacagtttttttatctgaagcactcagtttacttttttgctcttttatgtacaaatgaatataaagttgatatcatcctctgaccaattaaaacattcttttcagatattgttaacccgtggcctggcaagaccccgtccttgtctatccaaaggcactttaacagcagctttttctctagcgttacgccctgtgattgctgcacagttctcagacaatctgattcggccgttcctcatccacatcatgtctgtgcctgctctggtgactcatctcagcacagtgacccctgagcgcctcactgttttagaatcccatgacatgcttcgtaaattcatcatatttttaagagaccaagatcgatgccgtgatgtatgtgaaagtttagaaggatgccatacgctttgtctaatgggcaacctcctacacttgggctccctcagccccagagtgttagaggaggagacagatgggttcgtgagtttgctcacccagacgctgtgctactgtcggaagtatgtgtctcagaagaagtccaacctgacccactggcatcctgtccttggctggttctcccaatctgtggattatggccttaacgagtcaatgcacttgatcaccaaacagctgcagttcttgtggggggtgcctctgatccggatcttcttctgtgacatcctgagcaagaagctactggagagccaggagccagcccacgcacagccagcatcccctcagaatgtgctcccagtgaagagtctcctaaagcgtgcttttcaaaagtcggcatcagtccggaatattctcaggcctgtcgggggtaaacgggtcgactctgcagaagtccagaaggtttgcaacatctgtgtcctctaccagacctcgctgacaactctcacacagattcggctgcagatactcacaggtctcacttaccttgatgacctgcttcccaaactgtgggcatttatctgtgagctcgggccccacggagggttaaagctcttcttggaatgcctgaacaatgacactgaagagtccaagcaactcttggccatgctgatgctgttctgtgactgttcgcggcacctcatcacaatccttgatgacattgaagtttatgaagaacagatttcattcaaactggaagagctggtcactatctcctctttcctgaattcttttgtgtttaagatgatctgggatggaattgtagagaacgccaagggtgagaccttggagctgttccagtctgtccacgggtggcttatggtgctgtacgagcgggactgccggcggcgcttcacccccgaggaccactggctgcgaaaggatctcaaacctagcgtgctcttccaagaactcgacagggacagaaaacgggcacagttgatcctgcagtacatcccacatgtcatccctcacaaaaacagagttctactgtttcgaaccatggttaccaaggagaaggagaaactggggctggtggaaaccagctctgcctccccgcatgtcactcacatcaccatccgccggtccaggatgctggaggacggctacgagcagcttaggcagctctcccagcacgccatgaagggggtcatccgtgtgaagtttgtcaatgacctcggggtggacgaagcagggattgatcaagacggtgtttttaaggagttcttggaagagatcatcaagagagtttttgacccagcactcaatctgttcaagacaaccagtggggatgagaggctgtacccctcacccacatcctacatccatgagaattacctgcagctcttcgagtttgtggggaagatgctggggaaggctgtgtatgagggaattgtggtggacgtgccatttgcatccttcttcctgagccaactgcttgggcaccaccacagcgtcttctatagctcggtggatgaactgccttctctggactccgagttctataaaaacctcacctccatcaagcgctatgatggggacatcactgacctgggcctgacgctgtcttacgacgaggacgtcatgggtcagcttgtttgccatgaactgattcctggagggaagaccattcctgttacaaatgaaaataaaattagctacatccatctgatggcacattttcgaatgcacactcaaataaaaaaccaaacagctgccctcattagcggattccgttccattatcaaacccgagtggatccgaatgttctcaactcctgaactgcagcgtctcatctctggcgacaatgctgagattgatctggaagatttaaagaagcacacagtctactacggtggtttccatggaagtcacagagtcatcatctggctctgggatattctggcctccgacttcacaccggatgagagagctatgtttctgaagttcgtgaccagctgctccagacccccgctcctgggattcgcctacctcaagcctccattctccatccgctgcgtggaggtgtcggacgatcaggacaccggggacactctgggcagcgtcctccggggcttcttcaccatccgcaagcgggagccaggcggccgcctgcccacctcctccacctgcttcaacctgctcaagctgcccaactacagcaagaagagcgtcctccgcgagaagctgcgctacgccatcagcatgaacacgggctttgaactctcctagctcctgtcccagccctgcctccagggctcctgggctgccagggaccttcagctcccagaggcagtgtggtcctgggaatgtgaccaacatgccaggtgacattggcccctagaccctctctatagccatgagactccttgtggcctcaagaaatttagacgcccacgacagcactacacagcatctccaggtgatgcccaaggcacagggctgcagaaaataaacctccagattccaccaacacgggtccattcttcctggtgatggcagaggggcttcttttagctagtttgatcttttgggagtctgtctttccttagccgtctgagtgagctgtgtatgaacaagtcccaggagttccaagagtctagagtggtttttgcagcatgggttgagtgtacaaagcctactgtgcgtgagatcctctccttccgtttctgaaatctcttactcaggtaaggcctcgccaagcctctatgcaccccacaaagtttctgcctccatgccgtccacagcgcctcttcccagacagccaggcccatctgctgcccagggaagcgcaggcgcctgctagggacgctatggacaccgtgagtccaaggcgctgctcctgccttgaagccacgcgctccacgccgcggccctcccattttctgcgtcctcagcgggctgagctgccagagagccttcccggacctattcccgtcctatgcattcacattggcatcctggtttgggggaagaaaaacaacggcccttagcagcagccccgtttccagaatgtgctgcctgttccccaaagcctgcttgtcccgcggaggacggctgcctttgaccctgcttatttgtctcactggttatctaatgaggaacaaacactaacctaaggtacacatcccatctgggcggtggcttcactcctgagtctgcaaaatcccaggaaacttgggtcttgctgcccatccttcctcagcacagggaacccggaagcccgttgcactgacagaggctcacaccctctgggttttttgttttttttttaaacttcatttctcttccaacccattgtgttcctctgccctcattctttacctttgttgtaagaactttagctccagggaactgaggcagaggccctgtttgtggtctgtgttgacagccacccaccctctcccacctcatgctcctgcacctgcaccaccaaggttgatgccggattcgaagccaggaaggcccagtccctcctctgctctcctcaaagacgcaaaacattttccaacaagagctgtcacagtggcagcaaagcaggggccacccgtctccacagtccttcagagtttcagctgcatcctggtgtcccacccaggtcgagcccccaggcttctggaaaacagtgtgtgctctactttgatggaaacatggcaaggaatttaaagacaggaatgtattaatattattgaaggtgtgttcgtaacctctgattctgtggacttgccactttctccaaacgctcggttcctttgaagatttcttctgaacgtgtgtgcgcacgctgggcgggttcgtgcatacatgcggggaccccagactgtcagcacagggaagatggatcccatcctaatttttatcacctgaaggttggaaccagtgagggactgggagagagtgatttataagcaccaatatcaacttcatgtggatttttgacagaggggtagtttgtaatttcatttaaattcttttcagcagctggaaatattgcactatctgaaacactgaatctccttttgtaactggtgttcactgacaccttgatggctcttgatggctctaaaaagttgtaggattttttgtttttgtagctaacttatggattgagatgtgatcaaaggctttattaaatttgtacttcagca

SEQ ID NO: 453091 - DNA, 5719 bp, Homo sapiens
gaacaccgcggggcaagatggcggtagtgcgtcggctgctgccccgggtctggcagaactcgggtgttttgggctgagacagtggcagctgcggccccgaccccaagtgcggggacctccggcgaataaaggtcggcctgcgggtaggccggtagggcctgcggtccggcctgcgggagaactgggtcgtcagtcctccgagtggtggggctggggactttgagggagttggctctagggcacagtccctgcctggccaggtcggaggaacaagtgctgggatctggcgtgtgtgctccaggggctctttccgcggccctttccacctcttttcactttggggacggtaggcctttataaacggactaatgctgggtgatttgttcctgtggttgttgatgccgaggaaagactctgggccccaggactcacctaaactggagttcgaatactgttcgctcgctgtgtgaccttggaaaaaataacaagcttttctgaagtgagaagctgttctcagccacgagtcctgtgcaagatcactaatgattacctggcatttctgcgacacaggcaggtcctcagggtttgtgcaagtttgcaaacatgttcaccctgtctcagacctcgagagcatggttcatcgatagagcccgtcaggcacgagaagaaaggcttgtgcagaaggaacgggagcgggcagctgttgtgatccaggcccatgtccggagttttctctgtcggagtcgactgcagagagatatcaggagagagattgatgacttttttaaagcagatgaccctgagtccactaaaagaagtgcactttgtattttcaagattgccaggaaactgctgttcctattcagaatcaaagaggataatgagagatttgagaagttgtgtcgcagcatcctgagcagcatggatgctgagaatgagcctaaggtgtggtatgtgtccctggcttgttctaaggacctcaccctcctttggattcaacagatcaagaacattttgtggtactgctgtgattttctcaagcagctcaagcctgaaatcctgcaggactcccgactcatcaccctgtacctcacgatgcttgtcaccttcacagacacttcaacgtggaaaattcttcggggaaaaggtgaaagtcttcgaccagcgatgaaccacatttgtgcaaatataatgggacatctcaaccagcatggattttattctgtgctgcagatattgttaacccgtggcctggcaagaccccgtccttgtctatccaaaggcactttaacagcagctttttctctagcgttacgccctgtgattgctgcacagttctcagacaatctgattcggccgttcctcatccacatcatgtctgtgcctgctctggtgactcatctcagcacagtgacccctgagcgcctcactgttttagaatcccatgacatgcttcgtaaattcatcatatttttaagagaccaagatcgatgccgtgatgtatgtgaaagtttagaaggatgccatacgctttgtctaatgggcaacctcctacacttgggctccctcagccccagagtgttagaggaggagacagatgggttcgtgagtttgctcacccagacgctgtgctactgtcggaagtatgtgtctcagaagaagtccaacctgacccactggcatcctgtccttggctggttctcccaatctgtggattatggccttaacgagtcaatgcacttgatcaccaaacagctgcagttcttgtggggggtgcctctgatccggatcttcttctgtgacatcctgagcaagaagctactggagagccaggagccagcccacgcacagccagcatcccctcagaatgtgctcccagtgaagagtctcctaaagcgtgcttttcaaaagtcggcatcagtccggaatattctcaggcctgtcgggggtaaacgggtcgactctgcagaagtccagaaggtttgcaacatctgtgtcctctaccagacctcgctgacaactctcacacagattcggctgcagatactcacaggtctcacttaccttgatgacctgcttcccaaactgtgggcatttatctgtgagctcgggccccacggagggttaaagctcttcttggaatgcctgaacaatgacactgaagagtccaagcaactcttggccatgctgatgctgttctgtgactgttcgcggcacctcatcacaatccttgatgacattgaagtttatgaagaacagatttcattcaaactggaagagctggtcactatctcctctttcctgaattcttttgtgtttaagatgatctgggatggaattgtagagaacgccaagggtgagaccttggagctgttccagtctgtccacgggtggcttatggtgctgtacgagcgggactgccggcggcgcttcacccccgaggaccactggctgcgaaaggatctcaaacctagcgtgctcttccaagaactcgacagggacagaaaacgggcacagttgatcctgcagtacatcccacatgtcatccctcacaaaaacagagttctactgtttcgaaccatggttaccaaggagaaggagaaactggggctggtggaaaccagctctgcctccccgcatgtcactcacatcaccatccgccggtccaggatgctggagagcttgtttgagtgcccctggccactggtgatcaatgccgagagctgctaggaaggcagtgtgtgctgaacagtggatgtttctgacattcttcaaggacggctacgagcagcttaggcagctctcccagcacgccatgaagggggtcatccgtgtgaagtttgtcaatgacctcggggtggacgaagcagggattgatcaagacggtgtttttaaggagttcttggaagagatcatcaagagagtttttgacccagcactcaatctgttcaagacaaccagtggggatgagaggctgtacccctcacccacatcctacatccatgagaattacctgcagctcttcgagtttgtggggaagatgctggggaaggctgtgtatgagggaattgtggtggacgtgccatttgcatccttcttcctgagccaactgcttgggcaccaccacagcgtcttctatagctcggtggatgaactgccttctctggactccgagttctataaaaacctcacctccatcaagcgctatgatggggacatcactgacctgggcctgacgctgtcttacgacgaggacgtcatgggtcagcttgtttgccatgaactgattcctggagggaagaccattcctgttacaaatgaaaataaaattagctacatccatctgatggcacattttcgaatgcacactcaaataaaaaaccaaacagctgccctcattagcggattccgttccattatcaaacccgagtggatccgaatgttctcaactcctgaactgcagcgtctcatctctggcgacaatgctgagattgatctggaagatttaaagaagcacacagtctactacggtggtttccatggaagtcacagagtcatcatctggctctgggatattctggcctccgacttcacaccggatgagagagctatgtttctgaagttcgtgaccagctgctccagacccccgctcctgggattcgcctacctcaagcctccattctccatccgctgcgtggaggtgtcggacgatcaggacaccggggacactctgggcagcgtcctccggggcttcttcaccatccgcaagcgggagccaggcggccgcctgcccacctcctccacctgcttcaacctgctcaagctgcccaactacagcaagaagagcgtcctccgcgagaagctgcgctacgccatcagcatgaacacgggctttgaactctcctagctcctgtcccagccctgcctccagggctcctgggctgccagggaccttcagctcccagaggcagtgtggtcctgggaatgtgaccaacatgccaggtgacattggcccctagaccctctctatagccatgagactccttgtggcctcaagaaatttagacgcccacgacagcactacacagcatctccaggtgatgcccaaggcacagggctgcagaaaataaacctccagattccaccaacacgggtccattcttcctggtgatggcagaggggcttcttttagctagtttgatcttttgggagtctgtctttccttagccgtctgagtgagctgtgtatgaacaagtcccaggagttccaagagtctagagtggtttttgcagcatgggttgagtgtacaaagcctactgtgcgtgagatcctctccttccgtttctgaaatctcttactcaggtaaggcctcgccaagcctctatgcaccccacaaagtttctgcctccatgccgtccacagcgcctcttcccagacagccaggcccatctgctgcccagggaagcgcaggcgcctgctagggacgctatggacaccgtgagtccaaggcgctgctcctgccttgaagccacgcgctccacgccgcggccctcccattttctgcgtcctcagcgggctgagctgccagagagccttcccggacctattcccgtcctatgcattcacattggcatcctggtttgggggaagaaaaacaacggcccttagcagcagccccgtttccagaatgtgctgcctgttccccaaagcctgcttgtcccgcggaggacggctgcctttgaccctgcttatttgtctcactggttatctaatgaggaacaaacactaacctaaggtacacatcccatctgggcggtggcttcactcctgagtctgcaaaatcccaggaaacttgggtcttgctgcccatccttcctcagcacagggaacccggaagcccgttgcactgacagaggctcacaccctctgggttttttgttttttttttaaacttcatttctcttccaacccattgtgttcctctgccctcattctttacctttgttgtaagaactttagctccagggaactgaggcagaggccctgtttgtggtctgtgttgacagccacccaccctctcccacctcatgctcctgcacctgcaccaccaaggttgatgccggattcgaagccaggaaggcccagtccctcctctgctctcctcaaagacgcaaaacattttccaacaagagctgtcacagtggcagcaaagcaggggccacccgtctccacagtccttcagagtttcagctgcatcctggtgtcccacccaggtcgagcccccaggcttctggaaaacagtgtgtgctctactttgatggaaacatggcaaggaatttaaagacaggaatgtattaatattattgaaggtgtgttcgtaacctctgattctgtggacttgccactttctccaaacgctcggttcctttgaagatttcttctgaacgtgtgtgcgcacgctgggcgggttcgtgcatacatgcggggaccccagactgtcagcacagggaagatggatcccatcctaatttttatcacctgaaggttggaaccagtgagggactgggagagagtgatttataagcaccaatatcaacttcatgtggatttttgacagaggggtagtttgtaatttcatttaaattcttttcagcaggcgtccctgagcgtcagtttgcccccgagaagcagctaggcccatagttagcagctcgctggt

SEQ ID NO: 453092 - DNA, 6169 bp, Homo sapiens
gaacaccgcggggcaagatggcggtagtgcgtcggctgctgccccgggtctggcagaactcgggtgttttgggctgagacagtggcagctgcggccccgaccccaagtgcggggacctccggcgaataaaggtcggcctgcgggtaggccggtagggcctgcggtccggcctgcgggagaactgggtcgtcagtcctccgagtggtggggctggggactttgagggagttggctctagggcacagtccctgcctggccaggtcggaggaacaagtgctgggatctggcgtgtgtgctccaggggctctttccgcggccctttccacctcttttcactttggggacggtaggcctttataaacggactaatgctgggtgatttgttcctgtggttgttgatgccgaggaaagactctgggccccaggactcacctaaactggagttcgaatactgttcgctcgctgtgtgaccttggaaaaaataacaagcttttctgaagtgagaagctgttctcagccacgagtcctgtgcaagatcactaatgattacctggcatttctgcgacacaggcaggtcctcagggtttgtgcaagtttgcaaacatgttcaccctgtctcagacctcgagagcatggttcatcgatagagcccgtcaggcacgagaagaaaggcttgtgcagaaggaacgggagcgggcagctgttgtgatccaggcccatgtccggagttttctctgtcggagtcgactgcagagagatatcaggagagagattgatgacttttttaaagcagatgaccctgagtccactaaaagaagtgcactttgtattttcaagattgccaggaaactgctgttcctattcagaatcaaagaggataatgagagatttgagaagttgtgtcgcagcatcctgagcagcatggatgctgagaatgagcctaaggtgtggtatgtgtccctggcttgttctaaggacctcaccctcctttggattcaacagatcaagaacattttgtggtactgctgtgattttctcaagcagctcaagcctgaaatcctgcaggactcccgactcatcaccctgtacctcacgatgcttgtcaccttcacagacacttcaacgtggaaaattcttcggggaaaaggtgaaagtcttcgaccagcgatgaaccacatttgtgcaaatataatgggacatctcaaccagcatggattttattctgtgctgcagtgctgtgatgggctgtttcctgatttggtttcatatgctcctcacaacaaccctgtgaggtggtccgttggcagaagctggtatgactggcagttgtctcgctagaggaaccttctacttcataccataattaaacggcttctaaaataatatgatgtctttaaattttaagtctggcattatttgtattagctgtttttttaactttattattaaagaatttctaaccataatatttagagaaagagtggtagagttaacctcgttacccaatactttcttccctttccttttataaaaacactgcatacggttttttgtttttttgtttttttgttttttttttaagagacagggttgccctgtcacccaggctggcctcaaggaatcttcctgcctcagcctcctgagctgggactgtaggtacaagccaccatgcctggctcacaatacagtttttttatctgaagcactcagtttacttttttgctcttttatgtacaaatgaatataaagttgatatcatcctctgaccaattaaaacattcttttcagatattgttaacccgtggcctggcaagaccccgtccttgtctatccaaaggcactttaacagcagctttttctctagcgttacgccctgtgattgctgcacagttctcagacaatctgattcggccgttcctcatccacatcatgtctgtgcctgctctggtgactcatctcagcacagtgacccctgagcgcctcactgttttagaatcccatgacatgcttcgtaaattcatcatatttttaagagaccaagatcgatgccgtgatgtatgtgaaagtttagaaggatgccatacgctttgtctaatgggcaacctcctacacttgggctccctcagccccagagtgttagaggaggagacagatgggttcgtgagtttgctcacccagacgctgtgctactgtcggaagtatgtgtctcagaagaagtccaacctgacccactggcatcctgtccttggctggttctcccaatctgtggattatggccttaacgagtcaatgcacttgatcaccaaacagctgcagttcttgtggggggtgcctctgatccggatcttcttctgtgacatcctgagcaagaagctactggagagccaggagccagcccacgcacagccagcatcccctcagaatgtgctcccagtgaagagtctcctaaagcgtgcttttcaaaagtcggcatcagtccggaatattctcaggcctgtcgggggtaaacgggtcgactctgcagaagtccagaaggtttgcaacatctgtgtcctctaccagacctcgctgacaactctcacacagattcggctgcagatactcacaggtctcacttaccttgatgacctgcttcccaaactgtgggcatttatctgtgagctcgggccccacggagggttaaagctcttcttggaatgcctgaacaatgacactgaagagtccaagcaactcttggccatgctgatgctgttctgtgactgttcgcggcacctcatcacaatccttgatgacattgaagtttatgaagaacagatttcattcaaactggaagagctggtcactatctcctctttcctgaattcttttgtgtttaagatgatctgggatggaattgtagagaacgccaagggtgagaccttggagctgttccagtctgtccacgggtggcttatggtgctgtacgagcgggactgccggcggcgcttcacccccgaggaccactggctgcgaaaggatctcaaacctagcgtgctcttccaagaactcgacagggacagaaaacgggcacagttgatcctgcagtacatcccacatgtcatccctcacaaaaacagagttctactgtttcgaaccatggttaccaaggagaaggagaaactggggctggtggaaaccagctctgcctccccgcatgtcactcacatcaccatccgccggtccaggatgctggaggacggctacgagcagcttaggcagctctcccagcacgccatgaagggggtcatccgtgtgaagtttgtcaatgacctcggggtggacgaagcagggattgatcaagacggtgtttttaaggagttcttggaagagatcatcaagagagtttttgacccagcactcaatctgttcaagacaaccagtggggatgagaggctgtacccctcacccacatcctacatccatgagaattacctgcagctcttcgagtttgtggggaagatgctggggaaggctgtgtatgagggaattgtggtggacgtgccatttgcatccttcttcctgagccaactgcttgggcaccaccacagcgtcttctatagctcggtggatgaactgccttctctggactccgagttctataaaaacctcacctccatcaagcgctatgatggggacatcactgacctgggcctgacgctgtcttacgacgaggacgtcatgggtcagcttgtttgccatgaactgattcctggagggaagaccattcctgttacaaatgaaaataaaattagctacatccatctgatggcacattttcgaatgcacactcaaataaaaaaccaaacagctgccctcattagcggattccgttccattatcaaacccgagtggatccgaatgttctcaactcctgaactgcagcgtctcatctctggcgacaatgctgagattgatctggaagatttaaattcgtgaccagctgctccagacccccgctcctgggattcgcctacctcaagcctccattctccatccgctgcgtggaggtgtcggacgatcaggacaccggggacactctgggcagcgtcctccggggcttcttcaccatccgcaagcgggagccaggcggccgcctgcccacctcctccacctgcttcaacctgctcaagctgcccaactacagcaagaagagcgtcctccgcgagaagctgcgctacgccatcagcatgaacacgggctttgaactctcctagctcctgtcccagccctgcctccagggctcctgggctgccagggaccttcagctcccagaggcagtgtggtcctgggaatgtgaccaacatgccaggtgacattggcccctagaccctctctatagccatgagactccttgtggcctcaagaaatttagacgcccacgacagcactacacagcatctccaggtgatgcccaaggcacagggctgcagaaaataaacctccagattccaccaacacgggtccattcttcctggtgatggcagaggggcttcttttagctagtttgatcttttgggagtctgtctttccttagccgtctgagtgagctgtgtatgaacaagtcccaggagttccaagagtctagagtggtttttgcagcatgggttgagtgtacaaagcctactgtgcgtgagatcctctccttccgtttctgaaatctcttactcaggtaaggcctcgccaagcctctatgcaccccacaaagtttctgcctccatgccgtccacagcgcctcttcccagacagccaggcccatctgctgcccagggaagcgcaggcgcctgctagggacgctatggacaccgtgagtccaaggcgctgctcctgccttgaagccacgcgctccacgccgcggccctcccattttctgcgtcctcagcgggctgagctgccagagagccttcccggacctattcccgtcctatgcattcacattggcatcctggtttgggggaagaaaaacaacggcccttagcagcagccccgtttccagaatgtgctgcctgttccccaaagcctgcttgtcccgcggaggacggctgcctttgaccctgcttatttgtctcactggttatctaatgaggaacaaacactaacctaaggtacacatcccatctgggcggtggcttcactcctgagtctgcaaaatcccaggaaacttgggtcttgctgcccatccttcctcagcacagggaacccggaagcccgttgcactgacagaggctcacaccctctgggttttttgttttttttttaaacttcatttctcttccaacccattgtgttcctctgccctcattctttacctttgttgtaagaactttagctccagggaactgaggcagaggccctgtttgtggtctgtgttgacagccacccaccctctcccacctcatgctcctgcacctgcaccaccaaggttgatgccggattcgaagccaggaaggcccagtccctcctctgctctcctcaaagacgcaaaacattttccaacaagagctgtcacagtggcagcaaagcaggggccacccgtctccacagtccttcagagtttcagctgcatcctggtgtcccacccaggtcgagcccccaggcttctggaaaacagtgtgtgctctactttgatggaaacatggcaaggaatttaaagacaggaatgtattaatattattgaaggtgtgttcgtaacctctgattctgtggacttgccactttctccaaacgctcggttcctttgaagatttcttctgaacgtgtgtgcgcacgctgggcgggttcgtgcatacatgcggggaccccagactgtcagcacagggaagatggatcccatcctaatttttatcacctgaaggttggaaccagtgagggactgggagagagtgatttataagcaccaatatcaacttcatgtggatttttgacagaggggtagtttgtaatttcatttaaattcttttcagcagctggaaatattgcactatctgaaacactgaatctccttttgtaactggtgttcactgacaccttgatggctcttgatggctctaaaaagttgtaggattttttgtttttgtagctaacttatggattgagatgtgatcaaaggctttattaaatttgtacttcagca

SEQ ID NO: 453093 - DNA, 3173 bp, Homo sapiens
taccttgtttgtgtcactccttactggagagcttgtttgagtgcccctggccactggtgatcaatgccgagagctgctaggaaggcagtgtgtgctgaacagtggatgtttctgacattcttcaaggacggctacgagcagcttaggcagctctcccagcacgccatgaagggggtcatccgtgtgaagtttgtcaatgacctcggggtggacgaagcagggattgatcaagacggtgtttttaaggagttcttggaagagatcatcaagagagtttttgacccagcactcaatctgttcaagacaaccagtggggatgagaggctgtacccctcacccacatcctacatccatgagaattacctgcagctcttcgagtttgtggggaagatgctggggaaggctgtgtatgagggaattgtggtggacgtgccatttgcatccttcttcctgagccaactgcttgggcaccaccacagcgtcttctatagctcggtggatgaactgccttctctggactccgagttctataaaaacctcacctccatcaagcgctatgatggggacatcactgacctgggcctgacgctgtcttacgacgaggacgtcatgggtcagcttgtttgccatgaactgattcctggagggaagaccattcctgttacaaatgaaaataaaattagctacatccatctgatggcacattttcgaatgcacactcaaataaaaaaccaaacagctgccctcattagcggattccgttccattatcaaacccgagtggatccgaatgttctcaactcctgaactgcagcgtctcatctctggcgacaatgctgagattgatctggaagatttaaagaagcacacagtctactacggtggtttccatggaagtcacagagtcatcatctggctctgggatattctggcctccgacttcacaccggatgagagagctatgtttctgaagttcgtgaccagctgctccagacccccgctcctgggattcgcctacctcaagcctccattctccatccgctgcgtggaggtgtcggacgatcaggacaccggggacactctgggcagcgtcctccggggcttcttcaccatccgcaagcgggagccaggcggccgcctgcccacctcctccacctgcttcaacctgctcaagctgcccaactacagcaagaagagcgtcctccgcgagaagctgcgctacgccatcagcatgaacacgggctttgaactctcctagctcctgtcccagccctgcctccagggctcctgggctgccagggaccttcagctcccagaggcagtgtggtcctgggaatgtgaccaacatgccaggtgacattggcccctagaccctctctatagccatgagactccttgtggcctcaagaaatttagacgcccacgacagcactacacagcatctccaggtgatgcccaaggcacagggctgcagaaaataaacctccagattccaccaacacgggtccattcttcctggtgatggcagaggggcttcttttagctagtttgatcttttgggagtctgtctttccttagccgtctgagtgagctgtgtatgaacaagtcccaggagttccaagagtctagagtggtttttgcagcatgggttgagtgtacaaagcctactgtgcgtgagatcctctccttccgtttctgaaatctcttactcaggtaaggcctcgccaagcctctatgcaccccacaaagtttctgcctccatgccgtccacagcgcctcttcccagacagccaggcccatctgctgcccagggaagcgcaggcgcctgctagggacgctatggacaccgtgagtccaaggcgctgctcctgccttgaagccacgcgctccacgccgcggccctcccattttctgcgtcctcagcgggctgagctgccagagagccttcccggacctattcccgtcctatgcattcacattggcatcctggtttgggggaagaaaaacaacggcccttagcagcagccccgtttccagaatgtgctgcctgttccccaaagcctgcttgtcccgcggaggacggctgcctttgaccctgcttatttgtctcactggttatctaatgaggaacaaacactaacctaaggtacacatcccatctgggcggtggcttcactcctgagtctgcaaaatcccaggaaacttgggtcttgctgcccatccttcctcagcacagggaacccggaagcccgttgcactgacagaggctcacaccctctgggttttttgttttttttttaaacttcatttctcttccaacccattgtgttcctctgccctcattctttacctttgttgtaagaactttagctccagggaactgaggcagaggccctgtttgtggtctgtgttgacagccacccaccctctcccacctcatgctcctgcacctgcaccaccaaggttgatgccggattcgaagccaggaaggcccagtccctcctctgctctcctcaaagacgcaaaacattttccaacaagagctgtcacagtggcagcaaagcaggggccacccgtctccacagtccttcagagtttcagctgcatcctggtgtcccacccaggtcgagcccccaggcttctggaaaacagtgtgtgctctactttgatggaaacatggcaaggaatttaaagacaggaatgtattaatattattgaaggtgtgttcgtaacctctgattctgtggacttgccactttctccaaacgctcggttcctttgaagatttcttctgaacgtgtgtgcgcacgctgggcgggttcgtgcatacatgcggggaccccagactgtcagcacagggaagatggatcccatcctaatttttatcacctgaaggttggaaccagtgagggactgggagagagtgatttataagcaccaatatcaacttcatgtggatttttgacagaggggtagtttgtaatttcatttaaattcttttcagcagctggaaatattgcactatctgaaacactgaatctccttttgtaactggtgttcactgacaccttgatggctcttgatggctctaaaaagttgtaggattttttgtttttgtagctaacttatggattgagatgtgatcaaaggctttattaaatttgtacttcagca

SEQ ID NO: 453094 - DNA, 3051 bp, Homo sapiens
atatctcagcaaggcaggcagctggacccctcagagccaagtgaggagggccccacagttctcacggcaggagaaccagccagccccagagagactgcccacggactcagccctctctcggcagcccctttctctttccttcctcagggaagggtacctggagtgggggtgggtacgtgctgtttttagtggcgtctggcctcaccagggctccagatctgaggcagcatgggagaaagtgagagagtgggctcaggaggcaggcaggcgcagactcgaatgctactcctaccccagcaggctgtgcacgtccaggctcgctgcttcatttcctcattggccaaaggagaaggaaagccttcagggttacggagctctgtgtgtctcaagcctggcccactgtgggtgctcaaatgagagtcctactccccataaaaacccagtggccgcctctgggtgtagctgcctctcatgatgcagtttgagcccgtgatgccaccttgtacaggaagctacacagtcctcggcctccatgcttaagggaaagttggcccaagtcatggtctgccaccggccacagcaccggtgaggagggaggagtgcattcagaaatgtttgggcacctaacagtttttacagcattctactttttgtcaattggttaaccagtaattcgctgtgaaccggaaggccccatttccaaaagcttacttagtgcaggaattctctgtgcaggccccagggagaaggggttccttctctggaagccagtcgtcttgtgtctggggcttgacctcgggtagtggtgccagggcagcgccctgcactctgcccagcatccagggactggccagatcccctccctgggctccctggccttggcatcagcctgggctcccaaactaggcccttcccaattcaaggccacgatgtgtgccttcaggacaccggggacactctgggcagcgtcctccggggcttcttcaccatccgcaagcgggagccaggcggccgcctgcccacctcctccacctgcttcaacctgctcaagctgcccaactacagcaagaagagcgtcctccgcgagaagctgcgctacgccatcagcatgaacacgggctttgaactctcctagctcctgtcccagccctgcctccagggctcctgggctgccagggaccttcagctcccagaggcagtgtggtcctgggaatgtgaccaacatgccaggtgacattggcccctagaccctctctatagccatgagactccttgtggcctcaagaaatttagacgcccacgacagcactacacagcatctccaggtgatgcccaaggcacagggctgcagaaaataaacctccagattccaccaacacgggtccattcttcctggtgatggcagaggggcttcttttagctagtttgatcttttgggagtctgtctttccttagccgtctgagtgagctgtgtatgaacaagtcccaggagttccaagagtctagagtggtttttgcagcatgggttgagtgtacaaagcctactgtgcgtgagatcctctccttccgtttctgaaatctcttactcaggtaaggcctcgccaagcctctatgcaccccacaaagtttctgcctccatgccgtccacagcgcctcttcccagacagccaggcccatctgctgcccagggaagcgcaggcgcctgctagggacgctatggacaccgtgagtccaaggcgctgctcctgccttgaagccacgcgctccacgccgcggccctcccattttctgcgtcctcagcgggctgagctgccagagagccttcccggacctattcccgtcctatgcattcacattggcatcctggtttgggggaagaaaaacaacggcccttagcagcagccccgtttccagaatgtgctgcctgttccccaaagcctgcttgtcccgcggaggacggctgcctttgaccctgcttatttgtctcactggttatctaatgaggaacaaacactaacctaaggtacacatcccatctgggcggtggcttcactcctgagtctgcaaaatcccaggaaacttgggtcttgctgcccatccttcctcagcacagggaacccggaagcccgttgcactgacagaggctcacaccctctgggttttttgttttttttttaaacttcatttctcttccaacccattgtgttcctctgccctcattctttacctttgttgtaagaactttagctccagggaactgaggcagaggccctgtttgtggtctgtgttgacagccacccaccctctcccacctcatgctcctgcacctgcaccaccaaggttgatgccggattcgaagccaggaaggcccagtccctcctctgctctcctcaaagacgcaaaacattttccaacaagagctgtcacagtggcagcaaagcaggggccacccgtctccacagtccttcagagtttcagctgcatcctggtgtcccacccaggtcgagcccccaggcttctggaaaacagtgtgtgctctactttgatggaaacatggcaaggaatttaaagacaggaatgtattaatattattgaaggtgtgttcgtaacctctgattctgtggacttgccactttctccaaacgctcggttcctttgaagatttcttctgaacgtgtgtgcgcacgctgggcgggttcgtgcatacatgcggggaccccagactgtcagcacagggaagatggatcccatcctaatttttatcacctgaaggttggaaccagtgagggactgggagagagtgatttataagcaccaatatcaacttcatgtggatttttgacagaggggtagtttgtaatttcatttaaattcttttcagcagctggaaatattgcactatctgaaacactgaatctccttttgtaactggtgttcactgacaccttgatggctcttgatggctctaaaaagttgtaggattttttgtttttgtagctaacttatggattgagatgtgatcaaaggctttattaaatttgtacttcagca

SEQ ID NO: 453095 - DNA, 3978 bp, Homo sapiens
  misc_feature (3723)..(3723): n is a, c, g, or t
  misc_feature (3953)..(3953): n is a, c, g, or t
gaacaccgcggggcaagatggcggtagtgcgtcggctgctgccccgggtctggcagaactcgggtgttttgggctgagacagtggcagctgcggccccgaccccaagtgcggggacctccggcgaataaaggtcggcctgcgggtaggccggtagggcctgcggtccggcctgcgggagaactgggtcgtcagtcctccgagtggtggggctggggactttgagggagttggctctagggcacagtccctgcctggccaggtcggaggaacaagtgctgggatctggcgtgtgtgctccaggggctctttccgcggccctttccacctcttttcactttggggacggtaggcctttataaacggactaatgctgggtgatttgttcctgtggttgttgatgccgaggaaagactctgggccccaggactcacctaaactggagttcgaatactgttcgctcgctgtgtgaccttggaaaaaataacaagcttttctgaagtgagaagctgttctcagccacgagtcctgtgcaagatcactaatgattacctggcatttctgcgacacaggcaggtcctcagggtttgtgcaagtttgcaaacatgttcaccctgtctcagacctcgagagcatggttcatcgatagagcccgtcaggcacgagaagaaaggcttgtgcagaaggaacgggagcgggcagctgttgtgatccaggcccatgtccggagttttctctgtcggagtcgactgcagagagatatcaggagagagattgatgacttttttaaagcagatgaccctgagtccactaaaagaagtgcactttgtattttcaagattgccaggaaactgctgttcctattcagaatcaaagaggataatgagagatttgagaagttgtgtcgcagcatcctgagcagcatggatgctgagaatgagcctaaggtgtggtatgtgtccctggcttgttctaaggacctcaccctcctttggattcaacagatcaagaacattttgtggtactgctgtgattttctcaagcagctcaagcctgaaatcctgcaggactcccgactcatcaccctgtacctcacgatgcttgtcaccttcacagacacttcaacgtggaaaattcttcggggaaaaggtgaaagtcttcgaccagcgatgaaccacatttgtgcaaatataatgggacatctcaaccagcatggattttattctgtgctgcagaggtctgtgactcctgccccccagtgtgcaacttctccactctccaacacctgcacttggatttttacatttgcattcagcatacctggtgtcctcctcagaaacacttttcataggaagagcttgatgcctgctgtcctcttcttccttcccctgccttgtctcacttgtgggtcaggtaaagggaggacagtggtgctgggatcccttgaatgctctacatttttggctgcaagggtaatccagtcttttgacatttaaactctggaaggagacctcagggcttgttccctcagattccttcttggttgatgtctagaatcatatttctagctctgtgtcctcaaacagccctttccactttgtaccttgttgtgccagatcatacctctagggaattgttgagaaagcctgattgctgtttaaaggtacaatggaagtcttgagtttgagaagtaatgttgactttgcccttccttctccctagtgctgtgatgggctgtttcctgatttggtttcatatgctcctcacaacaaccctgtgaggtggtccgttggcagaagctggtatgactggcagttgtctcgctagaggaaccttctacttcataccataattaaacggcttctaaaataatatgatgtctttaaattttaagtctggcattatttgtattagctgtttttttaactttattattaaagaatttctaaccataatatttagagaaagagtggtagagttaacctcgttacccaatactttcttccctttccttttataaaaacactgcatacggttttttgtttttttgtttttttgttttttttttaagagacagggttgccctgtcacccaggctggcctcaaggaatcttcctgcctcagcctcctgagctgggactgtaggtacaagccaccatgcctggctcacaatacagtttttttatctgaagcactcagtttacttttttgctcttttatgtacaaatgaatataaagttgatatcatcctctgaccaattaaaacattcttttcagatattgttaacccgtggcctggcaagaccccgtccttgtctatccaaaggcactttaacagcagctttttctctagcgttacggtgagtaagaaaccatagctgaggtgttggcatgttcttgaatgcttcctcctcttggtttttctttctctcgttactggtattaggtatagacttgcccattttgtcagaatttatgggaagcattgttcttaatgaaagtgagcacatttgtgactgctcaaactttttcttaatcttcagtcttgaatatttcttaatcttcagccctgaatattattgcagtgtgatctttggaaactattcaaaatgaatttcttttatctaaaagaggccaagatgcaatcatttttccttttgaagttttaattgacaaaacaaaaaacctaggagccaggagaagcccagcaaagggcagggtgagaggattaaggaaataatgtgaatacgcatgtaaaatgttagaatttggaggaccagagaagaggtgatatttgccttcacttagtttggagatgtcaggtactgaagaagctaagttaattccttatggaaattacacctgcaattctgagaattgccaaatgtaaaacactatgcttgttcataggtccagaacatgtttaaactgtcaaggggaacactagcttggggagatgttaataaaagatcctggaaggaagagtgtcatggtggaaccagcttggtgaaagctgcctgctctgcccccatctgtggatctacagtacaccttcatgctgagagctctgagaagtgctgctatgctagcaggaccccatgggcttatttaacccggggttggcccaaacgtatctgagcatggaatacccctgccttgttttttggatgccgttgatatcccatgaaatcattttccatggaaaacctatttggaaaatgatgggctagagcatgggttggccaaattttctggaaagagccggataaatatttcaactctatgggccatacagcctctgtcacaaccactctgccattgcatcttgaaagcagtcgtagattgtacatacacaaatgagcatgactgtgttccagtaaaactttatttacaaaaataggccatagtttataaacacctggtctagactgtgctttccactaaccactagccacagggggctgtttaaatgaaaattcatttaagttaaataaaatgaagaattcacttcctcagttgcattagccacatttcaaatgctcagcggccacatgtaactagtagcaattgtgtgggacagcacagatatagaaaacttccagcatcacagaaagttctgttggacaaggctgacctagagcaggtctgtccgatggaaacacagttagagccacatttaaaaagccaaaagaggccaggcacggcggcccatgcctgtaatcccngcactttgggagactgaggtgggcagatcattttgagctcaggagttcaagaccagtctgggcaacatggccaaaccttgtctctacaaaaaatacaaacattagctgggcatggtgccatgtgcctgtggttccagctactcaggagtctgaggtgggaggatcactggagccagggaagtcaaggctgcagcgagccgtgattgagcttctccagcctggatgacagngtgatacctggtctcaaaaaaaaaa

SEQ ID NO: 453096 - DNA, 1418 bp, Homo sapiens
  misc_feature (1234)..(1234): n is a, c, g, or t
  misc_feature (1253)..(1253): n is a, c, g, or t
  misc_feature (1257)..(1257): n is a, c, g, or t
  misc_feature (1262)..(1262): n is a, c, g, or t
  misc_feature (1265)..(1265): n is a, c, g, or t
  misc_feature (1291)..(1291): n is a, c, g, or t
  misc_feature (1300)..(1300): n is a, c, g, or t
  misc_feature (1319)..(1319): n is a, c, g, or t
  misc_feature (1356)..(1356): n is a, c, g, or t
  misc_feature (1358)..(1358): n is a, c, g, or t
  misc_feature (1418)..(1418): n is a, c, g, or t
gaacaccgcggggcaagatggcggtagtgcgtcggctgctgccccgggtctggcagaactcgggtgttttgggctgagacagtggcagctgcggccccgaccccaagtgcggggacctccggcgaataaaggtcggcctgcgggtaggccggtagggcctgcggtccggcctgcgggagaactgggtcgtcagtcctccgagtggtggggctggggactttgagggagttggctctagggcacagtccctgcctggccaggtcggaggaacaagtgctgggatctggcgtgtgtgctccaggggctctttccgcggccctttccacctcttttcactttggggacggtaggcctttataaacggactaatgctgggtgatttgttcctgtggttgttgatgccgaggaaagactctgggccccaggactcacctaaactggagttcgaatactgttcgctcgctgtgtgaccttggaaaaaataacaagcttttctgaagtgagaagctgttctcagccacgagtcctgtgcaagatcactaatgattacctggcatttctgcgacacaggcaggtcctcagggtttgtgcaagtttgcaaacatgttcaccctgtctcagacctcgagagcatggttcatcgatagagcccgtcaggcacgagaagaaaggcttgtgcagaaggaacgggagcgggcagctgttgtgatccaggcccatgtccggagttttctctgtcggagtcgactgcagagagatatcaggagagagattgatgacttttttaaagcagatgaccctgagtccactaaaagaagtgcactttgtattttcaagattgccaggaaactgctgttcctattcagaatcaaagaggataatgagagatttgagaagttgtgtcgcagcatcctgagcagcatggatgctgagaatgagcctaaggtgtggtatgtgtccctggcttgttctaaggacctcaccctcctttggattcaacagatcaagaacattttgtggtactgctgtgattttctcaagcagctcaagcctgaaatcctgcaggactcccgactcatcaccctgtacctcacgatgcttgtcaccttcacagacacttcaacgtggaaaattcttcggggaaaaggtgaaagtcttcgaccagcgatgaaccacatttgtgcaaatataatgggacatctcaaccagcatggattttattctgtgctgcagncgcctgccacgccgcctcntcantcgcngcntctactccctcgactctctcgcgtcntcaataatnctccctccaccacaccaanccctcctccacgcctgcctcccgcctcgcagacgctncnagccaccccgcacgccccccccgcctacgacgaaccccctcccccacaccataattaaan

SEQ ID NO: 453097 - DNA, 1535 bp, Homo sapiens
gaacaccgcggggcaagatggcggtagtgcgtcggctgctgccccgggtctggcagaactcgggtgttttgggctgagacagtggcagctgcggccccgaccccaagtgcggggacctccggcgaataaaggtcggcctgcgggtaggccggtagggcctgcggtccggcctgcgggagaactgggtcgtcagtcctccgagtggtggggctggggactttgagggagttggctctagggcacagtccctgcctggccaggtcggaggaacaagtgctgggatctggcgtgtgtgctccaggggctctttccgcggccctttccacctcttttcactttggggacggtaggcctttataaacggactaatgctgggtgatttgttcctgtggttgttgatgccgaggaaagactctgggccccaggactcacctaaactggagttcgaatactgttcgctcgctgtgtgaccttggaaaaaataacaagcttttctgaagtgagaagctgttctcagccacgagtcctgtgcaagatcactaatgattacctggcatttctgcgacacaggcaggtcctcagggtttgtgcaagtttgcaaacatgttcaccctgtctcagacctcgagagcatggttcatcgatagagcccgtcaggcacgagaagaaaggcttgtgcagaaggaacgggagcgggcagctgttgtgatccaggcccatgtccggagttttctctgtcggagtcgactgcagagagatatcaggagagagattgatgacttttttaaagcagatgaccctgagtccactaaaagaagtgcactttgtattttcaagattgccaggaaactgctgttcctattcagaatcaaagaggataatgagagatttgagaagttgtgtcgcagcatcctgagcagcatggatgctgagaatgagcctaaggtgtggtatgtgtccctggcttgttctaaggacctcaccctcctttggattcaacagatcaagaacattttgtggtactgctgtgattttctcaagcagctcaagcctgaaatcctgcaggactcccgactcatcaccctgtacctcacgatgcttgtcaccttcacagacacttcaacgtggaaaattcttcggggaaaaggtctgtgggacttgcttcaaaatgttctctaaccaacatttccatagagagctcagggaccttttttcctttgtaagaagcatttttgccacaagcctcagggaaggccctgagaccatacaaatgaggatgcccttggtgctgaccatcagactgcatcgcagtatccacaatccattcagcattgtgtgttgtactcaacccttctttgaatttacatttaaagtcatggttcttctgattttaatttttatagttcccacagtgccttagcctccaagtgattacattcacttaagccttgtcattttacttggaaaatcattaggttgtgaataattctattttgcccataaaatttgcattataaacttcttccttccctggt

SEQ ID NO: 453098 - DNA, 339 bp, Homo sapiens
tggtcctctaattctgtaggaatgaatcagatggttgtagccccttctgtttcttgaattatcctttgattcttctcagcttgaccatgaaattcatctttttcttattcttactgcctttcagatgtagttactctagagtagggcatgtaggtagggtcttagtaaaaggagaggaattatagatgtggcctttttcaaacccccaatgcatataggcatgtaaatcctactcataaatgcctgcaacaacctagatgtggattgcatatttattatggtaataatgtttagttctaaatttttcagtcacgaatctcttacatattgatatgtctg

SEQ ID NO: 453099 - DNA, 716 bp, Homo sapiens
agttaactagtcaagagataaataacaaccaaaaaaaaaaaaaaaaaaaaaacactatctcaagagggtatgtgtttatgagccaaaagccagcttggataaaagtagggacaaggtccctgcctctgtatcagatggtctgccgttgacggcacctctgagtacccaccagcaccactgggaaagcaggagttgctgtgctcggtcccttccttggaggctgccttccctgccttgtggatatcccagttctggagctttgtggtcattggcctcccaacagaggctcccttcttccctcacctttaggcggctgccgagtgatagagcagaaggaggttcccaatgggctcagggacgaagcttgtggcaaggaaactccagctggctatgccggcctgtgccaggcacactacaaagagtatcttgtgagcctcatcaatgcccactcgctggacccagccaccttgtatgaggtggaagagctggagacggccactgagcgctacctgcacgtacgcccccagcctttggctggagaggatccccctgcttaccaggcccgcttgttacagaagctgacagaagaggtacccttgggacagagtatcccccgcaggcggaagtagctgagggcaagggtcccgatgagggtcccatggcctgctccctcaggaacagctccagcaccaataaagaggcatcttaccacccag

SEQ ID NO: 453100 - DNA, 2000 bp, Homo sapiens
gtggttaatagtttctatgaatcttgttattgttagcagcagctgcctgttactgaggcagttaccattgctgtacactgatgacatgatccatatgtctgagctgagccactgtcaccatcttagttcaggctgagggtgggtgaagggtgcccctcctgatgggcgggactgtgccttaggaaggggaagccgcaggtgcctgtccagaggagatcttctcggctctgcagtactcgggcactgaggtgcctctgcagtggttgcgctcagaactgccctacgtcctggagatggtggctgagctggctggacagcaggaccctgggctgggtgccttttcctgtcaggaggcccggagagcctggctggatcgtcatggcaaccttgatgaagctgtggaggagtgtgtgaggaccaggcgaaggaaggtgcaggagctccagtctctaggctttgggcctgaggaggggtctctccaggcattgttccagcacggaggtgatgtgtcacgggccctgactgagctacagcgccaacgcctagagcccttccgccagcgcctctgggacagtggccctgagcccaccccttcctgggatgggccagacaagcagagcctggtcaggcggcttttggcagtctacgcactccccagctggggccgggcagagctggcactgtcactgctgcaggagacacccaggaactatgagttgggggatgtggtagaagctgtgaggcacagccaggaccgggccttcctgcgccgcttgcttgcccaggagtgtgccgtgtgtggctgggccctgccccacaaccggatgcaggccctgacttcctgtgagtgcaccatctgtcctgactgcttccgccagcacttcaccatcgccttgaaggagaagcacatcacagacatggtgtgccctgcctgtggccgccccgacctcaccgatgacacacagttgctcagctacttctctacccttgacatccagcttcgcgagagcctagagccagatgcctatgcgttgttccataagaagctgaccgagggtgtgctgatgcgggaccccaagttcttgtggtgtgcccagtgctcctttggcttcatatatgagcgtgagcagctggaggcaacttgtccccagtgtcaccagaccttctgtgtgcgctgcaagcgccagtgggaggagcagcaccgaggtcggagctgtgaggacttccagaactggaaacgcatgaacgacccagaataccaggcccagggcctagcaatgtatcttcaggaaaacggcattgactgccccaaatgcaagttctcgtacgccctggcccgaggaggctgcatgcactttcactgtacccagtgccgccaccagttctgcagcggctgctacaatgccttttacgccaagaataaatgtccagagcctaactgcagggtgaaaaagtccctgcacggccaccaccctcgagactgcctcttctacctgcgggactggactgctctccggcttcagaagctgctacaggacaataacgtcatgtttaatacagagcctccagctggggcccgggcagtccctggaggcggctgccgagtgatagagcagaaggaggttcccaatgggctcagggacgaagcttgtggcaaggaaactccagctggctatgccggcctgtgccaggcacactacaaagagtatcttgtgagcctcatcaatgcccactcgctggacccagccaccttgtatgaggtggaagagctggagacggccactgagcgctacctgcacgtacgcccccagcctttggctggagaggatccccctgcttaccaggcccgcttgttacagaagctgacagaagaggtacccttgggacagagtatcccccgcaggcggaagtagctgagggcaagggtcccgatgagggtcccatggcctgctccctcaggaacagctccagcaccaataaagaggcatcttaccacccag

SEQ ID NO: 453101 - DNA, 3441 bp, Homo sapiens
ctctcctagtacttcctgttctcggctaaccctggcgctgggccgggggctggagagtgaccgtggtctgagtgacctggggcggctgcgtgggccggggtgggcctcaaagccgggcaccagacgggaggggcggcgctcgggccgcgcgctgcccgcgccgggtcctggcgggcggcgaggctggggctgactcctgcctcaggatgccgggggaggaagaggagcgggccttcctggtggcccgcgaggagctggcgagcgccctgaggagggattccgggcaggcgttttccctggagcagctccggccgctactagccagctctctgccgctagccgcccgctacctgcagctggacgccgcacgccttgtccgctgcaacgctcatggggagccccgaaactacctcaacaccctgtccacggctctgaacatcctggagaaatacggccgcaaccttctcagccctcagcggcctcggtactggcgtggtgtcaagtttaataaccctgtctttcgcagcacggtggatgctgtgcaggggggccgagatgtgctgcgattatatggctacacagaggagcaaccagatgggttgagcttccccgaagggcaggaggagccagatgagcaccaggttgctacagtcacactggaagtactgctgcttcggacagagctcagcctgctattgcagaatactcatccaagacagcaggcactggagcagctgttggaagacaaggttgaagatgatatgctgcagctttcagaatttgaccccctattgagagagattgctcctggccccctcaccacaccctctgtcccaggccctgtgtccagcctgtgaccacctgttccatggacacccatcccgtgctcatcacctccgccagaccctgcctggggtcctgcagggtacccacctgagccccagtttacctgcctcagcccaaccacggccccagtcgacctccctgctggccctgggagacagctctctttcttcccctaatcctgcaagtgctcatttgccctggcactgtgctgcctgtgccatgctaaatgagccttgggcagtgctctgtgtggcctgtgatcggccccgaggctgtaaggggttggggttgggaactgagggtccccaaggaactggaggcctagaacctgatcttgcacggggtcggtgggcctgccagagctgtacctttgagaatgaggcagctgctgtgctatgttccatatgtgagcgacctcggctggcccagcctcccagcttggtggtggattcccgagatgctggcatttgcctgcaaccccttcagcagggggatgctttgctggcctctgcccagagtcaagtctggtactgtattcactgtaccttctgcaactcgagccctggctgggtgtgtgttatgtgcaaccggactagtagccccattccagcacaacatgccccccggccctatgccagctctttggaaaagggaccccccaagcctgggcccccacgacgccttagtgcccccctgcccagttcctgtggagatcctgagaagcagcgccaagacaagatgcgggaagaaggcctccagctagtgagcatgatccgggaaggggaagccgcaggtgcctgtccagaggagatcttctcggctctgcagtactcgggcactgaggtgcctctgcagtggttgcgctcagaactgccctacgtcctggagatggtggctgagctggctggacagcaggaccctgggctgggtgccttttcctgtcaggaggcccggagagcctggctggatcgtcatggcaaccttgatgaagctgtggaggagtgtgtgaggaccaggcgaaggaaggtgcaggagctccagtctctaggctttgggcctgaggaggggtctctccaggcattgttccagcacggaggtgatgtgtcacgggccctgactgagctacagcgccaacgcctagagcccttccgccagcgcctctgggacagtggccctgagcccaccccttcctgggatgggccagacaagcagagcctggtcaggcggcttttggcagtctacgcactccccagctggggccgggcagagctggcactgtcactgctgcaggagacacccaggaactatgagttgggggatgtggtagaagctgtgaggcacagccaggaccgggccttcctgcgccgcttgcttgcccaggagtgtgccgtgtgtggctgggccctgccccacaaccggatgcaggccctgacttcctgtgagtgcaccatctgtcctgactgcttccgccagcacttcaccatcgccttgaaggagaagcacatcacagacatggtgtgccctgcctgtggccgccccgacctcaccgatgacacacagttgctcagctacttctctacccttgacatccagcttcgcgagagcctagagccagatgcctatgcgttgttccataagaagctgaccgagggtgtgctgatgcgggaccccaagttcttgtggtgtgcccagtgctcctttggcttcatatatgagcgtgagcagctggaggcaacttgtccccagtgtcaccagaccttctgtgtgcgctgcaagcgccagtgggaggagcagcaccgaggtcggagctgtgaggacttccagaactggaaacgcatgaacgacccagaataccaggcccagggcctagcaatgtatcttcaggaaaacggcattgactgccccaaatgcaagttctcgtacgccctggcccgaggaggctgcatgcactttcactgtacccagtgccgccaccagttctgcagcggctgctacaatgccttttacgccaagaataaatgtccagagcctaactgcagggtgaaaaagtccctgcacggccaccaccctcgagactgcctcttctacctgcgggactggactgctctccggcttcagaagctgctacaggacaataacgtcatgtttaatacagagcctccagctggggcccgggcagtccctggaggcggctgccgagtgatagagcagaaggaggttcccaatgggctcagggacgaagcttgtggcaaggaaactccagctggctatgccggcctgtgccaggcacactacaaagagtatcttgtgagcctcatcaatgcccactcgctggacccagccaccttgtatgaggtggaagagctggagacggccactgagcgctacctgcacgtacgcccccagcctttggctggagaggatccccctgcttaccaggcccgcttgttacagaagctgacagaagaggtacccttgggacagagtatcccccgcaggcggaagtagctgagggcaagggtcccgatgagggtcccatggcctgctccctcaggaacagctccagcaccaataaagaggcatcttaccacccag

SEQ ID NO: 453102 - DNA, 3214 bp, Homo sapiens
ctctcctagtacttcctgttctcggctaaccctggcgctgggccgggggctggagagtgaccgtggtctgagtgacctggggcggcgctactagccagctctctgccgctagccgcccgctacctgcagctggacgccgcacgccttgtccgctgcaacgctcatggggagccccgaaactacctcaacaccctgtccacggctctgaacatcctggagaaatacggccgcaaccttctcagccctcagcggcctcggtactggcgtggtgtcaagtttaataaccctgtctttcgcagcacggtggatgctgtgcaggggggccgagatgtgctgcgattatatggctacacagaggagcaaccagatgggttgagcttccccgaagggcaggaggagccagatgagcaccaggttgctacagtcacactggaagtactgctgcttcggacagagctcagcctgctattgcagaatactcatccaagacagcaggcactggagcagctgttggaagacaaggttgaagatgatatgctgcagctttcagaatttgaccccctattgagagagattgctcctggccccctcaccacaccctctgtcccaggccctgtgtccagcctgtgaccacctgttccatggacacccatcccgtgctcatcacctccgccagaccctgcctggggtcctgcagggtacccacctgagccccagtttacctgcctcagcccaaccacggccccagtcgacctccctgctggccctgggagacagctctctttcttcccctaatcctgcaagtgctcatttgccctggcactgtgctgcctgtgccatgctaaatgagccttgggcagtgctctgtgtggcctgtgatcggccccgaggctgtaaggggttggggttgggaactgagggtccccaaggaactggaggcctagaacctgatcttgcacggggtcggtgggcctgccagagctgtacctttgagaatgaggcagctgctgtgctatgttccatatgtgagcgacctcggctggcccagcctcccagcttggtggtggattcccgagatgctggcatttgcctgcaaccccttcagcagggggatgctttgctggcctctgcccagagtcaagtctggtactgtattcactgtaccttctgcaactcgagccctggctgggtgtgtgttatgtgcaaccggactagtagccccattccagcacaacatgccccccggccctatgccagctctttggaaaagggaccccccaagcctgggcccccacgacgccttagtgcccccctgcccagttcctgtggagatcctgagaagcagcgccaagacaagatgcgggaagaaggcctccagctagtgagcatgatccgggaaggggaagccgcaggtgcctgtccagaggagatcttctcggctctgcagtactcgggcactgaggtgcctctgcagtggttgcgctcagaactgccctacgtcctggagatggtggctgagctggctggacagcaggaccctgggctgggtgccttttcctgtcaggaggcccggagagcctggctggatcgtcatggcaaccttgatgaagctgtggaggagtgtgtgaggaccaggcgaaggaaggtgcaggagctccagtctctaggctttgggcctgaggaggggtctctccaggcattgttccagcacggaggtgatgtgtcacgggccctgactgagctacagcgccaacgcctagagcccttccgccagcgcctctgggacagtggccctgagcccaccccttcctgggatgggccagacaagcagagcctggtcaggcggcttttggcagtctacgcactccccagctggggccgggcagagctggcactgtcactgctgcaggagacacccaggaactatgagttgggggatgtggtagaagctgtgaggcacagccaggaccgggccttcctgcgccgcttgcttgcccaggagtgtgccgtgtgtggctgggccctgccccacaaccggatgcaggccctgacttcctgtgagtgcaccatctgtcctgactgcttccgccagcacttcaccatcgccttgaaggagaagcacatcacagacatggtgtgccctgcctgtggccgccccgacctcaccgatgacacacagttgctcagctacttctctacccttgacatccagcttcgcgagagcctagagccagatgcctatgcgttgttccataagaagctgaccgagggtgtgctgatgcgggaccccaagttcttgtggtgtgcccagtgctcctttggcttcatatatgagcgtgagcagctggaggcaacttgtccccagtgtcaccagaccttctgtgtgcgctgcaagcgccagtgggaggagcagcaccgaggtcggagctgtgaggacttccagaactggaaacgcatgaacgacccagaataccaggcccagggcctagcaatgtatcttcaggaaaacggcattgactgccccaaatgcaagttctcgtacgccctggcccgaggaggctgcatgcactttcactgtacccagtgccgccaccagttctgcagcggctgctacaatgccttttacgccaagaataaatgtccagagcctaactgcagggtgaaaaagtccctgcacggccaccaccctcgagactgcctcttctacctgcgggactggactgctctccggcttcagaagctgctacaggacaataacgtcatgtttaatacagagcctccagctggggcccgggcagtccctggaggcggctgccgagtgatagagcagaaggaggttcccaatgggctcagggacgaagcttgtggcaaggaaactccagctggctatgccggcctgtgccaggcacactacaaagagtatcttgtgagcctcatcaatgcccactcgctggacccagccaccttgtatgaggtggaagagctggagacggccactgagcgctacctgcacgtacgcccccagcctttggctggagaggatccccctgcttaccaggcccgcttgttacagaagctgacagaagaggtacccttgggacagagtatcccccgcaggcggaagtagctgagggcaagggtcccgatgagggtcccatggcctgctccctcaggaacagctccagcaccaataaagaggcatcttaccacccag

SEQ ID NO: 453103 - DNA, 3487 bp, Homo sapiens
ctctcctagtacttcctgttctcggctaaccctggcgctgggccgggggctggagagtgaccgtggtctgagtgacctggggcggctgcgtgggccggggtgggcctcaaagccgggcaccagacgggaggggcggcgctcgggccgcgcgctgcccgcgccgggtcctggcgggcggcgaggctggggctgactcctgcctcaggatgccgggggaggaagaggagcgggccttcctggtggcccgcgaggagctggcgagcgccctgaggagggattccgggcaggcgttttccctggagcagctccggccgctactagccagctctctgccgctagccgcccgctacctgcagctggacgccgcacgccttgtccgctgcaacgctcatggggagccccgaaactacctcaacaccctgtccacggctctgaacatcctggagaaatacggccgcaaccttctcagccctcagcggcctcggtactggcgtggtgtcaagtttaataaccctgtctttcgcagcacggtggatgctgtgcaggggggccgagatgtgctgcgattatatggctacacagaggagcaaccagatgggttgagcttccccgaagggcaggaggagccagatgagcaccaggttgctacagtcacactggaagtactgctgcttcggacagagctcagcctgctattgcagaatactcatccaagacagcaggcactggagcagctgttggaagacaaggttgaagatgatatgctgcagctttcagaatttgaccccctattgagagagattgctcctggccccctcaccacaccctctgtcccaggctccactcctggtccctgcttcctctgtggttctgccccaggcacactgcactgcccatcctgtaaacaggccctgtgtccagcctgtgaccacctgttccatggacacccatcccgtgctcatcacctccgccagaccctgcctggggtcctgcagggtacccacctgagccccagtttacctgcctcagcccaaccacggccccagtcgacctccctgctggccctgggagacagctctctttcttcccctaatcctgcaagtgctcatttgccctggcactgtgctgcctgtgccatgctaaatgagccttgggcagtgctctgtgtggcctgtgatcggccccgaggctgtaaggggttggggttgggaactgagggtccccaaggaactggaggcctagaacctgatcttgcacggggtcggtgggcctgccagagctgtacctttgagaatgaggcagctgctgtgctatgttccatatgtgagcgacctcggctggcccagcctcccagcttggtggtggattcccgagatgctggcatttgcctgcaaccccttcagcagggggatgctttgctggcctctgcccagagtcaagtctggtactgtattcactgtaccttctgcaactcgagccctggctgggtgtgtgttatgtgcaaccggactagtagccccattccagcacaacatgccccccggccctatgccagctctttggaaaagggaccccccaagcctgggcccccacgacgccttagtgcccccctgcccagttcctgtggagatcctgagaagcagcgccaagacaagatgcgggaagaaggcctccagctagtgagcatgatccgggaaggggaagccgcaggtgcctgtccagaggagatcttctcggctctgcagtactcgggcactgaggtgcctctgcagtggttgcgctcagaactgccctacgtcctggagatggtggctgagctggctggacagcaggaccctgggctgggtgccttttcctgtcaggaggcccggagagcctggctggatcgtcatggcaaccttgatgaagctgtggaggagtgtgtgaggaccaggcgaaggaaggtgcaggagctccagtctctaggctttgggcctgaggaggggtctctccaggcattgttccagcacggaggtgatgtgtcacgggccctgactgagctacagcgccaacgcctagagcccttccgccagcgcctctgggacagtggccctgagcccaccccttcctgggatgggccagacaagcagagcctggtcaggcggcttttggcagtctacgcactccccagctggggccgggcagagctggcactgtcactgctgcaggagacacccaggaactatgagttgggggatgtggtagaagctgtgaggcacagccaggaccgggccttcctgcgccgcttgcttgcccaggagtgtgccgtgtgtggctgggccctgccccacaaccggatgcaggccctgacttcctgtgagtgcaccatctgtcctgactgcttccgccagcacttcaccatcgccttgaaggagaagcacatcacagacatggtgtgccctgcctgtggccgccccgacctcaccgatgacacacagttgctcagctacttctctacccttgacatccagcttcgcgagagcctagagccagatgcctatgcgttgttccataagaagctgaccgagggtgtgctgatgcgggaccccaagttcttgtggtgtgcccagtgctcctttggcttcatatatgagcgtgagcagctggaggcaacttgtccccagtgtcaccagaccttctgtgtgcgctgcaagcgccagtgggaggagcagcaccgaggtcggagctgtgaggacttccagaactggaaacgcatgaacgacccagaataccaggcccagggcctagcaatgtatcttcaggaaaacggcattgactgccccaaatgcaagttctcgtacgccctggcccgaggaggctgcatgcactttcactgtacccagtgccgccaccagttctgcagcggctgctacaatgccttttacgccaagaataaatgtccagagcctaactgcagggtgaaaaagtccctgcacggccaccaccctcgagactgcctcttctacctgcgggactggactgctctccggcttcagaagctgctacagagcctccagctggggcccgggcagtccctggaggcggctgccgagtgatagagcagaaggaggttcccaatgggctcagggacgaagcttgtggcaaggaaactccagctggctatgccggcctgtgccaggcacactacaaagagtatcttgtgagcctcatcaatgcccactcgctggacccagccaccttgtatgaggtggaagagctggagacggccactgagcgctacctgcacgtacgcccccagcctttggctggagaggatccccctgcttaccaggcccgcttgttacagaagctgacagaagaggtacccttgggacagagtatcccccgcaggcggaagtagctgagggcaagggtcccgatgagggtcccatggcctgctccctcaggaacagctccagcaccaataaagaggcatcttaccacccag

SEQ ID NO: 453104 - DNA, 1292 bp, Homo sapiens
ccctgcccagttgttaattagaccctgatttcttagtggacacctggccactgcctcttccctagcctggcagctgtggcttctgaccccctcccctccaacccctcaccctccagatgcaggccctgacttcctgtgagtgcaccatctgtcctgactgcttccgccagcacttcaccatcgccttgaaggagaagcacatcacagacatggtgtgccctgcctgtggccgccccgacctcaccgatgacacacagttgctcagctacttctctacccttgacatccagcttcgcgagagcctagagccagatgcctatgcgttgttccataagaagctgaccgagggtgtgctgatgcgggaccccaagttcttgtggtgtgcccagtgctcctttggcttcatatatgagcgtgagcagctggaggcaacttgtccccagtgtcaccagaccttctgtgtgcgctgcaagcgccagtgggaggagcagcaccgaggtcggagctgtgaggacttccagaactggaaacgcatgaacgacccagaataccaggcccagggcctagcaatgtatcttcaggaaaacggcattgactgccccaaatgcaagttctcgtacgccctggcccgaggaggctgcatgcactttcactgtacccagtgccgccaccagttctgcagcggctgctacaatgccttttacgccaagaataaatgtccagagcctaactgcagggtgaaaaagtccctgcacggccaccaccctcgagactgcctcttctacctgcgggactggactgctctccggcttcagaagctgctacaggacaataacgtcatgtttaatacagagcctccagctggggcccgggcagtccctggaggcggctgccgagtgatagagcagaaggaggttcccaatgggctcagggacgaagcttgtggcaaggaaactccagctggctatgccggcctgtgccaggcacactacaaagagtatcttgtgagcctcatcaatgcccactcgctggacccagccaccttgtatgaggtggaagagctggagacggccactgagcgctacctgcacgtacgcccccagcctttggctggagaggatccccctgcttaccaggcccgcttgttacagaagctgacagaagaggtacccttgggacagagtatcccccgcaggcggaagtagctgagggcaagggtcccgatgagggtcccatggcctgctccctcaggaacagctccagcaccaataaagaggcatcttaccacccag

SEQ ID NO: 453105 - DNA, 3415 bp, Homo sapiens
ctctcctagtacttcctgttctcggctaaccctggcgctgggccgggggctggagagtgaccgtggtctgagtgacctggggcggctgcgtgggccggggtgggcctcaaagccgggcaccagacgggaggggcggcgctcgggccgcgcgctgcccgcgccgggtcctggcgggcggcgaggctggggctgactcctgcctcaggatgccgggggaggaagaggagcgggccttcctggtggcccgcgaggagctggcgagcgccctgaggagggattccgggcaggcgttttccctggagcagctccggccgctactagccagctctctgccgctagccgcccgctacctgcagctggacgccgcacgccttgtccgctgcaacgctcatggggagccccgaaactacctcaacaccctgtccacggctctgaacatcctggagaaatacggccgcaaccttctcagccctcagcggcctcggtactggcgtggtgtcaagtttaataaccctgtctttcgcagcacggtggatgctgtgcaggggggccgagatgtgctgcgattatatggctacacagaggagcaaccagatgggttgagcttccccgaagggcaggaggagccagatgagcaccaggttgctacagtcacactggaagtactgctgcttcggacagagctcagcctgctattgcagaatactcatccaagacagcaggcactggagcagctgttggaagacaaggttgaagatgatatgctgcagctttcagaatttgaccccctattgagagagattgctcctggccccctcaccacaccctctgtcccaggctccactcctggtccctgcttcctctgtggttctgccccaggcacactgcactgcccatcctgtaaacaggccctgtgtccagcctgtgaccacctgttccatggacacccatcccgtgctcatcacctccgccagaccctgcctggggtcctgcagggtacccacctgagccccagtttacctgcctcagcccaaccacggccccagtcgacctccctgctggccctgggagacagctctctttcttcccctaatcctgcaagtgctcatttgccctggcactgtgctgcctgtgccatgctaaatgagccttgggcagtgctctgtgtggcctgtgatcggccccgaggctgtaaggggttggggttgggaactgagggtccccaaggaactggaggcctagaacctgatcttgcacggggtcggtgggcctgccagagctgtacctttgagaatgaggcagctgctgtgctatgttccatatgtgagcgacctcggctggcccagcctcccagcttggtggtggattcccgagatgctggcatttgcctgcaaccccttcagcagggggatgctttgctggcctctgcccagagtcaagtctggtactgtattcactgtaccttctgcaactcgagccctggctgggtgtgtgttatgtgcaaccggactagtagccccattccagcacaacatgccccccggccctatgccagctctttggaaaagggaccccccaagcctgggcccccacgacgccttagtgcccccctgcccagttcctgtggagatcctgagaagcagcgccaagacaagatgcgggaagaaggcctccagctagtgagcatgatccgggaaggggaagccgcaggtgcctgtccagaggagatcttctcggctctgcagtactcgggcactgaggtgcctctgcagtggttgcgctcagaactgccctacgtcctggagatggtggctgagctggctggacagcaggaccctgggctgggtgccttttcctgtcaggaggcccggagagcctggctggatcgtcatggcaaccttgatgaagctgtggaggagtgtgtgaggaccaggcgaaggaaggtgcaggagctccagtctctaggctttgggcctgaggaggggtctctccaggcattgttccagcacggaggtgatgtgtcacgggccctgactgagctacagcgccaacgcctagagcccttccgccagcgcctctgggacagtggccctgagcccaccccttcctgggatgggccagacaagcagagcctggtcaggcggcttttggcagtctacgcactccccagctggggccgggcagagctggcactgtcactgctgcaggagacacccaggaactatgagttgggggatgtggtagaagctgtgaggcacagccaggaccgggccttcctgcgccgcttgcttgcccaggagtgtgccgtgtgtggctgggccctgccccacaaccggatgcaggccctgacttcctgtgagtgcaccatctgtcctgactgcttccgccagcacttcaccatcgccttgaaggagaagcacatcacagacatggtgtgccctgcctgtggccgccccgacctcaccgatgacacacagttgctcagctacttctctacccttgacatccagcttcgcgagagcctagagccagatgcctatgcgttgttccataagaagctgaccgagggtgtgctgatgcgggaccccaagttcttgtggtgtgcccagtgctcctttggcttcatatatgagcgtgagcagctggaggcaacttgtccccagtgtcaccagaccttctgtgtgcgctgcaagcgccagtgggaggagcagcaccgaggtcggagctgtgaggacttccagaactggaaacgcatgaacgacccagaataccaggcccagggcctagcaatgtatcttcaggaaaacggcattgactgccccaaatgcaagttctcgtacgccctggcccgaggaggctgcatgcactttcactgtacccagtgccgccaccagttctgcagcggctgctacaatgccttttacgccaagaataaatgtccagagcctaactgcagggtgaaaaagtccctgcacggccaccaccctcgagactgcctcttctacctgcgggactggactgctctccggcttcagaagctgctacaggacaataacgtcatgtttaatacagagcctccagctggggcccgggcagtccctggagggcacactacaaagagtatcttgtgagcctcatcaatgcccactcgctggacccagccaccttgtatgaggtggaagagctggagacggccactgagcgctacctgcacgtacgcccccagcctttggctggagaggatccccctgcttaccaggcccgcttgttacagaagctgacagaagaggtacccttgggacagagtatcccccgcaggcggaagtagctgagggcaagggtcccgatgagggtcccatggcctgctccctcaggaacagctccagcaccaataaagaggcatcttaccacccag

SEQ ID NO: 453106 - DNA, 996 bp, Homo sapiens
aacttaaggggccttaaaagggttcgaaggcccccgcgcgtgggttttaatcggcagaagctgatgccggacccttatctgtggtgtgcccagtgctcctttggcttcatatatgagcgtgagcagctggaggcaacttgtccccagtgtcaccagaccttctgtgtgcgctgcaagcgccagtgggaggagcagcaccgaggtcggagctgtgaggacttccagaactggaaacgcatgaacgacccagaataccaggcccagggcctagcaatgtatcttcaggaaaacggcattgactgccccaaatgcaagttctcgtacgccctggcccgaggaggctgcatgcactttcactgtacccagtgccgccaccagttctgcagcggctgctacaatgccttttacgccaagaataaatgtccagagcctaactgcagggtgaaaaagtccctgcacggccaccaccctcgagactgcctcttctacctgcgggactggactgctctccggcttcagaagctgctacaggacaataacgtcatgtttaatacagagcctccagctggggcccgggcagtccctggaggcggctgccgagtgatagagcagaaggaggttcccaatgggctcagggacgaagcttgtggcaaggaaactccagctggctatgccggcctgtgccaggcacactacaaagagtatcttgtgagcctcatcaatgcccactcgctggacccagccaccttgtatgaggtggaagagctggagacggccactgagcgctacctgcacgtacgcccccagcctttggctggagaggatccccctgcttaccaggcccgcttgttacagaagctgacagaagaggtacccttgggacagagtatcccccgcaggcggaagtagctgagggcaagggtcccgatgagggtcccatggcctgctccctcaggaacagctccagcaccaataaagaggcatcttaccacccag

SEQ ID NO: 453107 - DNA, 3812 bp, Homo sapiens
ctctcctagtacttcctgttctcggctaaccctggcgctgggccgggggctggagagtgaccgtggtctgagtgacctggggcggctgcgtgggccggggtgggcctcaaagccgggcaccagacgggaggggcggcgctcgggccgcgcgctgcccgcgccgggtcctggcgggcggcgaggctggggctgactcctgcctcaggatgccgggggaggaagaggagcgggccttcctggtggcccgcgaggagctggcgagcgccctgaggagggattccgggcaggcgttttccctggagcagctccggccgctactagccagctctctgccgctagccgcccgctacctgcagctggacgccgcacgccttgtccgctgcaacgctcatggggagccccgaaactacctcaacaccctgtccacggctctgaacatcctggagaaatacggccgcaaccttctcagccctcagcggcctcggtactggcgtggtgtcaagtttaataaccctgtctttcgcagcacggtggatgctgtgcaggggggccgagatgtgctgcgattatatggctacacagaggagcaaccagatgggttgagcttccccgaagggcaggaggagccagatgagcaccaggttgctacagtcacactggaagtactgctgcttcggacagagctcagcctgctattgcagaatactcatccaagacagcaggcactggagcagctgttggaagacaaggttgaagatgatatgctgcagctttcagaatttgaccccctattgagagagattgctcctggccccctcaccacaccctctgtcccaggctccactcctggtccctgcttcctctgtggttctgccccaggcacactgcactgcccatcctgtaaacaggccctgtgtccagcctgtgaccacctgttccatggacacccatcccgtgctcatcacctccgccagaccctgcctggggtcctgcagggtacccacctgagccccagtttacctgcctcagcccaaccacggccccagtcgacctccctgctggccctgggagacagctctctttcttcccctaatcctgcaagtgctcatttgccctggcactgtgctgcctgtgccatgctaaatgagccttgggcagtgctctgtgtggcctgtgatcggccccgaggctgtaaggggttggggttgggaactgagggtccccaaggaactggaggcctagaacctgatcttgcacggggtcggtgggcctgccagagctgtacctttgagaatgaggcagctgctgtgctatgttccatatgtgagcgacctcggctggcccagcctcccagcttggtggtggattcccgagatgctggcatttgcctgcaaccccttcagcagggggatgctttgctggcctctgcccagagtcaagtctggtactgtattcactgtaccttctgcaactcgagccctggctgggtgtgtgttatgtgcaaccggactagtagccccattccagcacaacatgccccccggccctatgccagctctttggaaaagggaccccccaagcctgggcccccacgacgccttagtgcccccctgcccagttcctgtggagatcctgagaagcagcgccaagacaagatgcgggaagaaggcctccagctagtgagcatgatccgggaaggggaagccgcaggtgcctgtccagaggagatcttctcggctctgcagtactcgggcactgaggtgcctctgcagtggttgcgctcagaactgccctacgtcctggagatggtggctgagctggctggacagcaggaccctgggctgggtgccttttcctgtcaggaggcccggagagcctggctggatcgtcatggcaaccttgatgaagctgtggaggagtgtgtgaggaccaggcgaaggaaggtgcaggagctccagtctctaggctttgggcctgaggaggggtctctccaggcattgttccagcacggaggtgatgtgtcacgggccctgactgagctacagcgccaacgcctagagcccttccgccagcgcctctgggacagtggccctgagcccaccccttcctgggatgggccagacaagcagagcctggtcaggcggcttttggcagtctacgcactccccagctggggccgggcagagctggcactgtcactgctgcaggagacacccaggaactatgagttgggggatgtggtagaagctgtgaggcacagccaggaccgggccttcctgcgccgcttgcttgcccaggagtgtgccgtgtgtggctgggccctgccccacaaccggatgcaggccctgacttcctgtgagtgcaccatctgtcctgactgcttccgccagcacttcaccatcgccttgaaggagaagcacatcacagacatggtgtgccctgcctgtggccgccccgacctcaccgatgacacacagttgctcagctacttctctacccttgacatccagcttcgcgagagcctagagccagatgcctatgcgttgttccataagaagctgaccgagggtgtgctgatgcgggaccccaagttcttgtggtgtgcccagtgctcctttggcttcatatatgagcgtgagcagctggaggcaacttgtccccagtgtcaccagaccttctgtgtgcgctgcaagcgccagtgggaggagcagcaccgaggtcggagctgtgaggacttccagaactggaaacgcatgaacgacccagaataccaggcccagggcctagcaatgtatcttcaggaaaacggcattgactgccccaaatgcaagttctcgtacgccctggcccgaggaggctgcatgcactttcactgtacccagtgccgccaccagttctgcagcggctgctacaatgccttttacgccaagaatgacaataacgtcatgtttaatacagagcctccagctggggcccgggcagtccctggaggcggctgccgagtgatagagcagaaggaggttcccaatgggctcagggacgaagcttgtggcaaggaaactccagctggctatgccggcctgtgccaggcacactacaaagagtatcttgtgagcctcatcaatgcccactcgctggacccagccaccttgtatgaggtggaagagctggagacggccactgagcgctacctgcacgtacgcccccagcctttggctggagaggatccccctgcttaccaggcccgcttgttacagaagctgacagaagaggtacccttgggacagagtatcccccgcaggcggaagtagctgagggcaagggtcccgatgagggtcccatggcctgctccctcaggaacagctccagcaccaataaagaggcatcttaccacccagaaaaaaaaaaaaaaacaaaaagatagacagaaaaaaataacacagagaacagagctaataccacagaaagagacacaacacgcaagcaatgacagcacaaagaatacgcgaatatgagaaccaaggggcggggcaccatcatgaatcacccccgagcggcaacttaatcgtagtagactctcaccccgctgtgttatgttgaaaaaagaggtagtgcccaacataatgcacggagagcatatatatcaacaacagccaccccgtcacggtggggtgatggtatttaacaaaaaagtagcacgttggttggagagagacccactgctgtagcctgagaagattcttcggtggggagcgagccaccatatttatctggcggggggacaagacataggagggagaaaattctacgtg

SEQ ID NO: 453108 - DNA, 438 bp, Homo sapiens
agcaggcagtgtgggcacaggtgggttgttaatcttgttcgtccaggtgtctcagagtccagctatgttagacacactcagttaatattagccaacacaacaaatattctgctcccttttctccccagggcacactacaaagagtatcttgtgagcctcatcaatgcccactcgctggacccagccaccttgtatgaggtggaagagctggagacggccactgagcgctacctgcacgtacgcccccagcctttggctggagaggatccccctgcttaccaggcccgcttgttacagaagctgacagaagaggtacccttgggacagagtatcccccgcaggcggaagtagctgagggcaagggtcccgatgagggtcccatggcctgctccctcaggaacagctccagcaccaataaagaggcatcttaccacccag

SEQ ID NO: 453109 - DNA, 393 bp, Homo sapiens
gggttgggaactgagggtccccaaggaactggaggcctagaacctgatcttgcacggggtcggtgggcctgccagagctgtacctttgagaatgaggcagctgctgtgctatgttccatatgtgagcgacctcggctggcccagcctcccagcttggtggtggattcccgagatgctggcatttgcctgcaaccccttcaggtaactggccttcccagctctttatcgtgtgttacctcaggcattctcttccctatcccatgttttccttcagttcctcccaactccctgtatttctgttgtgaacttcagccagccagtcaaagggataattctctctgccttcccagcagggggatgctttgctggcctctgcccagagtcaagtctggt

SEQ ID NO: 453110 - DNA, 3512 bp, Homo sapiens
ctctcctagtacttcctgttctcggctaaccctggcgctgggccgggggctggagagtgaccgtggtctgagtgacctggggcggctgcgtgggccggggtgggcctcaaagccgggcaccagacgggaggggcggcgctcgggccgcgcgctgcccgcgccgggtcctggcgggcggcgaggctggggctgactcctgcctcaggatgccgggggaggaagaggagcgggccttcctggtggcccgcgaggagctggcgagcgccctgaggagggattccgggcaggcgttttccctggagcagctccggccgctactagccagctctctgccgctagccgcccgctacctgcagctggacgccgcacgccttgtccgctgcaacgctcatggggagccccgaaactacctcaacaccctgtccacggctctgaacatcctggagaaatacggccgcaaccttctcagccctcagcggcctcggtactggcgtggtgtcaagtttaataaccctgtctttcgcagcacggtggatgctgtgcaggggggccgagatgtgctgcgattatatggctacacagaggagcaaccagatgggttgagcttccccgaagggcaggaggagccagatgagcaccaggttgctacagtcacactggaagtactgctgcttcggacagagctcagcctgctattgcagaatactcatccaagacagcaggcactggagcagctgttggaagacaaggttgaagatgatatgctgcagctttcagaatttgaccccctattgagagagattgctcctggccccctcaccacaccctctgtcccaggctccactcctggtccctgcttcctctgtggttctgccccaggcacactgcactgcccatcctgtaaacaggccctgtgtccagcctgtgaccacctgttccatggacacccatcccgtgctcatcacctccgccagaccctgcctggggtcctgcagggtacccacctgagccccagtttacctgcctcagcccaaccacggccccagtcgacctccctgctggccctgggagacagctctctttcttcccctaatcctgcaagtgctcatttgccctggcactgtgctgcctgtgccatgctaaatgagccttgggcagtgctctgtgtggcctgtgatcggccccgaggctgtaaggggttggggttgggaactgagggtccccaaggaactggaggcctagaacctgatcttgcacggggtcggtgggcctgccagagctgtacctttgagaatgaggcagctgctgtgctatgttccatatgtgagcgacctcggctggcccagcctcccagcttggtggtggattcccgagatgctggcatttgcctgcaaccccttcagcagggggatgctttgctggcctctgcccagagtcaagtctggtactgtattcactgtaccttctgcaactcgagccctggctgggtgtgtgttatgtgcaaccggactagtagccccattccagcacaacatgccccccggccctatgccagctctttggaaaagggaccccccaagcctgggcccccacgacgccttagtgcccccctgcccagttcctgtggagatcctgagaagcagcgccaagacaagatgcgggaagaaggcctccagctagtgagcatgatccgggaaggggaagccgcaggtgcctgtccagaggagatcttctcggctctgcagtactcgggcactgaggtgcctctgcagtggttgcgctcagaactgccctacgtcctggagatggtggctgagctggctggacagcaggaccctgggctgggtgccttttcctgtcaggaggcccggagagcctggctggatcgtcatggcaaccttgatgaagctgtggaggagtgtgtgaggaccaggcgaaggaaggtgcaggagctccagtctctaggctttgggcctgaggaggggtctctccaggcattgttccagcacggaggtgatgtgtcacgggccctgactgagctacagcgccaacgcctagagcccttccgccagcgcctctgggacagtggccctgagcccaccccttcctgggatgggccagacaagcagagcctggtcaggcggcttttggcagtctacgcactccccagctggggccgggcagagctggcactgtcactgctgcaggagacacccaggaactatgagttgggggatgtggtagaagctgtgaggcacagccaggaccgggccttcctgcgccgcttgcttgcccaggagtgtgccgtgtgtggctgggccctgccccacaaccggatgcaggccctgacttcctgtgagtgcaccatctgtcctgactgcttccgccagcacttcaccatcgccttgaaggagaagcacatcacagacatggtgtgccctgcctgtggccgccccgacctcaccgatgacacacagttgctcagctacttctctacccttgacatccagcttcgcgagagcctagagccagatgcctatgcgttgttccataagaagctgaccgagggtgtgctgatgcgggaccccaagttcttgtggtgtgcccagtgctcctttggcttcatatatgagcgtgagcagctggaggcaacttgtccccagtgtcaccagaccttctgtgtgcgctgcaagcgccagtgggaggagcagcaccgaggtcggagctgtgaggacttccagaactggaaacgcatgaacgacccagaataccaggcccagggcctagcaatgtatcttcaggaaaacggcattgactgccccaaatgcaagttctcgtacgccctggcccgaggaggctgcatgcactttcactgtacccagtgccgccaccagttctgcagcggctgctacaatgccttttacgccaagaataaatgtccagagcctaactgcagggtgaaaaagtccctgcacggccaccaccctcgagactgcctcttctacctgcgggactggactgctctccggcttcagaagctgctacaggacaataacgtcatgtttaatacagagcctccagctggggcccgggcagtccctggaggcggctgccgagtgatagagcagaaggaggttcccaatgggctcagggacgaagcttgtggcaaggaaactccagctggctatgccggcctgtgccaggcacactacaaagagtatcttgtgagcctcatcaatgcccactcgctggacccagccaccttgtatgaggtggaagagctggagacggccactgagcgctacctgcacgtacgcccccagcctttggctggagaggatccccctgcttaccaggcccgcttgttacagaagctgacagaagaggtacccttgggacagagtatcccccgcaggcggaagtagctgagggcaagggtcccgatgagggtcccatggcctgctccctcaggaacagctccagcaccaataaagaggcatcttaccacccag

SEQ ID NO: 453111 - DNA, 1810 bp, Homo sapiens
ctctcctagtacttcctgttctcggctaaccctggcgctgggccgggggctggagagtgaccgtggtctgagtgacctggggcggctgcgtgggccggggtgggcctcaaagccgggcaccagacgggaggggcggcgctcgggccgcgcgctgcccgcgccgggtcctggcgggcggcgaggctggggctgactcctgcctcaggatgccgggggaggaagaggagcgggccttcctggtggcccgcgaggagctggcgagcgccctgaggagggattccgggcaggcgttttccctggagcagctccggccgctactagccagctctctgccgctagccgcccgctacctgcagctggacgccgcacgccttgtccgctgcaacgctcatggggagccccgaaactacctcaacaccctcccaccccttcctgggatgggccagacaagcagagcctggtcaggcggcttttggcagtctacgcactccccagctggggccgggcagagctggcactgtcactgctgcaggagacacccaggaactatgagttgggggatgtggtagaagctgtgaggcacagccaggaccgggccttcctgcgccgcttgcttgcccaggagtgtgccgtgtgtggctgggccctgccccacaaccggatgcaggccctgacttcctgtgagtgcaccatctgtcctgactgcttccgccagcacttcaccatcgccttgaaggagaagcacatcacagacatggtgtgccctgcctgtggccgccccgacctcaccgatgacacacagttgctcagctacttctctacccttgacatccagcttcgcgagagcctagagccagatgcctatgcgttgttccataagaagctgaccgagggtgtgctgatgcgggaccccaagttcttgtggtgtgcccagtgctcctttggcttcatatatgagcgtgagcagctggaggcaacttgtccccagtgtcaccagaccttctgtgtgcgctgcaagcgccagtgtgaggacttccagaactggaaacgcatgaacgacccagaataccaggcccagggcctagcaatgtatcttcaggaaaacggcattgactgccccaaatgcaagttctcgtacgccctggcccgaggaggctgcatgcactttcactgtacccagtgccgccaccagttctgcagcggctgctacaatgccttttacgccaagaataaatgtccagagcctaactgcagggtgaaaaagtccctgcacggccaccaccctcgagactgcctcttctacctgcgggactggactgctctccggcttcagaagctgctacaggacaataacgtcatgtttaatacagagcctccagctggggcccgggcagtccctggaggcggctgccgagtgatagagcagaaggaggttcccaatgggctcagggacgaagcttgtggcaaggaaactccagctggctatgccggcctgtgccaggcacactacaaagagtatcttgtgagcctcatcaatgcccactcgctggacccagccaccttgtatgaggtggaagagctggagacggccactgagcgctacctgcacgtacgcccccagcctttggctggagaggatccccctgcttaccaggcccgcttgttacagaagctgacagaagaggtacccttgggacagagtatcccccgcaggcggaagtagctgagggcaagggtcccgatgagggtcccatggcctgctccctcaggaacagctccagcaccaataaagaggcatcttaccacccag

SEQ ID NO: 453112 - DNA, 1757 bp, Homo sapiens
ataggctaggtaagcctgggtgttaatcgcgtagagggatgtgggtgagctgtactgtagagtaggacctgggcgtgagtgccttttcctgttcatcgaattgccgtatagtccatggcatggatcgtcatggcagcgttgatagtactgctgtgtcatggcgtgtgtgaggaccagtcgaaggaagtgtgcaggagctccagtctctaggctttgggcctgaggaggggtctctccaggcattgttccagcacggaggtgatgtgtcacgggccctgactgagctacagcgccaacgcctagagcccttccgccagcgcctctgggacagtggccctgagcccaccccttcctgggatgggccagacaagcagagcctggtcaggcggcttttggcagtctacgcactccccagctggggccgggcagagctggcactgtcactgctgcaggagacacccaggaactatgagttgggggatgtggtagaagctgtgaggcacagccaggaccgggccttcctgcgccgcttgcttgcccaggagtgtgccgtgtgtggctgggccctgccccacaaccggatgcaggccctgacttcctgtgagtgcaccatctgtcctgactgcttccgccagcacttcaccatcgccttgaaggagaagcacatcacagacatggtgtgccctgcctgtggccgccccgacctcaccgatgacacacagttgctcagctacttctctacccttgacatccagcttcgcgagagcctagagccagatgcctatgcgttgttccataagaagctgaccgagggtgtgctgatgcgggaccccaagttcttgtggtgtgcccagtgctcctttggcttcatatatgagcgtgagcagctggaggcaacttgtccccagtgtcaccagaccttctgtgtgcgctgcaagcgccagtgggaggagcagcaccgaggtcggagctgtgaggacttccagaactggaaacgcatgaacgacccagaataccaggcccagggcctagcaatgtatcttcaggaaaacggcattgactgccccaaatgcaagttctcgtacgccctggcccgaggaggctgcatgcactttcactgtacccagtgccgccaccagttctgcagcggctgctacaatgccttttacgccaagaataaatgtccagagcctaactgcagggtgaaaaagtccctgcacggccaccaccctcgagactgcctcttctacctgcgggactggactgctctccggcttcagaagctgctacaggacaataacgtcatgtttaatacagagcctccagctggggcccgggcagtccctggaggcggctgccgagtgatagagcagaaggaggttcccaatgggctcagggacgaagcttgtggcaaggaaactccagctggctatgccggcctgtgccaggcacactacaaagagtatcttgtgagcctcatcaatgcccactcgctggacccagccaccttgtatgaggtggaagagctggagacggccactgagcgctacctgcacgtacgcccccagcctttggctggagaggatccccctgcttaccaggcccgcttgttacagaagctgacagaagaggtacccttgggacagagtatcccccgcaggcggaagtagctgagggcaagggtcccgatgagggtcccatggcctgctccctcaggaacagctccagcaccaataaagaggcatcttaccacccag

SEQ ID NO: 453113 - DNA, 1424 bp, Homo sapiens
ctctcctagtacttcctgttctcggctaaccctggcgctgggccgggggctggagagtgaccgtggtctgagtgacctggggcggctgcgtgggccggggtgggcctcaaagccgggcaccagacgggaggggcggcgctcgggccgcgcgctgcccgcgccgggtcctggcgggcggcgaggctggggctgactcctgcctcaggatgccgggggaggaagaggagcgggccttcctggtggcccgcgaggagctggcgagcgccctgaggagggattccgggcaggcgttttccctggagcagctccggccgctactagccagctctctgccgctagccgcccgctaccctgcctgtggccgccccgacctcaccgatgacacacagttgctcagctacttctctacccttgacatccagcttcgcgagagcctagagccagatgcctatgcgttgttccataagaagctgaccgagggtgtgctgatgcgggaccccaagttcttgtggtgtgcccagtgctcctttggcttcatatatgagcgtgagcagctggaggcaacttgtccccagtgtcaccagaccttctgtgtgcgctgcaagcgccagtgggaggagcagcaccgaggtcggagctgtgaggacttccagaactggaaacgcatgaacgacccagaataccaggcccagggcctagcaatgtatcttcaggaaaacggcattgactgccccaaatgcaagttctcgtacgccctggcccgaggaggctgcatgcactttcactgtacccagtgccgccaccagttctgcagcggctgctacaatgccttttacgccaagaataaatgtccagagcctaactgcagggtgaaaaagtccctgcacggccaccaccctcgagactgcctcttctacctgcgggactggactgctctccggcttcagaagctgctacaggacaataacgtcatgtttaatacagagcctccagctggggcccgggcagtccctggaggcggctgccgagtgatagagcagaaggaggttcccaatgggctcagggacgaagcttgtggcaaggaaactccagctggctatgccggcctgtgccaggcacactacaaagagtatcttgtgagcctcatcaatgcccactcgctggacccagccaccttgtatgaggtggaagagctggagacggccactgagcgctacctgcacgtacgcccccagcctttggctggagaggatccccctgcttaccaggcccgcttgttacagaagctgacagaagaggtacccttgggacagagtatcccccgcaggcggaagtagctgagggcaagggtcccgatgagggtcccatggcctgctccctcaggaacagctccagcaccaataaagaggcatcttaccacccag

SEQ ID NO: 453114 - DNA, 631 bp, Homo sapiens
  misc_feature (28)..(28): n is a, c, g, or t
tctacaggatcttacaatacaccagcgntgctcaatgcctttacgccagaataaatgtccagagcctaactgcagggtgaaaaagtccctgcacggccaccaccctcgagactgcctcttctacctgcgggactggactgctctccggcttcagaagctgctacaggacaataacgtcatgtttaatacagagcctccagctggggcccgggcagtccctggaggcggctgccgagtgatagagcagaaggaggttcccaatgggctcagggacgaagcttgtggcaaggaaactccagctggctatgccggcctgtgccaggcacactacaaagagtatcttgtgagcctcatcaatgcccactcgctggacccagccaccttgtatgaggtggaagagctggagacggccactgagcgctacctgcacgtacgcccccagcctttggctggagaggatccccctgcttaccaggcccgcttgttacagaagctgacagaagaggtacccttgggacagagtatcccccgcaggcggaagtagctgagggcaagggtcccgatgagggtcccatggcctgctccctcaggaacagctccagcaccaataaagaggcatcttaccacccag

SEQ ID NO: 453115 - DNA, 386 bp, Homo sapiens
ctctatcactcggcagccgcctcagggacgaagcttgtggcaaggaaactccagctggctatgccggcctgtgccaggcacactacaaagagtatcttgtgagcctcatcaatgcccactcgctggacccagccaccttgtatgaggtggaagagctggagacggccactgagcgctacctgcacgtacgcccccagcctttggctggagaggatccccctgcttaccaggcccgcttgttacagaagctgacagaagaggtacccttgggacagagtatcccccgcaggcggaagtagctgagggcaagggtcccgatgagggtcccatggcctgctccctcaggaacagctccagcaccaataaagaggcatcttaccacccag

SEQ ID NO: 453116 - DNA, 2627 bp, Homo sapiens
ctctcctagtacttcctgttctcggctaaccctggcgctgggccgggggctggagagtgaccgtggtctgagtgacctggggcggctgcgtgggccggggtgggcctcaaagccgggcaccagacgggaggggcggcgctcgggccgcgcgctgcccgcgccgggtcctggcgggcggcgaggctggggctgactcctgcctcaggatgccgggggaggaagaggagcgggccttcctggtggcccgcgaggagctggcgagcgccctgaggagggattccgggcaggcgttttccctggagcagctccggccgctactagccagctctctgccgctagccgcccgctacctgcagctggacgccgcacgccttgtccgctgcaacgctcatggggagccccgaaactacctcaacaccctgtccacggctctgaacatcctggagaaatacggccgcaaccttctcagccctcagcggcctcggtactggcgtggtgtcaagtttaataaccctgtctttcgcagcacggtggatgctgtgcaggggggccgagatgtgctgcgattatatggctacacagaggagcaaccagatgggttgagcttccccgaagggcaggaggagccagatgagcaccaggttgctacagtcacactggaagtactgctgcttcggacagagctcagcctgctattgcagaatactcatccaagacagcaggcactggagcagctgttggaagacaaggttgaagatgatatgctgcagctttcagaatttgaccccctattgagagagattgctcctggccccctcaccacaccctctgtcccaggctccactcctggtccctgcttcctctgtggttctgccccaggcacactgcactgcccatcctgtaaacaggccctgtgtccagcctgtgaccacctgttccatggacacccatcccgtgctcatcacctccgccagaccctgcctggggtcctgcagggtacccacctgagccccagtttacctgcctcagcccaaccacggccccagtcgacctccctgctggccctgggagacagctctctttcttcccctaatcctgcaagtgctcatttgccctggcactgtgctgcctgtgccatgctaaatgagccttgggcagtgctctgtgtggcctgtgatcggccccgaggctgtaaggggttggggttgggaactgagggtccccaaggaactggaggcctagaacctgatcttgcacggggtcggtgggcctgccagagctgtacctttgagaatgaggcagctgctgtgctatgttccatatgtgagcgacctcggctggcccagcctcccagcttggtggtggattcccgagatgctggcatttgcctgcaaccccttcagcagggggatgctttgctggcctctgcccagagtcaagtctggtactgtattcactgtaccttctgcaactcgagccctggctgggtgtgtgttatgtgcaaccggactagtagccccattccagcacaacatgccccccggccctatgccagctctttggaaaagggaccccccaagcctgggcccccacgacgccttagtgcccccctgcccagttcctgtggagatcctgagaagcagcgccaagacaagatgcgggaagaaggcctccagctagtgagcatgatccgggaaggggaagccgcaggtgcctgtccagaggagatcttctcggctctgcagtactcgggcactgaggtgcctctgcagtggttgcgctcagaactgccctacgtcctggagatggtggctgagctggctggacagcaggaccctgggctgggtgccttttcctgtcaggaggcccggagagcctggctggatcgtcatggcaaccttgatgaagctgtggaggagtgtgtgaggaccaggcgaaggaaggtgcaggagctccagtctctaggctttgggcctgaggaggggtctctccaggcattgttccagcacggaggtgatgtgtcacgggccctgactgagctacagcgccaacgcctagagcccttccgccagcgcctctgggacagtggccctgagcccaccccttcctgggatgggccagacaagcagagcctggtcaggcggcttttggcagtctacgcactccccagctggggccgggcagagctggcactgtcactgctgcaggagacacccaggaactatgagttgggggatgtggtagaagctgtgaggcacagccaggaccgggccttcctgcgccgcttgcttgcccaggagtgtgccgtgtgtggctgggccctgccccacaaccgggtaagtccctccccacgatacctggtccaagaattactctattcttttggacccccatcctaccccagtctccatctctgatcctgtcttctgctcttcagttgcccatatacccctgaaggctcctgggagggggaagtcaggaacaggcttatctcctcccttttaaaacaatgttctattatggaaattttcaaacatgcaatagtagaaaaattgtactacactgtataacaaattcccatacccccctgcaacccctccacttccagtgtatttgtcatcaagctt

SEQ ID NO: 453117 - DNA, 1056 bp, Homo sapiens
caaaaaaaaaaaaaaaaatccccaactcactgctttttttgtttgtttctgtcgcctaggctggagtgcagtggcacgatctcagctcaccacagcctcgacctcccgggctcaagtgatcctcccacctcagcctaccaagtggctgggactacaggcgtgtgccaccatgcctgggtaatttttgtatttttgtagagatagggttttgccgtgttgcccaggctggtctcaaactcctgggctcaagtgatctgcctgcctcaacctctcaaagtgctcaactcattgtttactgtcttttttcctagtaatcttaaaataatttgcctcacagaaatagagacagtaagtgtctgcagccagttcactgtttttggtaattcattggtcttcaggagttaagattttacattgtcacattttaatttttaagcctatttttcatctctgaaactttccttttctccttggttctggctatacttggactcaaactgatcagtgtgatcatgtccaaaacagcttggcctggaagaggtaggccttattttttcagcctagtagtgtcccatgcacatgctctttgtagcattcaagtgtttaacattggataaattaagaaggtcaagaatgttgttgaaacttcaaggtctcaaaaggaaatgatggggacatagaacaactgttggtgtaccaaaaaaaggtacagaggggcaccatttgtattgtcacacaacaatgatcagaatgatcagtttagaatgatcagaacaaaaacaccactctttaatgggtctttttcttggctagaagtctttcctcagtttttgttgactatcatacgctgatttgtgggtgacggaagggggctagagataacgtttctctgtactttggtaaaggatgaaggagtcagagagggaacagaaaaagtgagagagtggcctgctgaaataatagcctgcctctaaaagttgtgaccagaaagtatgattcatttgggcccagagggaataaaatatgttttttcatatacctcccataaaaaaaaac

SEQ ID NO: 453118 - DNA, 294 bp, Homo sapiens
cggcacgaggccattcttatgttggagcggccgcaatcgtttcttggctagaagtctttcctcagtttttgttgactatcatacgctgatttgtgggtgacggaagggggctagagataacgtttctctgtactttggtaaaggatgaaggagtcagagagggaacagaaaaagtgagagagtggcctgctgaaataatagcctgcctctaaaagttgtgaccagaaagtatgattcatttgggcccagagggaataaaatatgttttttcatatacctcccataaaaaaaaac

SEQ ID NO: 453119 - DNA, 653 bp, Homo sapiens
cctgcaggtcgaatttacaaggatcccacgatatcttgtgtatctgtactgtaattattttagaggtacatgtgatattagaataggagtatacatgagtaatgatcaaatcagcgtaaatgggatgtctatcaccgctaacacttattttttcagcctagtagtgtcccatgcacatgctctttgtagcattcaagtgtttaacattggataaattaagaaggtcaagaatgttgttgaaacttcaaggtctcaaaaggaaatgatggggacatagaacaactgttggtgtaccaaaaaaaggtacagaggggcaccatttgtattgtcacacaacaatgatcagaatgatcagtttagaatgatcagaacaaaaacaccactctttaatgggtctttttcttggctagaagtctttcctcagtttttgttgactatcatacgctgatttgtgggtgacggaagggggctagagataacgtttctctgtactttggtaaaggatgaaggagtcagagagggaacagaaaaagtgagagagtggcctgctgaaataatagcctgcctctaaaagttgtgaccagaaagtatgattcatttgggcccagagggaataaaatatgttttttcatatacctcccataaaaaaaaac

SEQ ID NO: 453120 - DNA, 1045 bp, Homo sapiens
caaaaaaaaaaaaaaaaatccccaactcactgctttttttgtttgtttctgtcgcctaggctggagtgcagtggcacgatctcagctcaccacagcctcgacctcccgggctcaagtgatcctcccacctcagcctaccaagtggctgggactacaggcgtgtgccaccatgcctgggtaatttttgtatttttgtagagatagggttttgccgtgttgcccaggctggtctcaaactcctgggctcaagtgatctgcctgcctcaacctctcaaagtgctcaactcattgtttactgtcttttttcctagtaatcttaaaataatttgcctcacagaaatagagacagtaagtgtctgcagccagttcactgtttttggtaattcattggtcttcaggagttaagattttacattgtcacattttaatttttaagcctatttttcatctctgaaactttccttttctccttggttctggctatacttggactcaaactgatcagtgtgatcatgtccaaaacagcttggcctggaagaggtaggccttattttttcagcctagtagtgtcccatgcacatgctctttgtagcattcaagtgtttaacattggataaattaagaaggtcaagaatgttgttgaaacttcaaggtctcaaaaggaaatgatggggacatagaacaactgttggtgtaccaaaaaaaggtacagaggggcaccatttgtattgtcacacaacaatgatcagaatgatcagtttagaatgatcagaacaaaaacaccactctttaatgggtctttccccccccagtctttcgtcagtgggggtttttattatacgcccccccctttttcccggccccccgctagagggcccgtttttggggggggtggggggcaccaaggagtcacacagggaacagaaaaagtgacagagaggctttttttaataatagcttgcgtgtttccgtagaaacaaaaaagaaaaattcatttgggccaaaagggaataaaataagttttttcaaaaacatcccaaaaaac

SEQ ID NO: 453121 - DNA, 1249 bp, Homo sapiens
cattttctaaaagggacagagagcaccctgctgacatttcctaatcaagaagttggcgtgcagctgggagagctagactaagttggtcatgatgcagaagctactcaaatgcagtcggcttgtcctggctcttgccctcatcctggttctggaatcctcagttcaaggttatcctacgcagagagccaggtaccaatgggtgcgctgcaatccagacagtaattctgcaaactgccttgaagaaaaaggaccaatgttcgaactacttccaggtgaatccaacaagatcccccgtctgaggactgacctttttccaaagacgagaatccaggacttgaatcgtatcttcccactttctgaggactactctggatcaggcttcggctccggctccggctctggatcaggatctgggagtggcttcctaacggaaatggaacaggattaccaactagtagacgaaagtgatgctttccatgacaaccttaggtctcttgacaggaatctgccctcagacagccaggacttgggtcaacatggattagaagaggattttatgttataaaagaggattttcccaccttgacaccaggcaatgtagttagcatattttatgtaccatggttatatgattaatcttgggacaaagaattttatagaaatttttaaacatctgaaaaagaagcttaagttttatcatccttttttttctcatgaattcttaaaggattatgctttaatgctgttatctatcttattgttcttgaaaatacctgcattttttggtatcatgttcaaccaacatcattatgaaattaattagattcccatggccataaaatggctttaaagaatatatatatatttttaaagtagcttgagaagcaaattggcaggtaatatttcatacctaaattaagactctgacttggattgtgaattataatgatatgccccttttcttataaaaacaaaaaaaaaataatgaaacacagtgaatttgtagagtgggggtatttgacatattttacagggtggagtgtactatatactattacctttgaatgtgtttgcagagctagtggatgtgtttgtctacaagtatgattgctgttacataacaccccaaattaactcccaaattaaaacacagttgtgctgtcaatacctcatactgctttacctttttttcctggatatctgtgtattttcaaatgttactatatattaaagcagaaatataaccaaa

SEQ ID NO: 453122 - DNA, 754 bp, Homo sapiens
ccagacgttgaatatgtggggctattggtagaacttgactaaggttcccatgtggcacacgctactgacaagcgagaaacgtcctggctcttgccctcatcctggttctggaatcctcagttcaaggtaagactcaggagtcttgttccccagccatcttctctgtaagccctgtggtccatgcaagtcattatattcattttaaggcatagaatgtataatattgtgagaaaggaggcaaagaagaaggatttggggtcgctgaaccctttaatatgagttctgttaagtttggtaccaagaaaaattaaactctgtggcgtgtgcagtcttgtaaactcttacaatgattgaaatgtgctattttgggatgaaaatgtgaggtttataaattttaaaagctcaaaaaaggaatctagaaaatgactcctgtgcctgttgcatggaggagatggcacctttgactgttggggggtgtctgcctacccctaagtgtctacatcagccccaagttttagtgcgctgtgacggtgtcattgttattttaacactgggagacgttatattccaattggggtgaatctgactgtgtgtattttcttttctttttttttttttaaagataaacttggttcttactgaaaactccaattatggttagacatagttcatgtaaaacctctcagattttaaagagaaggccaaataatttggtatttgtgctcttgctcagagaagcatcatattcggaaat

SEQ ID NO: 453123 - DNA, 1360 bp, Homo sapiens
cattttctaaaagggacagagagcaccctgctgacatttcctaatcaagaagttggcgtgcagctgggagagctagactaagttggtcatgatgcagaagctactcaaatgcagtcggcttgtcctggctcttgccctcatcctggttctggaatcctcagttcaaggttatcctacgcagagagccaggtaccaatgggtgcgctgcaatccagacagtaattctgcaaactgccttgaagaaaaaggaccaatgttcgaactacttccaggtgaatccaacaagatcccccgtctgaggactgacctttttccaaagacgagaatccaggacttgaatcgtatcttcccactttctgaggactactctggatcaggcttcggctccggctccggctctggatcaggatctgggagtggcttcctaacggaaatggaacaggattaccaactagtagacgaaagtgatgctttccatgacaaccttaggtctcttgacaggaatctgccctcagacagccaggacttgggtcaacatggattagaagaggattttatgttataaaagaggattttcccaccttgacaccaggcaatgtagttagcatattttatgtaccatggttatatgattaatcttgggacaaagaattttatagaaatttttaaacatctgaaaaagaagcttaagttttatcatccttttttttctcatgaattcttaaaggattatgctttaatgctgttatctatcttattgttcttgaaaatacctgcattttttggtatcatgttcaaccaacatcattatgaaattaattagattcccatggccataaaatggctttaaagaatatatatatatttttaaagtagcttgagaagcaaattggcaggtaatatttcatacctaaattaagactctgacttggattgtgaattataatgatatgccccttttcttataaaaacaaaaaaaaaataatgaaacacagtgaatttgtagagtgggggtatttgacatattttacagggtggagtgtactatatactattacctttgaatgtgtttgcagagctagtggatgtgtttgtctacaagtatgattgctgttacataacaccccaaattaactcccaaattaaaacacagttgtgctgtcaatacctcatactgctttacctttttttcctggatatctgtgtattttcaaatgttactatatattaaagcagaaatataaccaaaaaaaaaagtcaacacaaaacattttgggcgccgcagccgaaacattataacaacagttggcccggccaaagatgtacacatgaaggggccacaagacggtaaccagaggaa

SEQ ID NO: 453124 - DNA, 1107 bp, Homo sapiens
cattttctaaaagggacagagagcaccctgctgacatttcctaatcaagaagttggcgtgcagctgggagagctagactaagttggtcatgatgcagaagctactcaaatgcagtcggcttgtcctggctcttgccctcatcctggttctggaatcctcagttcaaggttatcctacgcagagagccaggtaccaatgggtgcgctgcaatccagacagtaattctgcaaactgccttgaagaaaaaggaccaatgttcgaactacttccaggtgaatccaacaagatcccccgtctgaggactgacctttttccaaagacgagaatccaggacttgaatcgtatcttcccactttctgaggactactctggatcaggcttcggctccggctccggctctggatcaggatctgggagtggcttcctaacggaaatggaacaggattaccaactagtagacgaaagtgatgctttccatgacaaccttaggtctcttgacaggaatctgccctcagacagccaggacttgggtcaacatggattagaagaggattttatgttataaaagaggattttcccaccttgacaccaggcaatgtagttagcatattttatgtaccatggttatatgattaatcttgggacaaagaattttatagaaatttttaaacatctgaaaaagaagcttaagttttatcatccttttttttctcatgaattcttaaaggattatgctttaatgctgttatctatcttattgttcttgaaaatacctgcattttttggtatcatgttcaaccaacatcattatgaaattaattagattcccatggccataaaatggctttaaagaatatatatatatttttaaagtagcttgagaagcaaattggcaggtaatatttcatacctaaattaagactctgacttggattgtgaattataatgatatgccccttttcttataaaaacaaaaaaaaaataatgaaacacagtgaatttgtagagtgggggtatttgacatattttacagggtggtatcaggctataccccactcatcaagatttacgtttgtatattagtaactagtgcatcactaggacagc

SEQ ID NO: 453125 - DNA, 1107 bp, Homo sapiens
cattttctaaaagggacagagagcaccctgctgacatttcctaatcaagaagttggcgtgcagctgggagagctagactaagttggtcatgatgcagaagctactcaaatgcagtcggcttgtcctggctcttgccctcatcctggttctggaatcctcagttcaaggttatcctacgcagagagccaggtaccaatgggtgcgctgcaatccagacagtaattctgcaaactgccttgaagaaaaaggaccaatgttcgaactacttccaggtgaatccaacaagatcccccgtctgaggactgacctttttccaaagacgagaatccaggacttgaatcgtatcttcccactttctgaggactactctggatcaggcttcggctccggctccggctctggatcaggatctgggagtggcttcctaacggaaatggaacaggattaccaactagtagacgaaagtgatgctttccatgacaaccttaggtctcttgacaggaatctgccctcagacagccaggacttgggtcaacatggattagaagaggattttatgttataaaagaggattttcccaccttgacaccaggcaatgtagttagcatattttatgtaccatggttatatgattaatcttgggacaaagaattttatagaaatttttaaacatctgaaaaagaagcttaagttttatcatccttttttttctcatgaattcttaaaggattatgctttaatgctgttatctatcttattgttcttgaaaatacctgcattttttggtatcatgttcaaccaacatcattatgaaattaattagattcccatggccataaaatggctttaaagaatatatatatatttttaaagtagcttgagaagcaaattggcaggtaatatttcatacctaaattaagactctgacttggattgtgaattataatgatatgccccttttcttattcaaagactccttttctcaccgtttgacttcttctctctcaaaccacaactacttacttcatttaatacaaccggcacgtcctcttatatttttccctctcacccaccccatgccagtcttcatacttctcctcattcctc

SEQ ID NO: 453126 - DNA, 1031 bp, Homo sapiens
  misc_feature (1004)..(1005): n is a, c, g, or t
cattttctaaaagggacagagagcaccctgctgacatttcctaatcaagaagttggcgtgcagctgggagagctagactaagttggtcatgatgcagaagctactcaaatgcagtcggcttgtcctggctcttgccctcatcctggttctggaatcctcagttcaaggttatcctacgcagagagccaggtaccaatgggtgcgctgcaatccagacagtaattctgcaaactgccttgaagaaaaaggaccaatgttcgaactacttccaggtgaatccaacaagatcccccgtctgaggactgacctttttccaaagacgagaatccaggacttgaatcgtatcttcccactttctgaggactactctggatcaggcttcggctccggctccggctctggatcaggatctgggagtggcttcctaacggaaatggaacaggattaccaactagtagacgaaagtgatgctttccatgacaaccttaggtctcttgacaggaatctgccctcagacagccaggacttgggtcaacatggattagaagaggattttatgttataaaagaggattttcccaccttgacaccaggcaatgtagttagcatattttatgtaccatggttatatgattaatcttgggacaaagaattttatagaaatttttaaacatctgaaaaagaagcttaagttttatcatccttttttttctcatgaattcttaaaggattatgctttaatgctgttatctatcttattgttcttgaaaatacctgcattttttggtatcatgttcaaccaacatcattatgaaattaattagattcccatggccataaaatggctttaaagaatatatatatatttttaaagtagcttgagaagcaaattggcaggtaatatttcatacctaaattaagactctgacttggattgtgaattataatgatatgccccttttcttataatttgcttcccaagctactttaaaaatatagtctgannggccgcgatttagtagtagtagtagt

SEQ ID NO: 453127 - DNA, 1189 bp, Homo sapiens
cattttctaaaagggacagagagcaccctgctgacatttcctaatcaagaagttggcgtgcagctgggagagctagactaagttggtcatgatgcagaagctactcaaatgcagtcggcttgtcctggctcttgccctcatcctggttctggaatcctcagttcaaggttatcctacgcagagagccaggtaccaatgggtgcgctgcaatccagacagtaattctgcaaactgccttgaagaaaaaggaccaataaagacgagaatccaggacttgaatcgtatcttcccactttctgaggactactctggatcaggcttcggctccggctccggctctggatcaggatctgggagtggcttcctaacggaaatggaacaggattaccaactagtagacgaaagtgatgctttccatgacaaccttaggtctcttgacaggaatctgccctcagacagccaggacttgggtcaacatggattagaagaggattttatgttataaaagaggattttcccaccttgacaccaggcaatgtagttagcatattttatgtaccatggttatatgattaatcttgggacaaagaattttatagaaatttttaaacatctgaaaaagaagcttaagttttatcatccttttttttctcatgaattcttaaaggattatgctttaatgctgttatctatcttattgttcttgaaaatacctgcattttttggtatcatgttcaaccaacatcattatgaaattaattagattcccatggccataaaatggctttaaagaatatatatatatttttaaagtagcttgagaagcaaattggcaggtaatatttcatacctaaattaagactctgacttggattgtgaattataatgatatgccccttttcttataaaaacaaaaaaaaaataatgaaacacagtgaatttgtagagtgggggtatttgacatattttacagggtggagtgtactatatactattacctttgaatgtgtttgcagagctagtggatgtgtttgtctacaagtatgattgctgttacataacaccccaaattaactcccaaattaaaacacagttgtgctgtcaatacctcatactgctttacctttttttcctggatatctgtgtattttcaaatgttactatatattaaagcagaaatataaccaaa

SEQ ID NO: 453128 - DNA, 1207 bp, Homo sapiens
cattttctaaaagggacagagagcaccctgctgacatttcctaatcaagaagttggcgtgcagctgggagagctagactaagttggtcatgatgcagaagctactcaaatgcagtcggcttgtcctggctcttgccctcatcctggttctggaatcctcagttcaaggttatcctacgcagagagccaggtaccaatgggtgcgctgcaatccagacagtaattctgcaaactgccttgaagaaaaaggaccaatgttcgaactacttccaggtgaatccaacaagatcccccgtctgaggactgacctttttccaaagacgagaatccaggacttgaatcgtatcttcccactttctgaggactactctggatcaggcttcggctccggctccggctctggatcaggatctgggagtggcttcctaacggaaatggaacaggattaccaactagtagacgaaagtgatgctttccatgacaaccttaggtctcttgacaggaatctgccctcagacagccaggacttgggtcaacatggattagaagaggattttatgttataaaagaggattttccatggttatatgattaatcttgggacaaagaattttatagaaatttttaaacatctgaaaaagaagcttaagttttatcatccttttttttctcatgaattcttaaaggattatgctttaatgctgttatctatcttattgttcttgaaaatacctgcattttttggtatcatgttcaaccaacatcattatgaaattaattagattcccatggccataaaatggctttaaagaatatatatatatttttaaagtagcttgagaagcaaattggcaggtaatatttcatacctaaattaagactctgacttggattgtgaattataatgatatgccccttttcttataaaaacaaaaaaaaaataatgaaacacagtgaatttgtagagtgggggtatttgacatattttacagggtggagtgtactatatactattacctttgaatgtgtttgcagagctagtggatgtgtttgtctacaagtatgattgctgttacataacaccccaaattaactcccaaattaaaacacagttgtgctgtcaatacctcatactgctttacctttttttcctggatatctgtgtattttcaaatgttactatatattaaagcagaaatataaccaaa

SEQ ID NO: 453129 - DNA, 795 bp, Homo sapiens
cattttctaaaagggacagagagcaccctgctgacatttcctaatcaagaagttggcgtgcagctgggagagctagactaagttggtcatgatgcagaagctactcaaatgcagtcggcttgtcctggctcttgccctcatcctggttctggaatcctcagttcaaggtaagactcaggagtcttgttccccagccatcttctctgtaagccctgtggtccatgcaagtcattatattcattttaaggcatagaatgtataatattgtgagaaaggaggcaaagaagaaggatttggggtcgctgaaccctttaatatgagttctgttaagtttggtaccaagaaaaattaaactctgtggcgtgtgcagtcttgtaaactcttacaatgattgaaatgtgctattttgggatgaaaatgtgaggtttataaattttaaaagctcaaaaaaggaatctagaaaatgactcctgtgcctgttgcatggaggagatggcacctttgactgttggggggtgtctgcctacccctaagtgtctacatcagccccaagttttagtgcgctgtgacggtgtcattgttattttaacactgggagacgttatattccaattggggtgaatctgactgtgtgtattttcttttctttttttttttttaaagataaacttggttcttactgaaaactccaattatggttagacatagttcatgtaaaacctctcagattttaaagagaaggccaaataatttggtatttgtgctcttgctcagagaagcatcatattcggaaat

SEQ ID NO: 453130 - DNA, 544 bp, Homo sapiens
aaacattgaataattgggaagcttttaaatctcttaatttgagcaactagatggctgtatttatctccttatattaaaaaaactattataattatctttcccacatatcaaactccactggtttttttcccatttttctttcatacttcaaaagacgagaatccaggacttgaatcgtatcttcccactttctgaggactactctggatcaggcttcggctccggctccggctctggatcaggatctgggagtggcttcctaacggaaatggaacaggattaccaactagtagacgaaagtgatgctttccatgacaaccttaggtctcttgacaggaatctgccctcagacagccaggacttgggtcaacatggattagaagaggattttatgttataaaagaggattttcccaccttgacaccaggcaatgtagttagcatattttatgtaccatggttatatgattaatcttgggacaaagaattttatagaaatttttaaacatctgaaaaagaagcttaagttttatcatccttttttt

SEQ ID NO: 453131 - DNA, 477 bp, Homo sapiens
  misc_feature (42)..(42): n is a, c, g, or t
taagaagcgcagttagcctttagagctagataagcacgacangggctttttttaataaaatgcacgcgcccctcccgtcctggctcttgccctcatcctggttctggaatcctcagttcaaggttatcctacgcagagagccaggtaccaatgggtgcgctgcaatccagacagtaattctgcaaactgccttgaagaaaaaggaccaatgttcgaactacttccaggtgaatccaacaagatcccccgtctgaggactgacctttttccaaagacgagaatccaggacttgaatcgtatcttcccactttctgaggactactctggatcaggcttcggctccggctccggctctggatcaggatctgggagtggcttcctaacgtctactcaccttcccaagaatcctcccctacacaccacacacttgtctgccacccgtctatcaaacgataccatactccctagctcacccct

SEQ ID NO: 453132 - DNA, 1594 bp, Homo sapiens
  misc_feature (1261)..(1261): n is a, c, g, or t
  misc_feature (1266)..(1266): n is a, c, g, or t
  misc_feature (1268)..(1270): n is a, c, g, or t
  misc_feature (1272)..(1272): n is a, c, g, or t
  misc_feature (1277)..(1277): n is a, c, g, or t
  misc_feature (1285)..(1285): n is a, c, g, or t
  misc_feature (1289)..(1289): n is a, c, g, or t
  misc_feature (1292)..(1292): n is a, c, g, or t
  misc_feature (1304)..(1305): n is a, c, g, or t
  misc_feature (1313)..(1313): n is a, c, g, or t
  misc_feature (1324)..(1324): n is a, c, g, or t
  misc_feature (1332)..(1332): n is a, c, g, or t
  misc_feature (1334)..(1335): n is a, c, g, or t
  misc_feature (1341)..(1341): n is a, c, g, or t
  misc_feature (1355)..(1355): n is a, c, g, or t
  misc_feature (1359)..(1360): n is a, c, g, or t
  misc_feature (1374)..(1374): n is a, c, g, or t
  misc_feature (1389)..(1389): n is a, c, g, or t
  misc_feature (1399)..(1399): n is a, c, g, or t
  misc_feature (1402)..(1402): n is a, c, g, or t
  misc_feature (1406)..(1407): n is a, c, g, or t
  misc_feature (1411)..(1412): n is a, c, g, or t
cattttctaaaagggacagagagcaccctgctgacatttcctaatcaagaagttggcgtgcagctgggagagctagactaagttggtcatgatgcagaagctactcaaatgcagtcggcttgtcctggctcttgccctcatcctggttctggaatcctcagttcaaggttatcctacgcagagagccaggtaccaatgggtgcgctgcaatccagacagtaattctgcaaactgccttgaagaaaaaggaccaatgttcgaactacttccaggtgaatccaacaagatcccccgtctgaggactgacctttttccaaagacgagaatccaggacttgaatcgtatcttcccactttctgaggactactctggatcaggcttcggctccggctccggctctggatcaggatctgggagtggcttcctaacggaaatggaacaggattaccaactagtagacgaaagtgatgctttccatgacaaccttaggtctcttgacaggaatctgccctcagacagccaggacttgggtcaacatggattagaagaggattttatgttataaaagaggattttcccaccttgacaccaggcaatgtagttagcatattttatgtaccatggttatatgattaatcttgggacaaagaattttatagaaatttttaaacatctgaaaaagaagcttaagttttatcatccttttttttctcatgaattcttaaaggattatgctttaatgctgttatctatcttattgttcttgaaaatacctgcattttttggtatcatgttcaaccaacatcattatgaaattaattagattcccatggccataaaatggctttaaagaatatatatatatttttaaagtagcttgagaagcaaattggcaggtaatatttcatacctaaattaagactctgacttggattgtgaattataatgatatgccccttttcttataaaaacaaaaaaaaaataatgaaacacagtgaatttgtagagtgggggtatttgacatattttacagggtggagtgtactatatactattacctttgaatgtgtttgcagagctagtggatgtgtttgtctacaagtatgattgctgttacataacaccccaaattaactcccaaattaaaacacagttgtgctgtcaatacctcatactgctttacctttttttcctggatatctgtgtattttcaaatgttactatatattaaagcagaaatataaccaaaaaaaaaaaaaanaaaanannncntgtcngccggggnaagnttntgtgcaagctgnnaggatggnttggcccgaanggttgctntnnccgccncgctagctgtgagntgannaaaaccctgggctnacagaccccaaaagnctgtggcttnagncctnngttnngaccaaacattaaaaggatcgttttggtttgtttttaaagaaaggtaagattggctttgttctttatgagcaaattggaaatagccctttttctgtttttccttgctcatttcggtatggggaaagaaatctgtacatggattgggaatgtaaaagaacatttcctgcatttaaacaagttt

SEQ ID NO: 453133 - DNA, 1164 bp, Homo sapiens
cattttctaaaagggacagagagcaccctgctgacatttcctaatcaagaagttggcgtgcagctgggagagctagactaagttggtcatgatgcagaagctactcaaatgcagtcggcttgtcctggctcttgccctcatcctggttctggaatcctcagttcaaggttatcctacgcagagagccaggtaccaatgggtgcgctgcaatccagacagtaattctgcaaactgccttgaagaaaaaggaccaatgttcgaactacttccaggtgaatccaacaagatcccccgtctgaggactgacctttttccaaagacgagaatccaggacttgaatcgtatcttcccactttctgaggactactctggatcaggcttcggctccggctccggctctggatcaggatctgggagtggcttcctaacggaaatggaacaggattaccaactagtagacgaaagtgatgctttccatgacaaccttaggtctcttgacaggaatctgccctcagacagccaggacttgggtcaacatggattagaagaggattttatgttataaaagaggattttcccaccttgacaccaggcaatgtagttagcatattttatgtaccatggttatatgattaatcttgggacaaagaattttatagaaatttttaaacatctgaaaaagaagcttaagttttatcatccttttttttctcatgaattcttaaaggattatgctttaatgctgttatctatcttattgttcttgaaaatacctgcattttttggtatcatgttcaaccaacatcattatgaaattaattagattcccatggccataaaatggctttaaagaatatatatatatttttaaagtagcttgagaagcaaattggcaggtaatatttcatacctaaattaagactctgacttggattgtgaattataatgatatgccccttttcttatccccatttttgccaaaatggcgaaataaatatgaaggaaatcaacgtaatgtccttaccaacaggtgcgacacccgcaaggccccttgaaaattgaaagggtttaatcttttgtggaaatcccgggttaacacatttgggaaaaaagttctatttttaaacaaagggggcaaacacggtaaaatggcttataaacaaa

SEQ ID NO: 453134 - DNA, 1231 bp, Homo sapiens
  misc_feature (292)..(292): n is a, c, g, or t
  misc_feature (295)..(295): n is a, c, g, or t
gagagcaatacgttggtcacgaggcacaagctactcaagttgccgtcggcatgtccgggctctagcacacattctgcttcagtaatgctcaggattcactggtcattctacgaacacgaccacggccgggataccagatgcggttgctgacatgccacaatccaagatagataattctcgtggcgatacactgacctggaatcaatacaaggagccaagtgctatacgacagactacttgtaccagtgctgaattaccgaccacacgaatccgccgtctgaggactgacctnttnccaaagacgagaatccaggacttgaatcgtatcttcccactttctgaggactactctggatcaggcttcggctccggctccggctctggatcaggatctgggagtggcttcctaacggaaatggaacaggattaccaactagtagacgaaagtgatgctttccatgacaaccttaggtctcttgacaggaatctgccctcagacagccaggacttgggtcaacatggattagaagaggattttatgttataaaagaggattttcccaccttgacaccaggcaatgtagttagcatattttatgtaccatggttatatgattaatcttgggacaaagaattttatagaaatttttaaacatctgaaaaagaagcttaagttttatcatccttttttttctcatgaattcttaaaggattatgctttaatgctgttatctatcttattgttcttgaaaatacctgcattttttggtatcatgttcaaccaacatcattatgaaattaattagattcccatggccataaaatggctttaaagaatatatatatatttttaaagtagcttgagaagcaaattggcaggtaatatttcatacctaaattaagactctgacttggattgtgaattataatgatatgccccttttcttataaaaacaaaaaaaaaataatgaaacacagtgaatttgtagagtgggggtatttgacatattttacagggtggagtgtactatatactattacctttgaatgtgtttgcagagctagtggatgtgtttgtctacaagtatgattgctgttacataacaccccaaattaactcccaaattaaaacacagttgtgctgtcaatacctcatactgctttacctttttttcctggatatctgtgtattttcaaatgttactatatattaaagcagaaatataaccaaa

SEQ ID NO: 453135 - DNA, 1194 bp, Homo sapiens
cattttctaaaagggacagagagcaccctgctgacatttcctaatcaagaagttggcgtgcagctgggagagctagactaagttggtcatgatgcagaagctactcaaatgcagtcggcttgtcctggctcttgccctcatcctggttctggaatcctcagttcaaggttatcctacgcagagagccaggtaccaatgggtgcgctgcaatccagacagtaattctgcaaactgccttgaagaaaaaggaccaatgttcgaactacttccaggtgaatccaacaagatcccccgtctgaggactgacctttttccaaagacgagaatccaggacttgaatcgtatcttcccactttctgaggactactctggatcaggcttcggctccggctccggctctggatcaggatctgggagtggcttcctaacggaaatggaacaggattaccaactagtagacgaaagtgatgctttccatgacaaccttaggtctcttgacaggaatctgccctcagacagccaggacttgggtcaacatggattagaagaggattttatgttataaaagaggattttcccaccttgacaccaggcaatgtagttagcatattttatgtaccatggttatatgattaatcttgggacaaagaattttatagaaatttttaaacatctgatgctttaatgctgttatctatcttattgttcttgaaaatacctgcattttttggtatcatgttcaaccaacatcattatgaaattaattagattcccatggccataaaatggctttaaagaatatatatatatttttaaagtagcttgagaagcaaattggcaggtaatatttcatacctaaattaagactctgacttggattgtgaattataatgatatgccccttttcttataaaaacaaaaaaaaaataatgaaacacagtgaatttgtagagtgggggtatttgacatattttacagggtggagtgtactatatactattacctttgaatgtgtttgcagagctagtggatgtgtttgtctacaagtatgattgctgttacataacaccccaaattaactcccaaattaaaacacagttgtgctgtcaatacctcatactgctttacctttttttcctggatatctgtgtattttcaaatgttactatatattaaagcagaaatataaccaaa

SEQ ID NO: 453136 - DNA, 147 bp, Homo sapiens
atttctagataatgtttccttttgtaaccttggttagtcctcttgttctttatatccatgaacaattagaatgtttaatgctacaagaaacataacagatggattttatttagcctcttccaggtgttatgagtgcttctcattgtt

SEQ ID NO: 453137 - DNA, 218 bp, Homo sapiens
ccctgccttcagagagctgaaaagggtccctcggtcttttatttcagggctttgcatgcgctctattgtcccttgccactccccactctcatcaggccaagtggaggactggccagagggcctgcacatgcaaactccagtccctgccttcagagagctgaaaagggtccctcggtcttttatttcaggcccaggcccgcagatacatgcacgagagt

SEQ ID NO: 453138 - DNA, 1959 bp, Homo sapiens
catctctggccagcacacgggtcaggtccacacccggtgctgcgtacatctccacattgacctcctgccagcatctcttgggtttgctgagaactcacgggctccagctacctggccatgaccaccacatttctgcaaacttcttcctccacctttgggggtggctcaacccgagggggttccctcctggctgggggaggtggctttggtggggggagtctctctgggggaggtggaagccgaagtatctcagcttcttctgctaggtttgtctcttcagggtcaggaggaggatatgggggtggcatgagggtctgtggctttggtggaggggctggtagtgttttcggtggaggctttggagggggcgttggtgggggttttggtggtggctttggtggtggcgatggtggtctcctctctggcaatgagaaaattaccatgcagaacctcaatgaccgcctggcctcctacctggacaaggtacgtgccctggaggaggccaatgctgacctggaggtgaagatccatgactggtaccagaagcagaccccagccagcccagaatgcgactacagccaatacttcaagaccattgaagagctccgggacaagatcatggccaccaccatcgacaactcccgggtcatcctggagatcgacaatgccaggctggctgcggacgacttcaggctcaagtatgagaatgagctggccctgcgccagggcgttgaggctgacatcaacggcttgcgccgagtcctggatgagctgaccctggccaggactgacctggagatgcagatcgagggcctgaatgaggagctagcctacctgaagaagaaccacgaagaggagatgaaggagttcagcagccagctggccggccaggtcaatgtggagatggacgcagcaccgggtgtggacctgacccgtgtgctggcagagatgagggagcagtacgaggccatggcggagaagaaccgccgggatgtcgaggcctggttcttcagcaagactgaggagctgaacaaagaggtggcctccaacacagaaatgatccagaccagcaagacggagatcacagacctgagacgcacgatgcaggagctggagatcgagctgcagtcccagctcagcatgaaagctgggctggagaactcactggccgagacagagtgccgctatgccacgcagctgcagcagatccaggggctcattggtggcctggaggcccagctgagtgagctccgatgcgagatggaggctcagaaccaggagtacaagatgctgcttgacataaagacacggctggagcaggagatcgctacttaccgcagcctgctcgagggccaggatgccaagatggctggcattggcatcagggaagcctcttcaggaggtggtggtagcagcagcaatttccacatcaatgtagaagagtcagtggatggacaggtggtttcttcccacaagagagaaatctaagtgtctattgcaggagaaacgtcccttgccactccccactctcatcaggccaagtggaggactggccagagggcctgcacatgcaaactccagtccctgccttcagagagctgaaaagggtccctcggtcttttatttcagggctttgcatgcgctctattccccctctgcctctccccaccttctttggagcaaggagatgcagctgtattgtgtaacaagctcatttgtacagtgtctgacgtcagacgctgaactatgtggcttttctgttttgaagaaaaaataacttctaaagtattaggagggaaagagaatgataaaataattctgccaaacaaaggagacacaggagcactggaacagctgggacagatggcggcttgaaactgaagcaggccagctattacactagacagaaatggactaaatctcaggtaagagacaagagttttaactgtagcacattaa

SEQ ID NO: 453139 - DNA, 1561 bp, Homo sapiens
catctctggccagcacacgggtcaggtccacacccggtgctgcgtacatctccacattgacctcctgccagcatctcttgggtttgctgagaactcacgggctccagctacctggccatgaccaccacatttctgcaaacttcttcctccacctttgggggtggctcaacccgagggggttccctcctggctgggggaggtggctttggtggggggagtctctctgggggaggtggaagccgaagtatctcagcttcttctgctaggtacgtgccctggaggaggccaatgctgacctggaggtgaagatccatgactggtaccagaagcagaccccagccagcccagaatgcgactacagccaatacttcaagaccattgaagagctccgggacaagatcatggccaccaccatcgacaactcccgggtcatcctggagatcgacaatgccaggctggctgcggacgacttcaggctcaagtatgagaatgagctggccctgcgccagggcgttgaggctgacatcaacggcttgcgccgagtcctggatgagctgaccctggccaggactgacctggagatgcagatcgagggcctgaatgaggagctagcctacctgaagaagaaccacgaagaggagatgaaggagttcagcagccagctggccggccaggtcaatgtggagatggacgcagcaccgggtgtggacctgacccgtgtgctggcagagatgagggagcagtacgaggccatggcggagaagaaccgccgggatgtcgaggcctggttcttcagcaagactgaggagctgaacaaagaggtggcctccaacacagaaatgatccagaccagcaagacggagatcacagacctgagacgcacgatgcaggagctggagatcgagctgcagtcccagctcagcatgaaagctgggctggagaactcactggccgagacagagtgccgctatgccacgcagctgcagcagatccaggggctcattggtggcctggaggcccagctgagtgagctccgatgcgagatggaggctcagaaccaggagtacaagatgctgcttgacataaagacacggctggagcaggagatcgctacttaccgcagcctgctcgagggccaggatgccaagatggctggcattggcatcagggaagcctcttcaggaggtggtggtagcagcagcaatttccacatcaatgtagaagagtcagtggatggacaggtggtttcttcccacaagagagaaatctaagtgtctattgcaggagaaacgtcccttgccactccccactctcatcaggccaagtggaggactggccagagggcctgcacatgcaaactccagtccctgccttcagagagctgaaaagggtccctcggtcttttatttcagggctttgcatgcgctctattccccctctgcctctccccaccttctttggagcaaggagatgcagctgtattgtgtaacaagctcatttgtacagtgtctgttcatgtaataaagaattacttttccttttgcaaataaaaaaaaaagta

SEQ ID NO: 453140 - DNA, 3105 bp, Homo sapiens
catctctggccagcacacgggtcaggtccacacccggtgctgcgtacatctccacattgacctcctgccagcatctcttgggtttgctgagaactcacgggctccagctacctggccatgaccaccacatttctgcaaacttcttcctccacctttgggggtggctcaacccgagggggttccctcctggctgggggaggtggctttggtggggggagtctctctgggggaggtggaagccgaagtatctcagcttcttctgctaggtttgtctcttcagggtcaggaggaggatatgggggtggcatgagggtctgtggctttggtggaggggctggtagtgttttcggtggaggctttggagggggcgttggtgggggttttggtggtggctttggtggtggcgatggtggtctcctctctggcaatgagaaaattaccatgcagaacctcaatgaccgcctggcctcctacctggacaaggtacgtgccctggaggaggccaatgctgacctggaggtgaagatccatgactggtaccagaagcagaccccagccagcccagaatgcgactacagccaatacttcaagaccattgaagagctccgggacaagatcatggccaccaccatcgacaactcccgggtcatcctggagatcgacaatgccaggctggctgcggacgacttcaggctcaagtatgagaatgagctggccctgcgccagggcgttgaggctgacatcaacggcttgcgccgagtcctggatgagctgaccctggccaggactgacctggagatgcagatcgagggcctgaatgaggagctagcctacctgaagaagaaccacgaagaggagatgaaggagttcagcagccagctggccggccaggtcaatgtggagatggacgcagcaccgggtgtggacctgacccgtgtgctggcagagatgagggagcagtacgaggccatggcggagaagaaccgccgggatgtcgaggcctggttcttcagcaagactgaggagctgaacaaagaggtggcctccaacacagaaatgatccagaccagcaagacggagatcacagacctgagacgcacgatgcaggagctggagatcgagctgcagtcccagctcagcatgaaagctgggctggagaactcactggccgagacagagtgccgctatgccacgcagctgcagcagatccaggggctcattggtggcctggaggcccagctgagtgagctccgatgcgagatggaggctcagaaccaggagtacaagatgctgcttgacataaagacacggctggagcaggagatcgctacttaccgcagcctgctcgagggccaggatgccaagatggctggcattggcatcagggaaggagtgatgagggctgcttgtggctagggtgcagggtcatcctaagggaatggcagggtgtccctaagcagccttgagggactgtgaaaagagaactgagcaaggagggaggatctggactcctcactctggtccttggctgttacctgggacaggtcacttcctctctctggatccgtgtttcttctgtaaatgatagaggctgggctagtggtagttaagatctagtgctcattccattctctgcatgagatagatgggtattcttgtagttcagaatcttgaccagctcagtggctcatgcctgtaatcccagcactttgggagtccaaggcgggtggatcacttgaggtcaggagttcgagaccagcatggccaatatggtgaaaccccgtctctactaaaaatacaaaaattagctgggcgtggtggcgggtgcctgtaatcccagctactcgggaggctgaggcacaagaatcacttgaacccgggaggcggaggtttcagtgggctgagattgtgccactgcactccagcctgggcgacagagtgagattccgtctcaaaaaacaaaacaaaacaaaacaaaatctgtctacttggggatagcaggcctggatgggctagcaggatgtcccacccctagaggagtcaggtgtgtgggtggtggtggtgtagggtctgaagaacactgcatagctatctacatgagcttcccttacggacacttgagcttgtgccctttgcttaaatcagcttccctctttctttcaggatggctggcattggcatcagggaaggtaggaaggctttactcttctggtgtggggtggggaggggagatgttgaagccaccacccccttcggaatagggaggaaggagaaagagcccaaacatcccattaggtgggaacattcccattcattagatgcctcttccccagtgggaacttctgtcagccccaggtgagattgcagctggtgatttattgagaaacttccaggttgagtaggcttcattcagggcatgtctctcccccaggccccatcttcatacacttccgctaagatgcccacaattcatcccccttcatgtgcagcttgaaaaaccctgacattgttgctccctgccgggcatacctgccattgccactgcccatctctgtgatgaggaattcaacaccagatctctggcagctcttgagggattggccagtggcattctcaggggtgctgtctagttttcccagagccccgccaaggtcctggccaccgtggcagagcggggaggttcccccactctaaagcctactccttctctctctagccctcttcaggaggtggtggtagcagcagcaatttccacatcaatgtagaagagtcagtggatggacaggtggtttcttcccacaagagagaaatctaagtgtctattgcaggagaaacgtcccttgccactccccactctcatcaggccaagtggaggactggccagagggcctgcacatgcaaactccagtccctgccttcagagagctgaaaagggtccctcggtcttttatttcagggctttgcatgcgctctattccccctctgcctctccccaccttctttggagcaaggagatgcagctgtattgtgtaacaagctcatttgtacagtgtctgttcatgtaataaagaattacttttccttttgcaaataaaaaaaaaagta

SEQ ID NO: 453141 - DNA, 1578 bp, Homo sapiens
catctctggccagcacacgggtcaggtccacacccggtgctgcgtacatctccacattgacctcctgccagcatctcttgggtttgctgagaactcacgggctccagctacctggccatgaccaccacatttctgcaaacttcttcctccacctttgggggtggctcaacccgagggggttccctcctggctgggggaggtggctttggtggggggagtctctctgggggaggtggaagccgaagtatctcagcttcttctgctaggtttgtctcttcagggtcaggaggaggatatgggggtggcatgagggtctgtggctttggtggaggggctggtagtgttttcggtggaggctttggagggggcgttggtgggggttttggtggtggctttggtggtggcgatggtggtctcctctctggcaatgagaaaattaccatgcagaacctcaatgaccgcctggcctcctacctggacaaggtacgtgccctggaggaggccaatgctgacctggaggtgaagatccatgactggtaccagaagcagaccccagccagcccagaatgcgactacagccaatacttcaagaccattgaagagctccgggacaagatcatggccaccaccatcgacaactcccgggtcatcctggagatcgacaatgccaggctggctgcggacgacttcaggctcaagtatgagaatgagctggccctgcgccagggcgttgaggctgacatcaacggcttgcgccgagtcctggatgagctgaccctggccaggactgacctggagatgcagatcgagggcctgaatgaggagctagcctacctgaagaagaaccacgaagaggagatgaaggagttcagcagccagctggccggccaggtcaatgtggagatggacgcagcaccgggtgtggacctgacccgtgtgctggcagagatgagggagcagtacgaggccatggcggagaagaaccgccgggatgtcgaggcctggttcttcagcaagactgaggagctgaacaaagaggtggcctccaacacagaaatgatccagaccagcaagacggagatcacagacctgagacgcacgatgcaggagctggagatcgagctgcagtcccagctcagcatgaaagctgggctggagaactcactggccgagacagagtgccgctatgccacgcagctgcagcagatccaggggctcattggtggcctggaggcccagctgagtgagctccgatgcgagatggaggctcagaaccaggagtacaagatgctgcttgacataaagacacggctggagcaggagatcgctacttaccgcagcctgctcgagggccaggatgccaagatggctggcattggcatcagggaagcctcttcaggaggtggtggtagcagcagcaatttccacatcaatgtagaagagtcagtggatggacaggtggtttcttcccacaagagagaaatctaagtgtctattgcaggagaaacgtcccttgccactccccactctcatcaggccaagtggaggacctgggtcatgttctgtgggtaccggctc

SEQ ID NO: 453142 - DNA, 1785 bp, Homo sapiens
ggagtggggaagttgaggggagtgcctttacatcctgctggtcatcgtggccacttcagtctgttgagcatttcctgtgagtcatcttgctccaactgagagtcaggctgagctggagttatttccattttcctgattggtagactaaggctcagagagaggaggcggcattacccaaagccgcacagctggtaaatgggaaaagaggggtttaaaggtacgtgccctggaggaggccaatgctgacctggaggtgaagatccatgactggtaccagaagcagaccccagccagcccagaatgcgactacagccaatacttcaagaccattgaagagctccgggacaaggttgctactggctggaatgttctgtagatccatggctgtgtccaaggtgtgcaggaggcagtgaccatgagttgtccacagtggggctggtggagtgtctctgagagagctattgtcagagctggctgcaccccactgccccactctcctgggcaaccaattcccacaggcaatactgcctccttggtctttcgtgccctggagataaggaaggcagctcctcaggtgtctcaaggaggctggatgggacaaaacaagaaatggacactgaaaatcatggccaccaccatcgacaactcccgggtcatcctggagatcgacaatgccaggctggctgcggacgacttcaggctcaagtatgagaatgagctggccctgcgccagggcgttgaggctgacatcaacggcttgcgccgagtcctggatgagctgaccctggccaggactgacctggagatgcagatcgagggcctgaatgaggagctagcctacctgaagaagaaccacgaagaggagatgaaggagttcagcagccagctggccggccaggtcaatgtggagatggacgcagcaccgggtgtggacctgacccgtgtgctggcagagatgagggagcagtacgaggccatggcggagaagaaccgccgggatgtcgaggcctggttcttcagcaagactgaggagctgaacaaagaggtggcctccaacacagaaatgatccagaccagcaagacggagatcacagacctgagacgcacgatgcaggagctggagatcgagctgcagtcccagctcagcatgaaagctgggctggagaactcactggccgagacagagtgccgctatgccacgcagctgcagcagatccaggggctcattggtggcctggaggcccagctgagtgagctccgatgcgagatggaggctcagaaccaggagtacaagatgctgcttgacataaagacacggctggagcaggagatcgctacttaccgcagcctgctcgagggccaggatgccaagatggctggcattggcatcagggaagcctcttcaggaggtggtggtagcagcagcaatttccacatcaatgtagaagagtcagtggatggacaggtggtttcttcccacaagagagaaatctaagtgtctattgcaggagaaacgtcccttgccactccccactctcatcaggccaagtggaggactggccagagggcctgcacatgcaaactccagtccctgccttcagagagctgaaaagggtccctcggtcttttatttcagggctttgcatgcgctctattccccctctgcctctccccaccttctttggagcaaggagatgcagctgtattgtgtaacaagctcatttgtacagtgtctgttcatgtaataaagaattacttttccttttgcaaataaaaaaaaaagta

SEQ ID NO: 453143 - DNA, 2577 bp, Homo sapiens
catctctggccagcacacgggtcaggtccacacccggtgctgcgtacatctccacattgacctcctgccagcatctcttgggtttgctgagaactcacgggctccagctacctggccatgaccaccacatttctgcaaacttcttcctccacctttgggggtggctcaacccgagggggttccctcctggctgggggaggtggctttggtggggggagtctctctgggggaggtggaagccgaagtatctcagcttcttctgctaggtttgtctcttcagggtcaggaggaggatatgggggtggcatgagggtctgtggctttggtggaggggctggtagtgttttcggtggaggctttggagggggcgttggtgggggttttggtggtggctttggtggtggcgatggtggtctcctctctggcaatgagaaaattaccatgcagaacctcaatgaccgcctggcctcctacctggacaaggtacgtgccctggaggaggccaatgctgacctggaggtgaagatccatgactggtaccagaagcagaccccagccagcccagaatgcgactacagccaatacttcaagaccattgaagagctccgggacaagatcatggccaccaccatcgacaactcccgggtcatcctggagatcgacaatgccaggctggctgcggacgacttcaggctcaagtatgagaatgagctggccctgcgccagggcgttgaggctgacatcaacggcttgcgccgagtcctggatgagctgaccctggccaggactgacctggagatgcagatcgagggcctgaatgaggagctagcctacctgaagaagaaccacgaagaggagatgaaggagttcagcagccagctggccggccaggtcaatgtggagatggacgcagcaccgggtgtggacctgacccgtgtgctggcagagatgagggagcagtacgaggccatggcggagaagaaccgccgggatgtcgaggcctggttcttcagcaagactgaggagctgaacaaagaggtggcctccaacacagaaatgatccagaccagcaagacggagatcacagacctgagacgcacgatgcaggagctggagatcgagctgcagtcccagctcagcatgaaagctgggctggagaactcactggccgagacagagtgccgctatgccacgcagctgcagcagatccaggggctcattggtggcctggaggcccagctgagtgagctccgatgcgagatggaggctcagaaccaggagtacaagatgctgcttgacataaagacacggctggagcaggagatcgctacttaccgcagcctgctcgagggccaggatgccaagatggctggcattggcatcagggaaggagtgatgagggctgcttgtggctagggtgcagggtcatcctaagggaatggcagggtgtccctaagcagccttgagggactgtgaaaagagaactgagcaaggagggaggatctggactcctcactctggtccttggctgttacctgggacaggtcacttcctctctctggatccgtgtttcttctgtaaatgatagaggctgggctagtggtagttaagatctagtgctcattccattctctgcatgagatagatgggtattcttgtagttcagaatcttgaccagctcagtggctcatgcctgtaatcccagcactttgggagtccaaggcgggtggatcacttgaggtcaggagttcgagaccagcatggccaatatggtgaaaccccgtctctactaaaaatacaaaaattagctgggcgtggtggcgggtgcctgtaatcccagctactcgggaggctgaggcacaagaatcacttgaacccgggaggcggaggtttcagtgggctgagattgtgccactgcactccagcctgggcgacagagtgagattccgtctcaaaaaacaaaacaaaacaaaacaaaatctgtctacttggggatagcaggcctggatgggctagcaggatgtcccacccctagaggagtcaggtgtgtgggtggtggtggtgtagggtctgaagaacactgcatagctatctacatgagcttcccttacggacacttgagcttgtgccctttgcttaaatcagcttccctctttctttcaggatggctggcattggcatcagggaagcctcttcaggaggtggtggtagcagcagcaatttccacatcaatgtagaagagtcagtggatggacaggtggtttcttcccacaagagagaaatctaagtgtctattgcaggagaaacgtcccttgccactccccactctcatcaggccaagtggaggactggccagagggcctgcacatgcaaactccagtccctgccttcagagagctgaaaagggtccctcggtcttttatttcagggctttgcatgcgctctattccccctctgcctctccccaccttctttggagcaaggagatgcagctgtattgtgtaacaagctcatttgtacagtgtctgttcatgtaataaagaattacttttccttttgcaaataaaaaaaaaagta

SEQ ID NO: 453144 - DNA, 1896 bp, Homo sapiens
catctctggccagcacacgggtcaggtccacacccggtgctgcgtacatctccacattgacctcctgccagcatctcttgggtttgctgagaactcacgggctccagctacctggccatgaccaccacatttctgcaaacttcttcctccacctttgggggtggctcaacccgagggggttccctcctggctgggggaggtggctttggtggggggagtctctctgggggaggtggaagccgaagtatctcagcttcttctgctaggtttgtctcttcagggtcaggaggaggatatgggggtggcatgagggtctgtggctttggtggaggggctggtagtgttttcggtggaggctttggagggggcgttggtgggggttttggtggtggctttggtggtggcgatggtggtctcctctctggcaatgagaaaattaccatgcagaacctcaatgaccgcctggcctcctacctggacaaggtacgtgccctggaggaggccaatgctgacctggaggtgaagatccatgactggtaccagaagcagaccccagccagcccagaatgcgactacagccaatacttcaagaccattgaagagctccgggacaagatcatggccaccaccatcgacaactcccgggtcatcctggagatcgacaatgccaggctggctgcggacgacttcaggctcaagtgcgctcccccgtctctctcctcttcctgcattgcccactttacttggccttctcctggctctgactcaggcagccaagacccctcccacttccttctttggcctccctctcctcaggtatgagaatgagctggccctgcgccagggcgttgaggctgacatcaacggcttgcgccgagtcctggatgagctgaccctggccaggactgacctggagatgcagatcgagggcctgaatgaggagctagcctacctgaagaagaaccacgaagaggagatgaaggagttcagcagccagctggccggccaggtcaatgtggagatggacgcagcaccgggtgtggacctgacccgtgtgctggcagagatgagggagcagtacgaggccatggcggagaagaaccgccgggatgtcgaggcctggttcttcagcaagactgaggagctgaacaaagaggtggcctccaacacagaaatgatccagaccagcaagacggagatcacagacctgagacgcacgatgcaggagctggagatcgagctgcagtcccagctcagcatgaaagctgggctggagaactcactggccgagacagagtgccgctatgccacgcagctgcagcagatccaggggctcattggtggcctggaggcccagctgagtgagctccgatgcgagatggaggctcagaaccaggagtacaagatgctgcttgacataaagacacggctggagcaggagatcgctacttaccgcagcctgctcgagggccaggatgccaagatggctggcattggcatcagggaagcctcttcaggaggtggtggtagcagcagcaatttccacatcaatgtagaagagtcagtggatggacaggtggtttcttcccacaagagagaaatctaagtgtctattgcaggagaaacgtcccttgccactccccactctcatcaggccaagtggaggactggccagagggcctgcacatgcaaactccagtccctgccttcagagagctgaaaagggtccctcggtcttttatttcagggctttgcatgcgctctattccccctctgcctctccccaccttctttggagcaaggagatgcagctgtattgtgtaacaagctcatttgtacagtgtctgttcatgtaataaagaattacttttccttttgcaaataaaaaaaaaagta

SEQ ID NO: 453145 - DNA, 1538 bp, Homo sapiens
catctctggccagcacacgggtcaggtccacacccggtgctgcgtacatctccacattgacctcctgccagcatctcttgggtttgctgagaactcacgggctccagctacctggccatgaccaccacatttctgcaaacttcttcctccacctttgggggtggctcaacccgagggggttccctcctggctgggggaggtggctttggtggggggagtctctctgggggaggtggaagccgaagtatctcagcttcttctgctaggtttgtctcttcagggtcaggaggaggatatgggggtggcatgagggtctgtggctttggtggaggggctggtagtgttttcggtggaggctttggagggggcgttggtgggggttttggtggtggctttggtggtggcgatggtggtctcctctctggcaatgagaaaattaccatgcagaacctcaatgaccgcctggcctcctacctggacaaggtacgtgccctggaggaggccaatgctgacctggaggtgaagatccatgactggtaccagaagcagaccccagccagcccagaatgcgactacagccaatacttcaagaccattgaagagctccgggacaagatcatggccaccaccatcgacaactcccgggtcatcctggagatcgacaatgccaggctggctgcggacgacttcaggctcaagtatgagaatgagctggccctgcgccagggcgttgaggctgacatcaacggcttgcgccgagtcctggatgagctgaccctggccaggactgacctggagatgcagatcgagggcctgaatgaggagctagcctacctgaagaagaaccacgaagaggagatgaaggagttcagcagccagctggccggccaggtcaatgtggagatggacgcagcaccgggtgtggacctgacccgtgtgctggcagagatgagggagcagtacgaggccatggcggagaagaaccgccgggatgtcgaggcctggttcttcagcaagactgaggagctgaacaaagaggtggcctccaacacagaaatgatccagaccagcaagacggagatcacagacctgagacgcacgatgcaggagctggagatcgagctgcagtcccagctcagcatgaaagctgggctggagaactcactggccgagacagagtgccgctatgccacgcagctgcagcagatccaggggctcattggtggcctggaggcccagctgagtgagctccgatgcgagatggaggctcagaaccaggagtacaagatgctgcttgacataaagacacggctggagcaggagatcgctacttaccgcagcctgctcgagggccaggatgccaagatggctggcattggcatcagggaaggctttgcatgcgctctattccccctctgcctctccccaccttctttggagcaaggagatgcagctgtattgtgtaacaagctcatttgtacagtgtctgttcatgtaataaagaattacttttccttttgcaaataaaaaaaaaagta

SEQ ID NO: 453146 - DNA, 1106 bp, Homo sapiens
catctctggccagcacacgggtcaggtccacacccggtgctgcgtacatctccacattgacctcctgccagcatctcttgggtttgctgagaactcacgggctccagctacctggccatgaccaccacatttctgcaaacttcttcctccacctttgggggtggctcaacccgagggggttccctcctggctgggggaggtggctttggtggggggagtctctctgggggaggtggaagccgaagtatctcagcttcttctgctaggtttgtctcttcagggtcaggaggaggatatgggggtggcatgagggtctgtggctttggtggaggggctggtagtgttttcggtggaggctttggagggggcgttggtgggggttttggtggtggctttggtggtggcgatggtggtctcctctctggcaatgagaaaattaccatgcagaacctcaatgaccgcctggcctcctacctggacaaggtacgtgccctggaggaggccaatgctgacctggaggtgaagatccatgactggtaccagaagcagaccccagccagcccagaatgcgactacagccaatacttcaagaccattgaagagctccgggacaagatcatggccaccaccatcgacaactcccgggtcatcctggagatcgacaatgccaggctggctgcggacgacttcaggctcaagtatgagaatgagctggccctgcgccagggcgttgaggctgacatcaacggcttgcgccgagtcctggatgagctgaccctggccaggactgacctggagatgcagatcgagggcctgaatgaggagctagcctacctgaagaagaaccacgaagagtctcatcaggccaagtggaggactggccagagggcctgcacatgcaaactccagtccctgccttcagagagctgaaaagggtccctcggtcttttatttcagggctttgcatgcgctctattccccctctgcctctccccaccttctttggagcaaggagatgcagctgtattgtgtaacaagctcatttgtacagtgtctgttcatgtaataaagaattacttttccttttgcaaataaaaaaaaaagta

SEQ ID NO: 453147 - DNA, 1035 bp, Homo sapiens
catctctggccagcacacgggtcaggtccacacccggtgctgcgtacatctccacattgacctcctgccagcatctcttgggtttgctgagaactcacgggctccagctacctggccatgaccaccacatttctgcaaacttcttcctccacctttgggggtggctcaacccgagggggttccctcctggctgggggaggtggctttggtggggggagtctctctgggggaggtggaagccgaagtatctcagcttcttctgctaggtttgtctcttcagggtcaggaggaggatatgggggtggcatgagggtctgtggctttggtggaggggctggtagtgttttcggtggaggctttggagggggcgttggtgggggttttggtggtggctttggtggtggcgatggtggtctcctctctggcaatgagaaaattaccatgcagaacctcaatgaccgcctggcctcctacctggacaaggtacgtgccctggaggaggccaatgctgacctggaggtgaagatccatgactggtaccagaagcagaccccagccagcccagaatgcgactacagccaatacttcaagaccattgaagagctccgggacaagatcatggccaccaccatcgacaactcccgggtcatcctggagatcgacaatgccaggctggctgcggacgacttcaggctcaagtatgagaatgagctggccctgcgccagggcgttgaggctgacatcaacggcttgcgccgagtcctggatgagctgaccctggccaggactgacctggagatgcagatctggccagagggcctgcacatgcaaactccagtccctgccttcagagagctgaaaagggtccctcggtcttttatttcagggctttgcatgcgctctattccccctctgcctctccccaccttctttggagcaaggagatgcagctgtattgtgtaacaagctcatttgtacagtgtctgttcatgtaataaagaattacttttccttttgcaaataaaaaaaaaagta

SEQ ID NO: 453148 - DNA, 889 bp, Homo sapiens
catctctggccagcacacgggtcaggtccacacccggtgctgcgtacatctccacattgacctcctgccagcatctcttgggtttgctgagaactcacgggctccagctacctggccatgaccaccacatttctgcaaacttcttcctccacctttgggggtggctcaacccgagggggttccctcctggctgggggaggtggctttggtggggggagtctctctgggggaggtggaagccgaagtatctcagcttcttctgctaggtttgtctcttcagggtcaggaggaggatatgggggtggcatgagggtctgtggctttggtggaggggctggtagtgttttcggtggaggctttggagggggcgttggtgggggttttggtggtggctttggtggtggcgatggtggtctcctctctggcaatgagaaaattaccatgcagaacctcaatgaccgcctggcctcctacctggacaaggtacgtgccctggaggaggccaatgctgacctggaggtgaagatccatgactggtaccagaagcagaccccagccagcccagaatgcgactacagccaatacttcaagaccattgaagagctccgggacaagatcatggccaccaccatcgacaactcccgggtcatcctggagatcgacaatgccaggctggctgcggacgacttcaggctcaagtatgagaatgagctggccctgcgccagggcgttgaggctgacatcaacggcttgcgccgagtcctggatgagctgaccctggccaggactgacctggagatgcagctgtattgtgtaacaagctcatttgtacagtgtctgttcatgtaataaagaattacttttccttttgcaaataaaaaaaaaagta

SEQ ID NO: 453149 - DNA, 448 bp, Homo sapiens
ccggacctgtgctggggaagatgggcaggatgccaggatggctgcattggcatcaggaagcctcttcaggaggtggtggtagcagcagcaatttccacatcaatgtagaagagtcagtggatggacaggtggtttcttcccacaagagagaaatctaagtgtctattgcaggagaaacgtcccttgccactccccactctcatcaggccaagtggaggactggccagagggcctgcacatgcaaactccagtccctgccttcagagagctgaaaagggtccctcggtcttttatttcagggctttgcatgcgctctattccccctctgcctctccccaccttctttggagcaaggagatgcagctgtattgtgtaacaagctcatttgtacagtgtctgttcatgtaataaagaattacttttccttttgcaaataaaaaaaaaagta

SEQ ID NO: 453150 - DNA, 502 bp, Homo sapiens
ctggggccaggtccagagggctgagccacacctccaagtggcactgcccacaggtatcaggtgtccctggaaaggtgtccctgagctggtggcagagaaaagggctctcctgagtgttcaactccccgtctgtgtgaagcaatgccttggtcttcaagatctccggtgtcttccagcctgcctgccagtctcccttctcttcccttccacagcattcaggcacatagagccttctgcagcggcccctccccagccagcacttgacaggacagatgggggctaatctggccctgctaagcagcgacatgcctctcctggagaaggcaggggcttcctggaacttgccccagccttatcagcggaggtttgccccaacacatcccagaaacgagcaaaggttcagcgccgtgcagttggcaggtgtcgggatcatcagtcatccccttgtcagtcccaagcctgctgggcttttgtgagggtgccaggaacacaggctggagga

SEQ ID NO: 453151 - DNA, 499 bp, Homo sapiens
cctgggcaaccaattcccacaggcaatactgcctccttggtctttcgtgccctggagataaggaaggcagctcctcaggtgtctcaaggaggctggatgggacaaaacaagaaatggacactgaaagtgaggctggactttgcccaccccagaagccgtacagatttttgttggtggtgtcagaggggtgattgtcagtgaggggtgattttcaatgaggggctggccttgggtgcagagcagagagcagcaggggagagagaggagtcctctagacaccgactctgtctcctgcagaatcatggccaccaccatcgacaactcccgggtcatcctggagatcgacaatgccaggctggctgcggacgacttcaggctcaagtgcgctcccccgtctctctcctcttcctgcattgcccactttacttggccttctcctggctctgactcaggcagccaagacccctcccacttccttctttggcctccctctcctcag

SEQ ID NO: 453152 - DNA, 1778 bp, Homo sapiens
catctctggccagcacacgggtcaggtccacacccggtgctgcgtacatctccacattgacctcctgccagcatctcttgggtttgctgagaactcacgggctccagctacctggccatgaccaccacatttctgcaaacttcttcctccacctttgggggtggctcaacccgagggggttccctcctggctgggggaggtggctttggtggggggagtctctctgggggaggtggaagccgaagtatctcagcttcttctgctaggtttgtctcttcagggtcaggaggaggatatgggggtggcatgagggtctgtggctttggtggaggggctggtagtgttttcggtggaggctttggagggggcgttggtgggggttttggtggtggctttggtggtggcgatggtggtctcctctctggcaatgagaaaattaccatgcagaacctcaatgaccgcctggcctcctacctggacaaggtacgtgccctggaggaggccaatgctgacctggaggtgaagatccatgactggtaccagaagcagaccccagccagcccagaatgcgactacagccaatacttcaagaccattgaagagctccgggacaagatcatggccaccaccatcgacaactcccgggtcatcctggagatcgacaatgccaggctggctgcggacgacttcaggctcaagtatgagaatgagctggccctgcgccagggcgttgaggctgacatcaacggcttgcgccgagtcctggatgagctgaccctggccaggactgacctggagatgcagatcgagggcctgaatgaggagctagcctacctgaagaagaaccacgaagaggagatgaaggagttcagcagccagctggccggccaggtcaatgtggagatggacgcagcaccgggtgtggacctgacccgtgtgctggcagagatgagggagcagtacgaggccatggcggagaagaaccgccgggatgtcgaggcctggttcttcagcaagactgaggagctgaacaaagaggtggcctccaacacagaaatgatccagaccagcaagacggagatcacagacctgagacgcacgatgcaggagctggagatcgagctgcagtcccagctcagcatgaaagctgggctggagaactcactggccgagacagagtgccgctatgccacgcagctgcagcagatccaggggctcattggtggcctggaggcccagctgagtgagctccgatgcgagatggaggctcagaaccaggagtacaagatgctgcttgacataaagacacggctggagcaggagatcgctacttaccgcagcctgctcgagggccaggatgccaagatggctggcattggcatcagggaagcctcttcaggaggtggtggtagcagcagcaatttccacatcaatgtagaagagtcagtggatggacaggtggtttcttcccacaagagagaaatctaagtgtctattgcaggagaaacgtcccttgccactccccactctcatcaggccaagtggaggactggccagagggcctgcacatgcaaactccagtccctgccttcagagagctgaaaagggtccctcggtcttttatttcagggctttgcatgcgctctattccccctctgcctctccccaccttctttggagcaaggagatgcagctgtattgtgtaacaagctcatttgtacagtgtctgttcatgtaataaagaattacttttccttttgcaaataaaaaaaaaagta

SEQ ID NO: 453153 - DNA, 1512 bp, Homo sapiens
ggagtggggaagttgaggggagtgcctttacatcctgctggtcatcgtggccacttcagtctgttgagcatttcctgtgagtcatcttgctccaactgagagtcaggctgagctggagttatttccattttcctgattggtagactaaggctcagagagaggaggcggcattacccaaagccgcacagctggtaaatgggaaaagaggggtttaaaggtacgtgccctggaggaggccaatgctgacctggaggtgaagatccatgactggtaccagaagcagaccccagccagcccagaatgcgactacagccaatacttcaagaccattgaagagctccgggacaagatcatggccaccaccatcgacaactcccgggtcatcctggagatcgacaatgccaggctggctgcggacgacttcaggctcaagtatgagaatgagctggccctgcgccagggcgttgaggctgacatcaacggcttgcgccgagtcctggatgagctgaccctggccaggactgacctggagatgcagatcgagggcctgaatgaggagctagcctacctgaagaagaaccacgaagaggagatgaaggagttcagcagccagctggccggccaggtcaatgtggagatggacgcagcaccgggtgtggacctgacccgtgtgctggcagagatgagggagcagtacgaggccatggcggagaagaaccgccgggatgtcgaggcctggttcttcagcaagactgaggagctgaacaaagaggtggcctccaacacagaaatgatccagaccagcaagacggagatcacagacctgagacgcacgatgcaggagctggagatcgagctgcagtcccagctcagcatgaaagctgggctggagaactcactggccgagacagagtgccgctatgccacgcagctgcagcagatccaggggctcattggtggcctggaggcccagctgagtgagctccgatgcgagatggaggctcagaaccaggagtacaagatgctgcttgacataaagacacggctggagcaggagatcgctacttaccgcagcctgctcgagggccaggatgccaagatggctggcattggcatcagggaagcctcttcaggaggtggtggtagcagcagcaatttccacatcaatgtagaagagtcagtggatggacaggtggtttcttcccacaagagagaaatctaagtgtctattgcaggagaaacgtcccttgccactccccactctcatcaggccaagtggaggactggccagagggcctgcacatgcaaactccagtccctgccttcagagagctgaaaagggtccctcggtcttttatttcagggctttgcatgcgctctattccccctctgcctctccccaccttctttggagcaaggagatgcagctgtattgtgtaacaagctcatttgtacagtgtctgttcatgtaataaagaattacttttccttttgcaaataaaaaaaaaagta

SEQ ID NO: 453154 - DNA, 1720 bp, Homo sapiens
ggagtggggaagttgaggggagtgcctttacatcctgctggtcatcgtggccacttcagtctgttgagcatttcctgtgagtcatcttgctccaactgagagtcaggctgagctggagttatttccattttcctgattggtagactaaggctcagagagaggaggcggcattacccaaagccgcacagctggtaaatgggaaaagaggggtttaaagcattcaggcacatagagccttctgcagcggcccctccccagccagcacttgacaggacagatgggggctaatctggccctgctaagcagcgacatgcctctcctggagaaggcaggggcttcctggaacttgccccagccttatcagcggaggtttgccccaacacatcccagaaacgagcaaaggttcagcgccgtgcagttggcaggtacgtgccctggaggaggccaatgctgacctggaggtgaagatccatgactggtaccagaagcagaccccagccagcccagaatgcgactacagccaatacttcaagaccattgaagagctccgggacaagatcatggccaccaccatcgacaactcccgggtcatcctggagatcgacaatgccaggctggctgcggacgacttcaggctcaagtatgagaatgagctggccctgcgccagggcgttgaggctgacatcaacggcttgcgccgagtcctggatgagctgaccctggccaggactgacctggagatgcagatcgagggcctgaatgaggagctagcctacctgaagaagaaccacgaagaggagatgaaggagttcagcagccagctggccggccaggtcaatgtggagatggacgcagcaccgggtgtggacctgacccgtgtgctggcagagatgagggagcagtacgaggccatggcggagaagaaccgccgggatgtcgaggcctggttcttcagcaagactgaggagctgaacaaagaggtggcctccaacacagaaatgatccagaccagcaagacggagatcacagacctgagacgcacgatgcaggagctggagatcgagctgcagtcccagctcagcatgaaagctgggctggagaactcactggccgagacagagtgccgctatgccacgcagctgcagcagatccaggggctcattggtggcctggaggcccagctgagtgagctccgatgcgagatggaggctcagaaccaggagtacaagatgctgcttgacataaagacacggctggagcaggagatcgctacttaccgcagcctgctcgagggccaggatgccaagatggctggcattggcatcagggaagcctcttcaggaggtggtggtagcagcagcaatttccacatcaatgtagaagagtcagtggatggacaggtggtttcttcccacaagagagaaatctaagtgtctattgcaggagaaacgtcccttgccactccccactctcatcaggccaagtggaggactggccagagggcctgcacatgcaaactccagtccctgccttcagagagctgaaaagggtccctcggtcttttatttcagggctttgcatgcgctctattccccctctgcctctccccaccttctttggagcaaggagatgcagctgtattgtgtaacaagctcatttgtacagtgtctgttcatgtaataaagaattacttttccttttgcaaataaaaaaaaaagta

SEQ ID NO: 453155 - DNA, 1615 bp, Homo sapiens
catctctggccagcacacgggtcaggtccacacccggtgctgcgtacatctccacattgacctcctgccagcatctcttgggtttgctgagaactcacgggctccagctacctggccatgaccaccacatttctgcaaacttcttcctccacctttgggggtggctcaacccgagggggttccctcctggctgggggaggtggctttggtggggggagtctctctgggggaggtggaagccgaagtatctcagcttcttctgctaggtttgtctcttcagggtcaggaggaggatatgggggtggcatgagggtctgtggctttggtggaggggctggtagtgttttcggtggaggctttggagggggcgttggtgggggttttggtggtggctttggtggtggcgatggtggtctcctctctggcaatgagaaaattaccatgcagaacctcaatgaccgcctggcctcctacctggacaaggtacgtgccctggaggaggccaatgctgacctggaggtgaagatccatgactggtaccagaagcagaccccagccagcccagaatgcgactacagccaatacttcaagaccattgaagagctccgggacaagatcatggccaccaccatcgacaactcccgggtcatcctggagatcgacaatgccaggctggctgcggacgacttcaggctcaagtatgagaatgagctggccctgcgccagggcgttgaggctgacatcaacggcttgcgccgagtcctggatgagctgaccctggccaggactgacctggagatgcagatcgagggcctgaatgaggagctagcctacctgaagaagaaccacgaagaggagatgaaggagttcagcagccagctggccggccaggtcaatgtggagatggacgcagcaccgggtgtggacctgacccgtgtgctggcagagatgagggagcagtacgaggccatggcggagaagaaccgccgggatgtcgaggcctggttcttcagcaagactgaggagctgaacaaagaggtggcctccaacacagaaatgatccagaccagcaagacggagatcacagacctgagacgcacgatgcaggagctggagatcgagctgcagtcccagctcagcatgaaagctgggctggagaactcactggccgagacagagtgccgctatgccacgcagctgcagcagatccaggggctcattggtggcctggaggcccagctgagtgagctccgatgcgagatggaggctcagaaccaggagtacaagatgctgcttgacataaagacacggctggagcaggagatcgctacttaccgcagcctgctcgagggccaggatgccaagatggctggcattggcatcagggaagcctcttcaggaggtggtggtagcagcagcaatttccacatcaatgtagaagagtcagtggatggacaggtggtttcttcccacaagagagaaatctaagtgtctattgcaggagaaacgtcccttgccactccccactctcatcaggccaagtggaggactggccagagggcctgcacatgcaaactccagtcccttttcagctctggtcgacgcggccgcgaat

SEQ ID NO: 453156 - DNA, 1220 bp, Homo sapiens
ccacagccaatgcgataagcagctctagacatgaaagctcgggcagatctggcaacaatcatggccaccaccatcgacaactcccgggtcatcctggagatcgacaatgccaggctggctgcggacgacttcaggctcaagtatgagaatgagctggccctgcgccagggcgttgaggctgacatcaacggcttgcgccgagtcctggatgagctgaccctggccaggactgacctggagatgcagatcgagggcctgaatgaggagctagcctacctgaagaagaaccacgaagaggagatgaaggagttcagcagccagctggccggccaggtcaatgtggagatggacgcagcaccgggtgtggacctgacccgtgtgctggcagagatgagggagcagtacgaggccatggcggagaagaaccgccgggatgtcgaggcctggttcttcagcaagactgaggagctgaacaaagaggtggcctccaacacagaaatgatccagaccagcaagacggagatcacagacctgagacgcacgatgcaggagctggagatcgagctgcagtcccagctcagcatgaaagctgggctggagaactcactggccgagacagagtgccgctatgccacgcagctgcagcagatccaggggctcattggtggcctggaggcccagctgagtgagctccgatgcgagatggaggctcagaaccaggagtacaagatgctgcttgacataaagacacggctggagcaggagatcgctacttaccgcagcctgctcgagggccaggatgccaagatggctggcattggcatcagggaagcctcttcaggaggtggtggtagcagcagcaatttccacatcaatgtagaagagtcagtggatggacaggtggtttcttcccacaagagagaaatctaagtgtctattgcaggagaaacgtcccttgccactccccactctcatcaggccaagtggaggactggccagagggcctgcacatgcaaactccagtccctgccttcagagagctgaaaagggtccctcggtcttttatttcagggctttgcatgcgctctattccccctctgcctctccccaccttctttggagcaaggagatgcagctgtattgtgtaacaagctcatttgtacagtgtctgttcatgtaataaagaattacttttccttttgcaaataaaaaaaaaagta

SEQ ID NO: 453157 - DNA, 2569 bp, Homo sapiens
catctctggccagcacacgggtcaggtccacacccggtgctgcgtacatctccacattgacctcctgccagcatctcttgggtttgctgagaactcacgggctccagctacctggccatgaccaccacatttctgcaaacttcttcctccacctttgggggtggctcaacccgagggggttccctcctggctgggggaggtggctttggtggggggagtctctctgggggaggtggaagccgaagtatctcagcttcttctgctaggtttgtctcttcagggtcaggaggaggatatgggggtggcatgagggtctgtggctttggtggaggggctggtagtgttttcggtggaggctttggagggggcgttggtgggggttttggtggtggctttggtggtggcgatggtggtctcctctctggcaatgagaaaattaccatgcagaacctcaatgaccgcctggcctcctacctggacaaggtacgtgccctggaggaggccaatgctgacctggaggtgaagatccatgactggtaccagaagcagaccccagccagcccagaatgcgactacagccaatacttcaagaccattgaagagctccgggacaagatcatggccaccaccatcgacaactcccgggtcatcctggagatcgacaatgccaggctggctgcggacgacttcaggctcaagtatgagaatgagctggccctgcgccagggcgttgaggctgacatcaacggcttgcgccgagtcctggatgagctgaccctggccaggactgacctggagatgcagatcgagggcctgaatgaggagctagcctacctgaagaagaaccacgaagaggagatgaaggagttcagcagccagctggccggccaggtcaatgtggagatggacgcagcaccgggtgtggacctgacccgtgtgctggcagagatgagggagcagtacgaggccatggcggagaagaaccgccgggatgtcgaggcctggttcttcagcaagactgaggagctgaacaaagaggtggcctccaacacagaaatgatccagaccagcaagacggagatcacagacctgagacgcacgatgcaggagctggagatcgagctgcagtcccagctcagcatgaaagctgggctggagaactcactggccgagacagagtgccgctatgccacgcagctgcagcagatccaggggctcattggtggcctggaggcccagctgagtgagctccgatgcgagatggaggctcagaaccaggagtacaagatgctgcttgacataaagacacggctggagcaggagatcgctacttaccgcagcctgctcgagggccaggatgccaagatggctggcattggcatcagggaaggagtgatgagggctgcttgtggctagggtgcagggtcatcctaagggaatggcagggtgtccctaagcagccttgagggactgtgaaaagagaactgagcaaggagggaggatctggactcctcactctggtccttggctgttacctgggacaggtcacttcctctctctggatccgtgtttcttctgtaaatgatagaggctgggctagtggtagttaagatctagtgctcattccattctctgcatgagatagatgggtattcttgtagttcagaatcttgaccagctcagtggctcatgcctgtaatcccagcactttgggagtccaaggcgggtggatcacttgaggtcaggagttcgagaccagcatggccaatatggtgaaaccccgtctctactaaaaatacaaaaattagctgggcgtggtggcgggtgcctgtaatcccagctactcgggaggctgaggcacaagaatcacttgaacccgggaggcggaggtttcagtgggctgagattgtgccactgcactccagcctgggcgacagagtgagattccgtctcaaaaaacaaaacaaaacaaaacaaaatctgtctacttggggatagcaggcctggatgggctagcaggatgtcccacccctagaggagtcaggtgtgtgggtggtggtggtgtagggtctgaagaacactgcatagctatctacatgagcttcccttacggacacttgagcttgtgccctttgcttaaatcagcttccctctttctttcaggatggctggcattggcatcagggaaggtaggaaggctttactcttctggtgtggggtggggaggggagatgttgaagccaccacccccttcggaatagggaggaaggagaaagagcccaaacatcccattaggtgggaacattcccattcattagatgcctcttccccagtgggaacttctgtcagccccaggtgagattgcagctggtgatttattgagaaacttccaggttgagtaggcttcattcagggcatgtctctcccccaggccccatcttcatacacttccgctaagatgcccacaattcatcccccttcatgtgcagcttgaaaaaccctgacattgttgctccctgccgggcatacctgccattgggccagcgggtgccatgggtgcccaggcggg

SEQ ID NO: 453158 - DNA, 1407 bp, Homo sapiens
gaagaggccccaaaagaagtcccacttcttcctggtggagaggtgagggctgcaggcccaaccctatgagtgatgggggcaagtgagggacactagttccacgcccgcatgctgccaaatgtactcagcaccctgctaaggaggctggagaccccatcacggccatggcaatcccgaaggaggagctgtttcaaggtacgtgccctggaggaggccaatgctgacctggaggtgaagatccatgactggtaccagaagcagaccccagccagcccagaatgcgactacagccaatacttcaagaccattgaagagctccgggacaaggtatgagaatgagctggccctgcgccagggcgttgaggctgacatcaacggcttgcgccgagtcctggatgagctgaccctggccaggactgacctggagatgcagatcgagggcctgaatgaggagctagcctacctgaagaagaaccacgaagaggagatgaaggagttcagcagccagctggccggccaggtcaatgtggagatggacgcagcaccgggtgtggacctgacccgtgtgctggcagagatgagggagcagtacgaggccatggcggagaagaaccgccgggatgtcgaggcctggttcttcagcaagactgaggagctgaacaaagaggtggcctccaacacagaaatgatccagaccagcaagacggagatcacagacctgagacgcacgatgcaggagctggagatcgagctgcagtcccagctcagcatgaaagctgggctggagaactcactggccgagacagagtgccgctatgccacgcagctgcagcagatccaggggctcattggtggcctggaggcccagctgagtgagctccgatgcgagatggaggctcagaaccaggagtacaagatgctgcttgacataaagacacggctggagcaggagatcgctacttaccgcagcctgctcgagggccaggatgccaagatggctggcattggcatcagggaagcctcttcaggaggtggtggtagcagcagcaatttccacatcaatgtagaagagtcagtggatggacaggtggtttcttcccacaagagagaaatctaagtgtctattgcaggagaaacgtcccttgccactccccactctcatcaggccaagtggaggactggccagagggcctgcacatgcaaactccagtccctgccttcagagagctgaaaagggtccctcggtcttttatttcagggctttgcatgcgctctattccccctctgcctctccccaccttctttggagcaaggagatgcagctgtattgtgtaacaagctcatttgtacagtgtctgttcatgtaataaagaattacttttccttttgcaaataaaaaaaaaagta

SEQ ID NO: 453159 - DNA, 743 bp, Homo sapiens
catctctggccagcacacgggtcaggtccacacccggtgctgcgtacatctccacattgacctcctgccagcatctcttgggtttgctgagaactcacgggctccagctacctggccatgaccaccacatttctgcaaacttcttcctccacctttgggggtggctcaacccgagggggttccctcctggctgggggaggtggctttggtggggggagtctctctgggggaggtggaagccgaagtatctcagcttcttctgctaggtttgtctcttcagggtcaggaggaggatatgggggtggcatgagggtctgtggctttggtggaggggctggtagtgttttcggtggagcctcttcaggaggtggtggtagcagcagcaatttccacatcaatgtagaagagtcagtggatggacaggtggtttcttcccacaagagagaaatctaagtgtctattgcaggagaaacgtcccttgccactccccactctcatcaggccaagtggaggactggccagagggcctgcacatgcaaactccagtccctgccttcagagagctgaaaagggtccctcggtcttttatttcagggctttgcatgcgctctattccccctctgcctctccccaccttctttggagcaaggagatgcagctgtattgtgtaacaagctcatttgtacagtgtctgttcatgtaataaagaattacttttccttttgcaaataaaaaaaaaagta

SEQ ID NO: 453160 - DNA, 3457 bp, Homo sapiens
agactcaaaataagtttaacacttactgtgttgggcaccctaacagaagagctatcttaactcattgaatattaagatctgctggtttcaggagtcaaaatgtagaaaaagaggagaattgtaatatggtcagaaacagagaagccttttctatgtaaattcagacttatctgaggctaacagttttccgaagtggtggtgggtagcagcatgacagctgcttgccatgactgatgcagactactaggtttccattttagctctctgtaggtactgttttcttccccactgtgtcgaaagtgatttgttttgaagcaagagtagaatataacatctatcaaatatagcttttaaaataagaatacctggtctggatccagttgagcagcacagcagataaaccttagagtttttctgttcttacatgacggtttccatgtggaaagatctaaactttcttggaatcactattagtgaagaaaaatgtagaatctgtataaccagtaattccccaattcttactttcaaagtcatatccaagaaagacaatatgtcagaatagaatgactttggtctaggtgttttcacgttggcaaaaataaggaggaaattatattattttaatatccaaatttaaaggtttggaaaattttgaatagttaatattagaacttatgttgctgttttttatatttcaaggattgagtattctgcattaatccaatactattccaacaaagagattctggaagtttttaaaaaatgataccctgttttatattttgaatgtagagagactctgagagagagaatgttctgagttatactttttattttttaagatttatttttaagaataaaacattgacctgaacattttagcctaaccaagggacttaagtggtaaagacttgcattatgtcttcatgtgaactgatccgttcattatatattatgggaaaaatcaaagaaagttttttatagagatatgaagatattatttagagagatatttattatgacattttttaaaaacatatttttctattttcaaaatattatttctaggctatatttttattggtgctgtgcaaatgattttgcagttttgaaaatgataaaactagattgtaagtggggttcagtgaggacattcatcagacacgtaagaggtgctgcaatcagggtgatgcccatcttactcatccttggctgcccttggtccgacacctctctatacaagactggttctcagtattttaaatggtacagaattctttttaaaaagtagagagattttgaaaagcataaaaatcatgcctttataatcttagcagccatcagatacaccttgatttatgtagtagtaaatataacaaatattttaataaatagaaacactgataaggaagaaaaaagaactaatgtctatgtcttctgtagtcagcaaaagtctggatccattttctattttgtgttccattggcacactttgtgttcaaatttcagtgcagtcctttcaaaatactcgctaagggttgcctaagtgtctgccttactttctgattgtccttttctgagagcatggttaagaacatcttaaccatatagctgttgaaaaaatctgtttattaaataacaagttcacttctgtttatgttttgagtttagaaaatttgacttgaaaatttagattattaataaatttatttttaaatattaaagtcaaatttcaaatcacccagtgttgaagaatttgcagatgtatacaatactttttctaattatgtcttttctatctccatgcctggctttttctaattatatcctagagaaaaagactaatggtatttcaaagctgtgtatttgtgacgagataaagaagagtcttaaacatcttgtttgggagaatgcacaggccagtcaggagacccacctcctcctgtgccctgagctgctgagacccgacagatcatgaaggctagtaaagggcagagaaggccctgagccatcagtttacactcgaattgttgactcccctttgtggtgtttttgaaggctgcttataccaacagctaatgtggattagtgcttatgatcttgaaaaagtcttgaccaagaatcctaaactccaccactcctcccattccagcttaacactatcagaataatatccaaattccagatttttttcttttttacttttttttcttccttttttaagagagacagtgtcttgctcggtcacctaggctggagtgtagtggcgcaatcgttgctcactacagcctcccaactcccaggctcaaatgagcctcccaccttggcctcccaaagtgctaggaccacaggcatgagccactgtgcccagcctagtttcttttctgtatgctttttttacaaaactgtgagccacagaggttgaccacttagccaatttgttgctagaagggagaaaaaaatctccaactagcctccagacaaaacatactcaaattcaaacagcagttagttttaattaacatacagaagtaattttagactttcagatttctatgctgactagaacactttgcaggctgaagctgacattattaccaaatacttcatttaagtacatactctgaagtgtcaggcttccagtatatatagcaacgctctgagagacaaactgggctcatatgacggggttgcattttattttcttaacaggtctttaaattgggcagttctgaaattctgtttggtcagttctagatggtacgtcatgtgaatgcaaccaagcactgtagttgaaattgtgttatgccactactcatatgttgtcttaggtactacgcataatgttaatagctgagatgttaaagaatttgaagtctaaaatataaaagatgaatatacccatattaatcctatgttaagatgctctggaaataaaggccttattcccttacacatgcgatttttgtaagataatatatacacagtatattttaaatgtttgtgtgggtggtctgtgtagttactccccatacaacaaagctgacaaaatttttaatttacacaatgtattctgcattttcaaatgtttatgttgtgtatatagcaaagaaattatcttactgatatgcgttgaccaaatcccatggagaaaagacatctcatttgaggttccccttcctctcatgtgtttgattttttggaaggtgatacagtatgtgggtaaccatgcaaatgtttatgaataactttactgaagtgattccatccgtattctgttctaatacttggagaatgaccttcatatttatatattttatttctttgtttcaactatccagtgataattcaggaaatgtttccttttttttttttttttacaaaaactttttatttgtaaaatgtttgtaataatgtaaaggtgaacatgttcaataaaaatcatatattaaaagtt

SEQ ID NO: 453161 - DNA, 3394 bp, Homo sapiens
agactcaaaataagtttaacacttactgtgttgggcaccctaacagaagagctatcttaactcattgaatattaagatctgctggtttcaggagtcaaaatgtagaaaaagaggagaattgtaatatggtcagaaacagagaagccttttctatgtaaattcagacttatctgaggctaacagttttccgaagtggtggtgggtagcagcatgacagctgcttgccatgactgatgcagactactaggtttccattttagctctctgtaggtactgttttcttccccactgtgtcgaaagtgatttgttttgaagcaagagtagaatataacatctatcaaatatagcttttaaaataagaatacctggtctggatccagttgagcagcacagcagataaaccttagagtttttctgttcttacatgacggtttccatgtggaaagatctaaactttcttggaatcactattagtgaagaaaaatgtagaatctgtataaccagtaattccccaattcttactttcaaagtcatatccaagaaagacaatatgtcagaatagaatgactttggtctaggtgttttcacgttggcaaaaataaggaggaaattatattattttaatatccaaatttaaaggtttggaaaattttgaatagttaatattagaacttatgttgctgttttttatatttcaaggattgagtattctgcattaatccaatactattccaacaaagagattctggaagtttttaaaaaatgataccctgttttatattttgaatgtagagagactctgagagagagaatgttctgagttatactttttattttttaagatttatttttaagaataaaacattgacctgaacattttagcctaaccaagggacttaagtggtaaagacttgcattatgtcttcatgtgaactgatccgttcattatatattatgggaaaaatcaaagaaagttttttatagagatatgaagatattatttagagagatatttattatgacattttttaaaaacatatttttctattttcaaaatattatttctaggctatatttttattggtgctgtgcaaatgattttgcagttttgaaaatgataaaactagattgtaagtggggttcagtgaggacattcatcagacacgtaagaggtgctgcaatcagggtgatgcccatcttactcatccttggctgcccttggtccgacacctctctatacaagactggttctcagtattttaaatggtacagaattctttttaaaaagtagagagattttgaaaagcataaaaatcatgcctttataatcttagcagccatcagatacaccttgatttatgtagtagtaaatataacaaatattttaataaatagaaacactgataaggaagaaaaaagaactaatgtctatgtcttctgtagtcagcaaaagtctggatccattttctattttgtgttccattggcacactttgtgttcaaatttcagtgcagtcctttcaaaatactcgctaagggttgcctaagtgtctgccttactttctgattgtccttttctgagagcatggttaagaacatcttaaccatatagctgttgaaaaaatctgtttattaaataacaagttcacttctgtttatgttttgagtttagaaaatttgacttgaaaatttagattattaataaatttatttttaaatattaaagtcaaatttcaaatcacccagtgttgaagaatttgcagatgtatacaatactttttctaattatgtcttttctatctccatgcctggctttttctaattatatcctagagaaaaagactaatggtatttcaaagctgtgtatttgtgacgagataaagaagagtcttaaacatcttgtttgggagaatgcacaggccagtcaggagacccacctcctcctgtgccctgagctgctgagacccgacagatcatgaaggctagtaaagggcagagaaggccctgagccatcagtttacactcgaattgttgactcccctttgtggtgtttttgaaggctgcttataccaacagctaatgtggattagtgcttatgatcttgaaaaagtcttgaccaagaatcctaaactccaccactcctcccattccagcttaacactatcagaataatatccaaattccagatttttttcttttttacttttttttcttccttttttaagagagacagtgtcttgctcggtcacctaggctggagtgtagtggcgcaatcgttgctcactacagcctcccaactcccaggctcaaatgagcctcccaccttggcctcccaaagtgctaggaccacaggcatgagccactgtgcccagcctagtttcttttctgtatgctttttttacaaaactgtgagccacagaggttgaccacttagccaatttgttgctagaagggagaaaaaaatctccaactagcctccagacaaaacatactcaaattcaaacagcagttagttttaattaacatacagaagtaattttagactttcagatttctatgctgactagaacactttgcaggctgaagctgacattattaccaaatacttcatttaagtacatactctgaagtgtcaggcttccagtatatatagcaacgctctgagagacaaactgggctcatatgacggggttgcattttattttcttaacaggtctttaaacactgtagttgaaattgtgttatgccactactcatatgttgtcttaggtactacgcataatgttaatagctgagatgttaaagaatttgaagtctaaaatataaaagatgaatatacccatattaatcctatgttaagatgctctggaaataaaggccttattcccttacacatgcgatttttgtaagataatatatacacagtatattttaaatgtttgtgtgggtggtctgtgtagttactccccatacaacaaagctgacaaaatttttaatttacacaatgtattctgcattttcaaatgtttatgttgtgtatatagcaaagaaattatcttactgatatgcgttgaccaaatcccatggagaaaagacatctcatttgaggttccccttcctctcatgtgtttgattttttggaaggtgatacagtatgtgggtaaccatgcaaatgtttatgaataactttactgaagtgattccatccgtattctgttctaatacttggagaatgaccttcatatttatatattttatttctttgtttcaactatccagtgataattcaggaaatgtttccttttttttttttttttacaaaaactttttatttgtaaaatgtttgtaataatgtaaaggtgaacatgttcaataaaaatcatatattaaaagtt

SEQ ID NO: 453162 - DNA, 3401 bp, Homo sapiens
agactcaaaataagtttaacacttactgtgttgggcaccctaacagaagagctatcttaactcattgaatattaagatctgctggtttcaggagtcaaaatgtagaaaaagaggagaattgtaatatggtcagaaacagagaagccttttctatgtaaattcagacttatctgaggctaacagttttccgaagtggtggtgggtagcagcatgacagctgcttgccatgactgatgcagactactaggtttccattttagctctctgtaggtactgttttcttccccactgtgtcgaaagtgatttgttttgaagcaagagtagaatataacatctatcaaatatagcttttaaaataagaatacctggtctggatccagttgagcagcacagcagataaaccttagagtttttctgttcttacatgacggtttccatgtggaaagatctaaactttcttggaatcactattagtgaagaaaaatgtagaatctgtataaccagtaattccccaattcttactttcaaagtcatatccaagaaagacaatatgtcagaatagaatgactttggtctaggtgttttcacgttggcaaaaataaggaggaaattatattattttaatatccaaatttaaaggtttggaaaattttgaatagttaatattagaacttatgttgctgttttttatatttcaaggattgagtattctgcattaatccaatactattccaacaaagagattctggaagtttttaaaaaatgataccctgttttatattttgaatgtagagagactctgagagagagaatgttctgagttatactttttattttttaagatttatttttaagaataaaacattgacctgaacattttagcctaaccaagggacttaagtggtaaagacttgcattatgtcttcatgtgaactgatccgttcattatatattatgggaaaaatcaaagaaagttttttatagagatatgaagatattatttagagagatatttattatgacattttttaaaaacatatttttctattttcaaaatattatttctaggctatatttttattggtgctgtgcaaatgattttgcagttttgaaaatgataaaactagattgtaagtggggttcagtgaggacattcatcagacacgtaagaggtgctgcaatcagggtgatgcccatcttactcatccttggctgcccttggtccgacacctctctatacaagactggttctcagtattttaaatggtacagaattctttttaaaaagtagagagattttgaaaagcataaaaatcatgcctttataatcttagcagccatcagatacaccttgatttatgtagtagtaaatataacaaatattttaataaatagaaacactgataaggaagaaaaaagaactaatgtctatgtcttctgtagtcagcaaaagtctggatccattttctattttgtgttccattggcacactttgtgttcaaatttcagtgcagtcctttcaaaatactcgctaagggttgcctaagtgtctgccttactttctgattgtccttttctgagagcatggttaagaacatcttaaccatatagctgttgaaaaaatctgtttattaaataacaagttcacttctgtttatgttttgagtttagaaaatttgacttgaaaatttagattattaataaatttatttttaaatattaaagtcaaatttcaaatcacccagtgttgaagaatttgcagatgtatacaatactttttctaattatgtcttttctatctccatgcctggctttttctaattatatcctagagaaaaagactaatggtatttcaaagctgtgtatttgtgacgagataaagaagagtcttaaacatcttgtttgggagaatgcacaggccagtcaggagacccacctcctcctgtgccctgagctgctgagacccgacagatcatgaaggctagtaaagggcagagaaggccctgagccatcagtttacactcgaattgttgactcccctttgtggtgtttttgaaggctgcttataccaacagctaatgtggattagtgcttatgatcttgaaaaagtcttgaccaagaatcctaaactccaccactcctcccattccagcttaacactatcagaataatatccaaattccagatttttttcttttttacttttttttcttccttttttaagagagacagtgtcttgctcggtcacctaggctggagtgtagtggcgcaatcgttgctcactacagcctcccaactcccaggctcaaatgagcctcccaccttggcctcccaaagtgctaggaccacaggcatgagccactgtgcccagcctagtttcttttctgtatgctttttttacaaaactgtgagccacagaggttgaccacttagccaatttgttgctagaagggagaaaaaaatctccaactagcctccagacaaaacatactcaaattcaaacagcagttagttttaattaacatacagaagtaattttagactttcagatttctatgctgactagaacactttgcaggctgaagctgacattattaccaaatacttcatttaagtacatactctgaagtgtcaggcttccagtatatatagcaacgctctgagagacaaactgggctcatatgacggggttgcattttattttcttaacaggtctttaaattgggcagttctgaaattctgtttggtcagttctagatggtacgtcatgtgaatgcaaccaagcactgtagttgaaattgtgttatgccactactcatatgttgtcttaggtactacgcataatgttaatagctgagatgttaaagaatttgaagtctaaaatataaaagatgaatatacccatattaatcctatgttaagatgctctggaaaattttaaatgtttgtgtgggtggtctgtgtagttactccccatacaacaaagctgacaaaatttttaatttacacaatgtattctgcattttcaaatgtttatgttgtgtatatagcaaagaaattatcttactgatatgcgttgaccaaatcccatggagaaaagacatctcatttgaggttccccttcctctcatgtgtttgattttttggaaggtgatacagtatgtgggtaaccatgcaaatgtttatgaataactttactgaagtgattccatccgtattctgttctaatacttggagaatgaccttcatatttatatattttatttctttgtttcaactatccagtgataattcaggaaatgtttccttttttttttttttttacaaaaactttttatttgtaaaatgtttgtaataatgtaaaggtgaacatgttcaataaaaatcatatattaaaagtt

SEQ ID NO: 453163 - DNA, 1139 bp, Homo sapiens
ctggctaacacggtgaaaccccatctctactaaaaatacaaaaattagctgggcatggtggcgggcgcctatagtctcagctacttgggaggctgaggcaggagaatggtgtgaacctgggaggtggagcttgcagtgagccgagatggcaccactgggcgacagagcgagactccgcccccaccccccataaaaaggggaatgccgttcttggtctgggatggccttgctgtggtacactccagggagcacgggccagggtcagggttctggctctggagcccctttggtcccatcagctacagtcctacagttttccaactgcaggggctacctctgaggagcaggatgatgaggctgagcctcgtctggtctgtcagtggccccaccgtgtcagactccagggtagattggtcagagagcaggggaaggacattagaaagtctggtgtggcccggggtttagtggggtgaactgcagaggaacagaccaagagtgagcttgtgggccgggatcctccccgcattagcagcagccccacaagttccagaaaggagcagccagggagcaggggaaagctgggatcacaggcctaggcaggccctatggttctcacactgtaggaggactggccaaggggcagcatgatggctctgaaggccctttagtcccataggcaggtggcctactctgggcagattgcaaaaggggctggctagggaggtggattcatgcctggtcaccttgtctacctgccacagccctattgtgaatagactctaatagggaccagccagtcgcatcaacagcagccccactgtggtcagactcaaggagggcctggctggaagcaggatgatggtctgtgcattctccccacaggtggggaacgccaagcacaacgtgcatgtcatgaacatctccgctgctgtcaacaagctgcagggccacagtgcacctgtgcttgatgtcagcttcaactgcgacgagagcctactggcctccagtgacgccagcggcatggtcatcgtctggaggcgggagcagaagtagggtcctgtcggccctgctgctgtcctccatcccacccctcttactccagcctcgtgttgtaaataaagtttcggtggtcatgctga

SEQ ID NO: 453164 - DNA, 2184 bp, Homo sapiens
  misc_feature (16)..(16): n is a, c, g, or t
  misc_feature (18)..(18): n is a, c, g, or t
  misc_feature (21)..(21): n is a, c, g, or t
  misc_feature (39)..(39): n is a, c, g, or t
  misc_feature (52)..(52): n is a, c, g, or t
cggcgcaacaaatttntncancctggagacggaaactancttcggcttcggnaaacccacgcgtgcagccatcttgcctggagcctgagaaagggaggagagacagaaggaaccggcgacagtggtctcagggccgctccggggggcctcaagaaccggaggcagccccggaggtggtccccgatcccgggctatgctcttggatctgagaagggaaggcggagggcggcggggacaagatgggtggagaatgtcaagcaaggaatgctaggcgggggaggggcgttgctatggcgactggggaggggcggtgtctgttctgaatcgctgtgtgtcacccgggcgctgcccaggaagggcagggctggggtgatgaccatggtaacacccgggtgggagttcgtgacatctccggcgcggagggactcgatgtctatggcaatggtcgcctggtggaagggacggaactagatcccttcgctcgggacgctcacattccaggcccttgtcctgcaggctgccgcgggcggacacgccagaggaggaggccggggaatggccgcggtgtggcagcaagtcttagcagtggacgcgaggtacaacgcgtaccgcacaccaacgtttccacagtttcggacgcagtatatccgccggcgcagccagctgctgcgggagaatgccaaggctgggcaccccccagcgctgcgtcggcagtacctgaggcttcgggggcagctgctgggccagcgctacgggcccctctccgagccaggcagtgctcgtgcctatagcaacagcatcgtccgcagtagccgcactactcttgaccgcatggaggactttgaggatgatcctcgggccctgggggcccgtgggcaccgtcgttctgtcagcagaggctcctaccagctgcaggcgcagatgaaccgtgccgtctatgaggacaggccccctggcagcgtggtgcccacgtcagcagcagaggcaagtcgggccatggccggggacacgtcactgagcgagaactatgcctttgcgggcatgtatcatgtttttgaccagcacgtggatgaggcagtcccaagggtgcgcttcgccaatgatgaccgacaccgcctggcctgctgctcactcgacggcagcatctccctgtgccagctggtgcctgccccacccacagtgcttcgcgtgctacggggccacacccgtggtgtctccgacttcgcctggtccctctccaatgacatcctcgtgtccacctcactggatgccaccatgcgcatctgggcctctgaggatggtcgctgcatccgagagatccctgaccccgatagcgctgaactgctctgctgcaccttccagcctgtcaacaacaacctcactgtggtggggaacgccaagcacaacgtgcatgtcatgaacatctccacaggcaagaaagtgaaggggggctccagcaagctgacaggccgtgtccttgctctgtcctttgatgcccctggccggctgctctgggcgggtgatgaccgtggcagtgtcttctctttcctctttgatatggccacagggaagctgaccaaagccaagcgtttggtggtgcatgaggggagccctgtgaccagcatctcagcccggtcctgggtcagccgcgaggcccgggatccctcactgctcatcaatgcttgcctcaacaagttgctgctctacagggtggtagacaacgaggggaccctgcagctgaagagaagcttccccatcgagcagagctcacatcctgtgcgcagcatcttctgtcccctcatgtccttccgccagggggcctgcgtggtgacgggcagtgaggacatgtgcgtgcacttctttgatgtggagcgggcggccaaggctgctgtcaacaagctgcagggccacagtgcacctgtgcttgatgtcagcttcaactgcgacgagagcctactggcctccagtgacgccagcggcatggtcatcgtctggaggcgggagcagaagtagggtcctgtcggccctgctgctgtcctccatcccacccctcttactccagcctcgtgttgtaaataaagtttcggtggtcatgctgagggccggctcccagctctgccggggacggacagggcagagggcagcgggcagctccaggaacacggtggaacggggaaaaaaaac

SEQ ID NO: 453165 - DNA, 1841 bp, Homo sapiens
  misc_feature (16)..(16): n is a, c, g, or t
  misc_feature (18)..(18): n is a, c, g, or t
  misc_feature (21)..(21): n is a, c, g, or t
  misc_feature (39)..(39): n is a, c, g, or t
  misc_feature (52)..(52): n is a, c, g, or t
cggcgcaacaaatttntncancctggagacggaaactancttcggcttcggnaaacccacgcgtgcagccatcttgcctggagcctgagaaagggaggagagacagaaggaaccggcgacagtggtctcagggccgctccggggggcctcaagaaccggaggcagccccggaggctgccgcgggcggacacgccagaggaggaggccggggaatggccgcggtgtggcagcaagtcttagcagtggacgcgaggtacaacgcgtaccgcacaccaacgtttccacagtttcggacgcagtatatccgccggcgcagccagctgctgcgggagaatgccaaggctgggcaccccccagcgctgcgtcggcagtacctgaggcttcgggggcagctgctgggccagcgctacgggcccctctccgagccaggcagtgctcgtgcctatagcaacagcatcgtccgcagtagccgcactactcttgaccgcatggaggactttgaggatgatcctcgggccctgggggcccgtgggcaccgtcgttctgtcagcagaggctcctaccagctgcaggcgcagatgaaccgtgccgtctatgaggacaggccccctggcagcgtggtgcccacgtcagcagcagaggcaagtcgggccatggccggggacacgtcactgagcgagaactatgcctttgcgggcatgtatcatgtttttgaccagcacgtggatgaggcagtcccaagggtgcgcttcgccaatgatgaccgacaccgcctggcctgctgctcactcgacggcagcatctccctgtgccagctggtgcctgccccacccacagtgcttcgcgtgctacggggccacacccgtggtgtctccgacttcgcctggtccctctccaatgacatcctcgtgtccacctcactggatgccaccatgcgcatctgggcctctgaggatggtcgctgcatccgagagatccctgaccccgatagcgctgaactgctctgctgcaccttccagcctgtcaacaacaacctcactgtggtggggaacgccaagcacaacgtgcatgtcatgaacatctccacaggcaagaaagtgaaggggggctccagcaagctgacaggccgtgtccttgctctgtcctttgatgcccctggccggctgctctgggcgggtgatgaccgtggcagtgtcttctctttcctctttgatatggccacagggaagctgaccaaagccaagcgtttggtggtgcatgaggggagccctgtgaccagcatctcagcccggtcctgggtcagccgcgaggcccgggatccctcactgctcatcaatgcttgcctcaacaagttgctgctctacagggtggtagacaacgaggggaccctgcagctgaagagaagcttccccatcgagcagagctcacatcctgtgcgcagcatcttctgtcccctcatgtccttccgccagggggcctgcgtggtgacgggcagtgaggacatgtgcgtgcacttctttgatgtggagcgggcggccaaggctgctgtcaacaagctgcagggccacagtgcacctgtgcttgatgtcagcttcaactgcgacgagagcctactggcctccagtgacgccagcggcatggtcatcgtctggaggcgggagcagaagtagggtcctgtcggccctgctgctgtcctccatcccacccctcttactccagcctcgtgttgtaaataaagtttcggtggtcatgctgagggccggctcccagctctgccggggacggacagggcagagggcagcgggcagctccaggaacacggtggaacggggaaaaaaaac

SEQ ID NO: 453166 - DNA, 1720 bp, Homo sapiens
tgggctcggcagttctttctgatagcaggcagccatcttgcctggagcctgagaaagggaggagagacagaaggaaccggcgacagtggtctcagggccgctccggggggcctcaagaaccggaggcagccccggaggctgccgcgggcggacacgccagaggaggaggccggggaatggccgcggtgtggcagcaagtcttagcagtggacgcgaggtacaacgcgtaccgcacaccaacgtttccacagtttcggacgcagtatatccgccggcgcagccagctgctgcgggagaatgccaaggctgggcaccccccagcgctgcgtcggcagtacctgaggcttcgggggcagctgctgggccagcgctacgggcccctctccgagccaggcagtgctcgtgcctatagcaacagcatcgtccgcagtagccgcactactcttgaccgcatggaggactttgaggatgatcctcgggccctgggggcccgtgggcaccgtcgttctgtcagcagaggctcctaccagctgcaggcgcagatgaaccgtgccgtctatgaggacaggccccctggcagcgtggtgcccacgtcagcagcagaggcaagtcgggccatggccggggacacgtcactgagcgagaactatgcctttgcgggcatgtatcatgtttttgaccagcacgtggatgaggcagtcccaagggtgcgcttcgccaatgatgaccgacaccgcctggcctgctgctcactcgacggcagcatctccctgtgccagctggtgcctgccccacccacagtgcttcgcgtgctacggggccacacccgtggtgtctccgacttcgcctggtccctctccaatgacatcctcgtgtccacctcactggatgccaccatgcgcatctgggcctctgaggatggtcgctgcatccgagagatccctgaccccgatagcgctgaactgctctgctgcaccttccagcctgtcaacaacaacctcactgtggtggggaacgccaagcacaacgtgcatgtcatgaacatctccacaggcaagaaagtgaaggggggctccagcaagctgacaggccgtgtccttgctctgtcctttgatgcccctggccggctgctctgggcgggtgatgaccgtggcagtgtcttctctttcctctttgatatggccacagggaagctgaccaaagccaagcgtttggtggtgcatgaggggagccctgtgaccagcatctcagcccggtcctgggtcagccgcgaggcccgggatccctcactgctcatcaatgcttgcctcaacaagttgctgctctacagggtggtagacaacgaggggaccctgcagctgaagagaagcttccccatcgagcagagctcacatcctgtgcgcagcatcttctgtcccctcatgtccttccgccagggggcctgcgtggtgacgggcagtgaggacatgtgcgtgcacttctttgatgtggagcgggcggccaaggctgctgtcaacaagctgcagggccacagtgcacctgtgcttgatgtcagcttcaactgcgacgagagcctactggcctccagtgacgccagcggcatggtcatcgtctggaggcgggagcagaagtagggtcctgtcggccctgctgctgtcctccatcccacccctcttactccagcctcgtgttgtaaataaagtttcggtggtcatgctga

SEQ ID NO: 453167 - DNA, 1881 bp, Homo sapiens
  misc_feature (16)..(16): n is a, c, g, or t
  misc_feature (18)..(18): n is a, c, g, or t
  misc_feature (21)..(21): n is a, c, g, or t
  misc_feature (39)..(39): n is a, c, g, or t
  misc_feature (52)..(52): n is a, c, g, or t
cggcgcaacaaatttntncancctggagacggaaactancttcggcttcggnaaacccacgcgtgcagccatcttgcctggagcctgagaaagggaggagagacagaaggaaccggcgacagtggtctcagggccgctccggggggcctcaagaaccggaggcagccccggaggtggtccccgatcccgggctatgctcttggatctgagaaggctgccgcgggcggacacgccagaggaggaggccggggaatggccgcggtgtggcagcaagtcttagcagtggacgcgaggtacaacgcgtaccgcacaccaacgtttccacagtttcggacgcagtatatccgccggcgcagccagctgctgcgggagaatgccaaggctgggcaccccccagcgctgcgtcggcagtacctgaggcttcgggggcagctgctgggccagcgctacgggcccctctccgagccaggcagtgctcgtgcctatagcaacagcatcgtccgcagtagccgcactactcttgaccgcatggaggactttgaggatgatcctcgggccctgggggcccgtgggcaccgtcgttctgtcagcagaggctcctaccagctgcaggcgcagatgaaccgtgccgtctatgaggacaggccccctggcagcgtggtgcccacgtcagcagcagaggcaagtcgggccatggccggggacacgtcactgagcgagaactatgcctttgcgggcatgtatcatgtttttgaccagcacgtggatgaggcagtcccaagggtgcgcttcgccaatgatgaccgacaccgcctggcctgctgctcactcgacggcagcatctccctgtgccagctggtgcctgccccacccacagtgcttcgcgtgctacggggccacacccgtggtgtctccgacttcgcctggtccctctccaatgacatcctcgtgtccacctcactggatgccaccatgcgcatctgggcctctgaggatggtcgctgcatccgagagatccctgaccccgatagcgctgaactgctctgctgcaccttccagcctgtcaacaacaacctcactgtggtggggaacgccaagcacaacgtgcatgtcatgaacatctccacaggcaagaaagtgaaggggggctccagcaagctgacaggccgtgtccttgctctgtcctttgatgcccctggccggctgctctgggcgggtgatgaccgtggcagtgtcttctctttcctctttgatatggccacagggaagctgaccaaagccaagcgtttggtggtgcatgaggggagccctgtgaccagcatctcagcccggtcctgggtcagccgcgaggcccgggatccctcactgctcatcaatgcttgcctcaacaagttgctgctctacagggtggtagacaacgaggggaccctgcagctgaagagaagcttccccatcgagcagagctcacatcctgtgcgcagcatcttctgtcccctcatgtccttccgccagggggcctgcgtggtgacgggcagtgaggacatgtgcgtgcacttctttgatgtggagcgggcggccaaggctgctgtcaacaagctgcagggccacagtgcacctgtgcttgatgtcagcttcaactgcgacgagagcctactggcctccagtgacgccagcggcatggtcatcgtctggaggcgggagcagaagtagggtcctgtcggccctgctgctgtcctccatcccacccctcttactccagcctcgtgttgtaaataaagtttcggtggtcatgctgagggccggctcccagctctgccggggacggacagggcagagggcagcgggcagctccaggaacacggtggaacggggaaaaaaaac

SEQ ID NO: 453168 - DNA, 1847 bp, Homo sapiens
  misc_feature (16)..(16): n is a, c, g, or t
  misc_feature (18)..(18): n is a, c, g, or t
  misc_feature (21)..(21): n is a, c, g, or t
  misc_feature (39)..(39): n is a, c, g, or t
  misc_feature (52)..(52): n is a, c, g, or t
cggcgcaacaaatttntncancctggagacggaaactancttcggcttcggnaaacccacgcgtgcagccatcttgcctggagcctgagaaagggaggagagacagaaggaaccggcgacagtggtctcagggccgctccggggggcctcaagaaccggaggcagccccggaggtggtccccgatcccgggctatgctcttggatctgagaaggctgccgcgggcggacacgccagaggaggaggccggggaatggccgcggtgtggcagcaagtcttagcagtggacgcgagtttcggacgcagtatatccgccggcgcagccagctgctgcgggagaatgccaaggctgggcaccccccagcgctgcgtcggcagtacctgaggcttcgggggcagctgctgggccagcgctacgggcccctctccgagccaggcagtgctcgtgcctatagcaacagcatcgtccgcagtagccgcactactcttgaccgcatggaggactttgaggatgatcctcgggccctgggggcccgtgggcaccgtcgttctgtcagcagaggctcctaccagctgcaggcgcagatgaaccgtgccgtctatgaggacaggccccctggcagcgtggtgcccacgtcagcagcagaggcaagtcgggccatggccggggacacgtcactgagcgagaactatgcctttgcgggcatgtatcatgtttttgaccagcacgtggatgaggcagtcccaagggtgcgcttcgccaatgatgaccgacaccgcctggcctgctgctcactcgacggcagcatctccctgtgccagctggtgcctgccccacccacagtgcttcgcgtgctacggggccacacccgtggtgtctccgacttcgcctggtccctctccaatgacatcctcgtgtccacctcactggatgccaccatgcgcatctgggcctctgaggatggtcgctgcatccgagagatccctgaccccgatagcgctgaactgctctgctgcaccttccagcctgtcaacaacaacctcactgtggtggggaacgccaagcacaacgtgcatgtcatgaacatctccacaggcaagaaagtgaaggggggctccagcaagctgacaggccgtgtccttgctctgtcctttgatgcccctggccggctgctctgggcgggtgatgaccgtggcagtgtcttctctttcctctttgatatggccacagggaagctgaccaaagccaagcgtttggtggtgcatgaggggagccctgtgaccagcatctcagcccggtcctgggtcagccgcgaggcccgggatccctcactgctcatcaatgcttgcctcaacaagttgctgctctacagggtggtagacaacgaggggaccctgcagctgaagagaagcttccccatcgagcagagctcacatcctgtgcgcagcatcttctgtcccctcatgtccttccgccagggggcctgcgtggtgacgggcagtgaggacatgtgcgtgcacttctttgatgtggagcgggcggccaaggctgctgtcaacaagctgcagggccacagtgcacctgtgcttgatgtcagcttcaactgcgacgagagcctactggcctccagtgacgccagcggcatggtcatcgtctggaggcgggagcagaagtagggtcctgtcggccctgctgctgtcctccatcccacccctcttactccagcctcgtgttgtaaataaagtttcggtggtcatgctgagggccggctcccagctctgccggggacggacagggcagagggcagcgggcagctccaggaacacggtggaacggggaaaaaaaac

SEQ ID NO: 453169 - DNA, 2150 bp, Homo sapiens
  misc_feature (16)..(16): n is a, c, g, or t
  misc_feature (18)..(18): n is a, c, g, or t
  misc_feature (21)..(21): n is a, c, g, or t
  misc_feature (39)..(39): n is a, c, g, or t
  misc_feature (52)..(52): n is a, c, g, or t
cggcgcaacaaatttntncancctggagacggaaactancttcggcttcggnaaacccacgcgtgcagccatcttgcctggagcctgagaaagggaggagagacagaaggaaccggcgacagtggtctcagggccgctccggggggcctcaagaaccggaggcagccccggaggtggtccccgatcccgggctatgctcttggatctgagaagggaaggcggagggcggcggggacaagatgggtggagaatgtcaagcaaggaatgctaggcgggggaggggcgttgctatggcgactggggaggggcggtgtctgttctgaatcgctgtgtgtcacccgggcgctgcccaggaagggcagggctggggtgatgaccatggtaacacccgggtgggagttcgtgacatctccggcgcggagggactcgatgtctatggcaatggtcgcctggtggaagggacggaactagatcccttcgctcgggacgctcacattccaggcccttgtcctgcaggctgccgcgggcggacacgccagaggaggaggccggggaatggccgcggtgtggcagcaagtcttagcagtggacgcgagtttcggacgcagtatatccgccggcgcagccagctgctgcgggagaatgccaaggctgggcaccccccagcgctgcgtcggcagtacctgaggcttcgggggcagctgctgggccagcgctacgggcccctctccgagccaggcagtgctcgtgcctatagcaacagcatcgtccgcagtagccgcactactcttgaccgcatggaggactttgaggatgatcctcgggccctgggggcccgtgggcaccgtcgttctgtcagcagaggctcctaccagctgcaggcgcagatgaaccgtgccgtctatgaggacaggccccctggcagcgtggtgcccacgtcagcagcagaggcaagtcgggccatggccggggacacgtcactgagcgagaactatgcctttgcgggcatgtatcatgtttttgaccagcacgtggatgaggcagtcccaagggtgcgcttcgccaatgatgaccgacaccgcctggcctgctgctcactcgacggcagcatctccctgtgccagctggtgcctgccccacccacagtgcttcgcgtgctacggggccacacccgtggtgtctccgacttcgcctggtccctctccaatgacatcctcgtgtccacctcactggatgccaccatgcgcatctgggcctctgaggatggtcgctgcatccgagagatccctgaccccgatagcgctgaactgctctgctgcaccttccagcctgtcaacaacaacctcactgtggtggggaacgccaagcacaacgtgcatgtcatgaacatctccacaggcaagaaagtgaaggggggctccagcaagctgacaggccgtgtccttgctctgtcctttgatgcccctggccggctgctctgggcgggtgatgaccgtggcagtgtcttctctttcctctttgatatggccacagggaagctgaccaaagccaagcgtttggtggtgcatgaggggagccctgtgaccagcatctcagcccggtcctgggtcagccgcgaggcccgggatccctcactgctcatcaatgcttgcctcaacaagttgctgctctacagggtggtagacaacgaggggaccctgcagctgaagagaagcttccccatcgagcagagctcacatcctgtgcgcagcatcttctgtcccctcatgtccttccgccagggggcctgcgtggtgacgggcagtgaggacatgtgcgtgcacttctttgatgtggagcgggcggccaaggctgctgtcaacaagctgcagggccacagtgcacctgtgcttgatgtcagcttcaactgcgacgagagcctactggcctccagtgacgccagcggcatggtcatcgtctggaggcgggagcagaagtagggtcctgtcggccctgctgctgtcctccatcccacccctcttactccagcctcgtgttgtaaataaagtttcggtggtcatgctgagggccggctcccagctctgccggggacggacagggcagagggcagcgggcagctccaggaacacggtggaacggggaaaaaaaac

SEQ ID NO: 453170 - DNA, 1829 bp, Homo sapiens
tgggctcggcagttctttctgatagcaggcagccatcttgcctggagcctgagaaagggaggagagacagaaggaaccggcgacagtggtctcagggccgctccggggggcctcaagaaccggaggcagccccggaggctgccgcgggcggacacgccagaggaggaggccggggaatggccgcggtgtggcagcaagtcttagcagtggacgcgaggtacaacgcgtaccgcacaccaacgtttccacagtttcggacgcagtatatccgccggcgcagccagctgctgcgggagaatgccaaggctgggcaccccccagcgctgcgtcggcagtacctgaggcttcgggggcagctgctgggccagcgctacgggcccctctccgagccaggcagtgctcgtgcctatagcaacagcatcgtccgcagtagccgcactactcttgaccgcatggaggactttgaggatgatcctcgggccctgggggcccgtgggcaccgtcgttctgtcagcagaggctcctaccagctgcaggcgcagatgaaccgtgccgtctatgaggacaggccccctggcagcgtggtgcccacgtcagcagcagaggcaagtcgggccatggccggggacacgtcactgagcgagaactatgcctttgcgggcatgtatcatgtttttgaccagcacgtggatgaggcagtcccaagggtgcgcttcgccaatgatgaccgacaccgcctggcctgctgctcactcgacggcagcatctccctgtgccagctggtgcctgccccacccacagtgcttcgcgtgctacggggccacacccgtggtgtctccgacttcgcctggtccctctccaatgacatcctcgtgtccacctcactggatgccaccatgcgcatctgggcctctgaggatggtcgctgcatccgagagatccctgaccccgatagcgctgaactgctctgctgcaccttccagcctgtcaacaacaacctcactgtggtcaggctccaggacacccacacagtggggaacgccaagcacaacgtgcatgtcatgaacatctccacaggcaagaaagtgaaggggggctccagcaagctgacaggccgtgtccttgctctgtcctttgatgcccctggccggctgctctgggcgggtgatgaccgtggcagtgtcttctctttcctctttgatatggccacagggaagctgaccaaagccaagcgtttggtggtgcatgaggggagccctgtgaccagcatctcagcccggtcctgggtcagccgcgaggcccgggatccctcactgctcatcaatgcttgcctcaacaagttgctgctctacagggtggtagacaacgaggggaccctgcagctgaagagaagcttccccatcgagcagagctcacatcctgtgcgcagcatcttctgtcccctcatgtccttccgccagggggcctgcgtggtgacgggcagtgaggacatgtgcgtgcacttctttgatgtggagcgggcggccaaggctgctgtcaacaagctgcagggccacagtgcacctgtgcttgatgtcagcttcaactgcgacgagagcctactggcctccagtgacgccagcggcatggtcatcgtctggaggcgggagcagaagtagggtcctgtcggccctgctgctgtcctccatcccacccctcttactccagcctcgtgttgtaaataaagtttcggtggtcatgctgagggccggctcccagctctgccggggacggacagggcagagggcagcgggcagctccaggaacacggtggaacggggaaaaaaaac

SEQ ID NO: 453171 - DNA, 2777 bp, Homo sapiens
  misc_feature (16)..(16): n is a, c, g, or t
  misc_feature (18)..(18): n is a, c, g, or t
  misc_feature (21)..(21): n is a, c, g, or t
  misc_feature (39)..(39): n is a, c, g, or t
  misc_feature (52)..(52): n is a, c, g, or t
cggcgcaacaaatttntncancctggagacggaaactancttcggcttcggnaaacccacgcgtgcagccatcttgcctggagcctgagaaagggaggagagacagaaggaaccggcgacagtggtctcagggccgctccggggggcctcaagaaccggaggcagccccggaggtggtccccgatcccgggctatgctcttggatctgagaagggaaggcggagggcggcggggacaagatgggtggagaatgtcaagcaaggaatgctaggcgggggaggggcgttgctatggcgactggggaggggcggtgtctgttctgaatcgctgtgtgtcacccgggcgctgcccaggaagggcagggctggggtgatgaccatggtaacacccgggtgggagttcgtgacatctccggcgcggagggactcgatgtctatggcaatggtcgcctggtggaagggacggaactagatcccttcgctcgggacgctcacattccaggcccttgtcctgcaggctgccgcgggcggacacgccagaggaggaggccggggaatggccgcggtgtggcagcaagtcttagcagtggacgcgaggtgaggcgtggggtcaaagcccatgggagcagaacttactgtggtgcatgcgcaatggcgataagtgaggctgggcggagaacttgccttatgcggctgcgtgggcatgccggaggtgagcatgcgcagtagcgggggcgggcacgcccgcggtgagttggctgcgccggagaggattctaaacagcaagctgggaaaatgtggtcagatgtgggcatgcgcaaagcggctacctgtgagagggaggtggggctcaggcaggtgacatcctatcccctatgggtgtcccctagactttttttttttacatcatcacttccccattctgaccccatcacctcccaacgctgacccccataatgtcagtctgatttctgtcgccctggtatactgaccctaattattgtctgcgctgacccagtcaccccgtagggaccccagcacggcagcagactgactctgttgtctgcaaactgacctcatgaccatgctcattattactgcagactcactcccaccacaggaccaagaggtccctcatcaccactgctagtcattcttaccacctaggccccagtcactgccacacacctcactctcctgccgtacccccccccccgagctgattgattccctctgtcctgtgcctgctgcctgccctgcatcctgaccctgcaggtacaacgcgtaccgcacaccaacgtttccacagtttcggacgcagtatatccgccggcgcagccagctgctgcgggagaatgccaaggctgggcaccccccagcgctgcgtcggcagtacctgaggcttcgggggcagctgctgggccagcgctacgggcccctctccgagccaggcagtgctcgtgcctatagcaacagcatcgtccgcagtagccgcactactcttgaccgcatggaggactttgaggatgatcctcgggccctgggggcccgtgggcaccgtcgttctgtcagcagaggctcctaccagctgcaggcgcagatgaaccgtgccgtctatgaggacaggccccctggcagcgtggtgcccacgtcagcagcagaggcaagtcgggccatggccggggacacgtcactgagcgagaactatgcctttgcgggcatgtatcatgtttttgaccagcacgtggatgaggcagtcccaagggtgcgcttcgccaatgatgaccgacaccgcctggcctgctgctcactcgacggcagcatctccctgtgccagctggtgcctgccccacccacagtgcttcgcgtgctacggggccacacccgtggtgtctccgacttcgcctggtccctctccaatgacatcctcgtgtccacctcactggatgccaccatgcgcatctgggcctctgaggatggtcgctgcatccgagagatccctgaccccgatagcgctgaactgctctgctgcaccttccagcctgtcaacaacaacctcactgtggtggggaacgccaagcacaacgtgcatgtcatgaacatctccacaggcaagaaagtgaaggggggctccagcaagctgacaggccgtgtccttgctctgtcctttgatgcccctggccggctgctctgggcgggtgatgaccgtggcagtgtcttctctttcctctttgatatggccacagggaagctgaccaaagccaagcgtttggtggtgcatgaggggagccctgtgaccagcatctcagcccggtcctgggtcagccgcgaggcccgggatccctcactgctcatcaatgcttgcctcaacaagttgctgctctacagggtggtagacaacgaggggaccctgcagctgaagagaagcttccccatcgagcagagctcacatcctgtgcgcagcatcttctgtcccctcatgtccttccgccagggggcctgcgtggtgacgggcagtgaggacatgtgcgtgcacttctttgatgtggagcgggcggccaaggctgctgtcaacaagctgcagggccacagtgcacctgtgcttgatgtcagcttcaactgcgacgagagcctactggcctccagtgacgccagcggcatggtcatcgtctggaggcgggagcagaagtagggtcctgtcggccctgctgctgtcctccatcccacccctcttactccagcctcgtgttgtaaataaagtttcggtggtcatgctga

SEQ ID NO: 453172 - DNA, 1445 bp, Homo sapiens
  misc_feature (1242)..(1242): n is a, c, g, or t
  misc_feature (1248)..(1248): n is a, c, g, or t
  misc_feature (1257)..(1257): n is a, c, g, or t
  misc_feature (1259)..(1259): n is a, c, g, or t
  misc_feature (1264)..(1264): n is a, c, g, or t
  misc_feature (1270)..(1270): n is a, c, g, or t
  misc_feature (1276)..(1276): n is a, c, g, or t
  misc_feature (1278)..(1278): n is a, c, g, or t
  misc_feature (1281)..(1282): n is a, c, g, or t
  misc_feature (1296)..(1296): n is a, c, g, or t
  misc_feature (1303)..(1303): n is a, c, g, or t
  misc_feature (1307)..(1307): n is a, c, g, or t
  misc_feature (1314)..(1314): n is a, c, g, or t
  misc_feature (1322)..(1322): n is a, c, g, or t
  misc_feature (1345)..(1345): n is a, c, g, or t
  misc_feature (1353)..(1353): n is a, c, g, or t
  misc_feature (1360)..(1360): n is a, c, g, or t
  misc_feature (1367)..(1368): n is a, c, g, or t
  misc_feature (1376)..(1376): n is a, c, g, or t
  misc_feature (1385)..(1385): n is a, c, g, or t
  misc_feature (1430)..(1430): n is a, c, g, or t
tgggctcggcagttctttctgatagcaggcagccatcttgcctggagcctgagaaagggaggagagacagaaggaaccggcgacagtggtctcagggccgctccggggggcctcaagaaccggaggcagccccggaggctgccgcgggcggacacgccagaggaggaggccggggaatggccgcggtgtggcagcaagtcttagcagtggacgcgaggtacaacgcgtaccgcacaccaacgtttccacagtttcggacgcagtatatccgccggcgcagccagctgctgcgggagaatgccaaggctgggcaccccccagcgctgcgtcggcagtacctgaggcttcgggggcagctgctgggccagcgctacgggcccctctccgagccaggcagtgctcgtgcctatagcaacagcatcgtccgcagtagccgcactactcttgaccgcatggaggactttgaggatgatcctcgggccctgggggcccgtgggcaccgtcgttctgtcagcagaggctcctaccagctgcaggcgcagatgaaccgtgccgtctatgaggacaggccccctggcagcgtggtgcccacgtcagcagcagaggcaagtcgggccatggccggggacacgtcactgagcgagaactatgcctttgcgggcatgtatcatgtttttgaccagcacgtggatgaggcagtcccaagggtgcgcttcgccaatgatgaccgacaccgcctggcctgctgctcactcgacggcagcatctccctgtgccagctggtgcctgccccacccacagtgcttcgcgtgctacggggccacacccgtggtgtctccgacttcgcctggtccctctccaatgacatcctcgtgtccacctcactggatgccaccatgcgcatctgggcctctgaggatggtcgctgcatccgagagatccctgaccccgatagcgctgaactgctctgctgcaccttccagcctgtcaacaacaacctcactgtggtggggaacgccaagcacaacgtgcatgtcatgaacatctccacaggcaagaaagtgaaggggggctccagcaagctgacaggccgtgtccttgctctgtcctttgatgcccctggccggctgctctgggcgggtgatgaccgtggcagtgtcttctctttcctctttgatatggccacagggaagctgaccaaagccaagcgtttggtggtgcatgaggggagcccgcgggggngcgggnggcggcggngngggcngggggnagccgngnggnncgggagccgggcanggggggngganggggggnggcaagangggggggggcggacagggggggngacaacgngggggcncggcagnngaagagangcggccgcnagcgaggagagggggagcaggcgggggcggaggagggggggggcncgcggcagggccggc

SEQ ID NO: 453173 - DNA, 1301 bp, Homo sapiens
tgggctcggcagttctttctgatagcaggcagccatcttgcctggagcctgagaaagggaggagagacagaaggaaccggcgacagtggtctcagggccgctccggggggcctcaagaaccggaggcagccccggaggctgccgcgggcggacacgccagaggaggaggccggggaatggccgcggtgtggcagcaagtcttagcagtggacgcgaggtacaacgcgtaccgcacaccaacgtttccacagtttcggacgcagtatatccgccggcgcagccagctgctgcgggagaatgccaaggctgggcaccccccagcgctgcgtcggcagtacctgaggcttcgggggcagctgctgggccagcgctacgggcccctctccgagccaggcagtgctcgtgcctatagcaacagcatcgtccgcagtagccgcactactcttgaccgcatggaggactttgaggatgatcctcgggccctgggggcccgtgggcaccgtcgttctgtcagcagaggctcctaccagctgcaggcgcagatgaaccgtgccgtctatgaggacaggccccctggcagcgtggtgcccacgtcagcagcagaggcaagtcgggccatggccggggacacgtcactgagcgagaactatgcctttgcgggcatgtatcatgtttttgaccagcacgtggatgaggcagtcccaagggtgcgcttcgccaatgatgaccgacaccgcctggcctgctgctcactcgacggcagcatctccctgtgccagctggtgcctgccccacccacagtgcttcgcgtgctacggggccacacccgtggtgtctccgacttcgcctggtccctctccaatgacatcctcgtgtccacctcactggatgccaccatgcgcatctgggcctctgaggatggtcgctgcatccgagagatccctgaccccgatagcgctgaactgctctgctgcaccttccagcctgtcaacaacaacctcactgtggtggggaacgccaagcacaacgtgcatgtcatgaacatctccacaggcaagaaagtgaaggggggctccagcaagctgacaggccgtgtccttgctctgtcctttgatgcccctggccggctgctctgggcgggtgatgaccgtggcagtgtcttctctttcctctttgatatggccacagggcacgcctgcccaagccaaccgcccgctcgcgcatcagccgacgccttgcgccccagccctcagcccgcctcctgtccagcctctcacccccggcatcctcctgctcactcg

SEQ ID NO: 453174 - DNA, 1387 bp, Homo sapiens
tgggctcggcagttctttctgatagcaggcagccatcttgcctggagcctgagaaagggaggagagacagaaggaaccggcgacagtggtctcagggccgctccggggggcctcaagaaccggaggcagccccggaggctgccgcgggcggacacgccagaggaggaggccggggaatggccgcggtgtggcagcaagtcttagcagtggacgcgaggtacaacgcgtaccgcacaccaacgtttccacagtttcggacgcagtatatccgccggcgcagccagctgctgcgggagaatgccaaggctgggcaccccccagcgctgcgtcggcagtacctgaggcttcgggggcagctgctgggccagcgctacgggcccctctccgagccaggcagtgctcgtgcctatagcaacagcatcgtccgcagtagccgcactactcttgaccgcatggaggactttgaggatgatcctcgggccctgggggcccgtgggcaccgtcgttctgtcagcagaggctcctaccagctgcaggcgcagatgaaccgtgccgtctatgaggacaggccccctggcagcgtggtgcccacgtcagcagcagaggcaagtcgggccatggccggggacacgtcactgagcgagaactatgcctttgcgggcatgtatcatgtttttgaccagcacgtggatgaggcagtcccaagggtgcgcttcgccaatgatgaccgacaccgcctggcctgctgctcactcgacggcagcatctccctgtgccagctggtgcctgccccacccacagtgcttcgcgtgctacggggccacacccgtggtgtctccgacttcgcctggtccctctccaatgacatcctcgtgtccacctcactggatgccaccatgcgcatctgggcctctgaggatggtcgctgcatccgagagatccctgaccccgatagcgctgaactgctctgctgcaccttccagcctgtcaacaacaacctcactgtggtcaggctccaggacacccacacatgacgggcagtgaggacatgtgcgtgcacttctttgatgtggagcgggcggccaaggctgctgtcaacaagctgcagggccacagtgcacctgtgcttgatgtcagcttcaactgcgacgagagcctactggcctccagtgacgccagcggcatggtcatcgtctggaggcgggagcagaagtagggtcctgtcggccctgctgctgtcctccatcccacccctcttactccagcctcgtgttgtaaataaagtttcggtggtcatgctgagggccggctcccagctctgccggggacggacagggcagagggcagcgggcagctccaggaacacggtggaacggggaaaaaaaac

SEQ ID NO: 453175 - DNA, 1680 bp, Homo sapiens
ctggctaacacggtgaaaccccatctctactaaaaatacaaaaattagctgggcatggtggcgggcgcctatagtctcagctacttgggaggctgaggcaggagaatggtgtgaacctgggaggtggagcttgcagtgagccgagatggcaccactgggcgacagagcgagactccgcccccaccccccataaaaaggggaatgccgttcttggtctgggatggccttgctgtggtacactccagggagcacgggccagggtcagggttctggctctggagcccctttggtcccatcagctacagtcctacagttttccaactgcaggggctacctctgaggagcaggatgatgaggctgagcctcgtctggtctgtcagtggccccaccgtgtcagactccagggtagattggtcagagagcaggggaaggacattagaaagtctggtgtggcccggggtttagtggggtgaactgcagaggaacagaccaagagtgagcttgtgggccgggatcctccccgcattagcagcagccccacaagttccagaaaggagcagccagggagcaggggaaagctgggatcacaggcctaggcaggccctatggttctcacactgtaggaggactggccaaggggcagcatgatggctctgaaggccctttagtcccataggcaggtggcctactctgggcagattgcaaaaggggctggctagggaggtggattcatgcctggtcaccttgtctacctgccacagccctattgtgaatagactctaatagggaccagccagtcgcatcaacagcagccccactgtggtcagactcaaggagggcctggctggaagcaggatgatggtctgtgcattctccccacaggtggggaacgccaagcacaacgtgcatgtcatgaacatctccacaggcaagaaagtgaaggggggctccagcaagctgacaggccgtgtccttgctctgtcctttgatgcccctggccggctgctctgggcgggtgatgaccgtggcagtgtcttctctttcctctttgatatggccacagggaagctgaccaaagccaagcgtttggtggtgcatgaggggagccctgtgaccagcatctcagcccggtcctgggtcagccgcgaggcccgggatccctcactgctcatcaatgcttgcctcaacaagttgctgctctacagggtggtagacaacgaggggaccctgcagctgaagagaagcttccccatcgagcagagctcacatcctgtgcgcagcatcttctgtcccctcatgtccttccgccagggggcctgcgtggtgacgggcagtgaggacatgtgcgtgcacttctttgatgtggagcgggcggccaaggctgctgtcaacaagctgcagggccacagtgcacctgtgcttgatgtcagcttcaactgcgacgagagcctactggcctccagtgacgccagcggcatggtcatcgtctggaggcgggagcagaagtagggtcctgtcggccctgctgctgtcctccatcccacccctcttactccagcctcgtgttgtaaataaagtttcggtggtcatgctgagggccggctcccagctctgccggggacggacagggcagagggcagcgggcagctccaggaacacggtggaacggggaaaaaaaac

SEQ ID NO: 453176 - DNA, 1684 bp, Homo sapiens
  misc_feature (16)..(16): n is a, c, g, or t
  misc_feature (18)..(18): n is a, c, g, or t
  misc_feature (21)..(21): n is a, c, g, or t
  misc_feature (39)..(39): n is a, c, g, or t
  misc_feature (52)..(52): n is a, c, g, or t
cggcgcaacaaatttntncancctggagacggaaactancttcggcttcggnaaacccacgcgtgcagccatcttgcctggagcctgagaaagggaggagagacagaaggaaccggcgacagtggtctcagggccgctccggggggcctcaagaaccggaggcagccccggaggtggtccccgatcccgggctatgctcttggatctgagaagggaaggcggagggcggcggggacaagatgggtggagaatgtcaagcaaggaatgctaggcgggggaggggcgttgctatggcgactggggaggggcggtgtctgttctgaatcgctgtgtgtcacccgggcgctgcccaggaagggcagggctggggtgatgaccatggtaacacccgggtgggagttcgtgacatctccggcgcggagggactcgatgtctatggcaatggtcgcctggtggaagggacggaactagatcccttcgctcgggacgctcacattccaggcccttgtcctgcaggctgccgcgggcggacacgccagaggaggaggccggggaatggccgcggtgtggcagcaagtcttagcagtggacgcgaggtgaggcgtggggtcaaagcccatgggagcagaacttactgtggtgcatgcgcaatggcgataagtgaggctgggcggagaacttgccttatgcggctgcgtgggcatgccggaggtgagcatgcgcagtagcgggggcgggcacgcccgcggtgagttggctgcgccggagaggattctaaacagcaagctgggaaaatgtggtcagatgtgggcatgcgcaaagcggctacctgtgagagggaggtggggctcaggcaggtgacatcctatcccctatgggtgtcccctagactttttttttttacatcatcacttccccattctgaccccatcacctcccaacgctgacccccataatgtcagtctgatttctgtcgccctggtatactgaccctaattattgtctgcgctgacccagtcaccccgtagggaccccagcacggcagcagactgactctgttgtctgcaaactgacctcatgaccatgctcattattactgcagactcactcccaccacaggaccaagaggtccctcatcaccactgctagtcattcttaccacctaggccccagtcactgccacacacctcactctcctgccgtacccccccccccgagctgattgattccctctgtcctgtgcctgctgcctgccctgcatcctgaccctgcaggtacaacgcgtaccgcacaccaacgtttccacagtttcggacgcagtatatccgccggcgcagccagctgctgcgggagaatgccaaggctgggcaccccccagcgctgcgtcggcagtacctgaggcttcgggggcagctgctgggccagcgctacgggcccctctccgagccaggcagtgctcgtgcctatagcaacagcatcgtccgcagtagccgcactactcttgaccgcatggaggactttgaggatgatcctcgggccctgggggcccgtgggcaccgtcgttctgtcagcagaggctcctaccagctgcaggcgcagatgaaccgtgccgtctatgaggacagcaccctgcagcatgtgcccacgtcagcagcagcagcacgaaaggatcctgctagatcac

SEQ ID NO: 453177 - DNA, 345 bp, Homo sapiens
accgagactcgtagtggagatagtttgctgtgagccgagggggtaggagggggcatgtggggagggccgggtcttgctggcacctcccagccacccgctcctaatggcgtgaatgtggtcggattgctttgctgctgtcaacaagctgcagggccacagtgcacctgtgcttgatgtcagcttcaactgcgacgagagcctactggcctccagtgacgccagcggcatggtcatcgtctggaggcgggagcagaagtagggtcctgtcggccctgctgctgtcctccatcccacccctcttactccagcctcgtgttgtaaataaagtttcggtggtcatgctga

SEQ ID NO: 453178 - DNA, 1805 bp, Homo sapiens
tgggctcggcagttctttctgatagcaggcagccatcttgcctggagcctgagaaagggaggagagacagaaggaaccggcgacagtggtctcagggccgctccggggggcctcaagaaccggaggcagccccggaggctgccgcgggcggacacgccagaggaggaggccggggaatggccgcggtgtggcagcaagtcttagcagtggacgcgaggtacaacgcgtaccgcacaccaacgtttccacagtttcggacgcagtatatccgccggcgcagccagctgctgcgggagaatgccaaggctgggcaccccccagcgctgcgtcggcagtacctgaggcttcgggggcagctgctgggccagcgctacgggcccctctccgagccaggcagtgctcgtgcctatagcaacagcatcgtccgcagtagccgcactactcttgaccgcatggaggactttgaggatgatcctcgggccctgggggcccgtgggcaccgtcgttctgtcagcagaggctcctaccagctgcaggcgcagatgaaccgtgccgtctatgaggacaggccccctggcagcgtggtgcccacgtcagcagcagaggcaagtcgggccatggccggggacacgtcactgagcgagaactatgcctttgcgggcatgtatcatgtttttgaccagcacgtggatgaggcagtcccaagggtgcgcttcgccaatgatgaccgacaccgcctggcctgctgctcactcgacggcagcatctccctgtgccagctggtgcctgccccacccacagtgcttcgcgtgctacggggccacacccgtggtgtctccgacttcgcctggtccctctccaatgacatcctcgtgtccacctcactggatgccaccatgcgcatctgggcctctgaggatggtcgctgcatccgagagatccctgaccccgatagcgctgaactgctctgctgcaccttccagcctgtcaacaacaacctcactgtggtggggaacgccaagcacaacgtgcatgtcatgaacatctccacaggcaagaaagtgaaggggggctccagcaagctgacaggccgtgtccttgctctgtcctttgatgcccctggccggctgctctgggcgggtgatgaccgtggcagtgtcttctctttcctctttgatatggccacagggaagctgaccaaagccaagcgtttggtggtgcatgaggggagccctgtgaccagcatctcagcccggtcctgggtcagccgcgaggcccgggatccctcactgctcatcaatgcttgcctcaacaagttgctgctctacagggtggtagacaacgaggggaccctgcagctgaagagaagcttccccatcgagcagagctcacatcctgtgcgcagcatcttctgtcccctcatgtccttccgccagggggcctgcgtggtgacgggcagtgaggacatgtgcgtgcacttctttgatgtggagcgggcggccaaggctgctgtcaacaagctgcagggccacagtgcacctgtgcttgatgtcagcttcaactgcgacgagagcctactggcctccagtgacgccagcggcatggtcatcgtctggaggcgggagcagaagtagggtcctgtcggccctgctgctgtcctccatcccacccctcttactccagcctcgtgttgtaaataaagtttcggtggtcatgctgagggccggctcccagctctgccggggacggacagggcagagggcagcgggcagctccaggaacacggtggaacggggaaaaaaaac

SEQ ID NO: 453179 - DNA, 1807 bp, Homo sapiens
  misc_feature (16)..(16): n is a, c, g, or t
  misc_feature (18)..(18): n is a, c, g, or t
  misc_feature (21)..(21): n is a, c, g, or t
  misc_feature (39)..(39): n is a, c, g, or t
  misc_feature (52)..(52): n is a, c, g, or t
cggcgcaacaaatttntncancctggagacggaaactancttcggcttcggnaaacccacgcgtgcagccatcttgcctggagcctgagaaagggaggagagacagaaggaaccggcgacagtggtctcagggccgctccggggggcctcaagaaccggaggcagccccggaggctgccgcgggcggacacgccagaggaggaggccggggaatggccgcggtgtggcagcaagtcttagcagtggacgcgagtttcggacgcagtatatccgccggcgcagccagctgctgcgggagaatgccaaggctgggcaccccccagcgctgcgtcggcagtacctgaggcttcgggggcagctgctgggccagcgctacgggcccctctccgagccaggcagtgctcgtgcctatagcaacagcatcgtccgcagtagccgcactactcttgaccgcatggaggactttgaggatgatcctcgggccctgggggcccgtgggcaccgtcgttctgtcagcagaggctcctaccagctgcaggcgcagatgaaccgtgccgtctatgaggacaggccccctggcagcgtggtgcccacgtcagcagcagaggcaagtcgggccatggccggggacacgtcactgagcgagaactatgcctttgcgggcatgtatcatgtttttgaccagcacgtggatgaggcagtcccaagggtgcgcttcgccaatgatgaccgacaccgcctggcctgctgctcactcgacggcagcatctccctgtgccagctggtgcctgccccacccacagtgcttcgcgtgctacggggccacacccgtggtgtctccgacttcgcctggtccctctccaatgacatcctcgtgtccacctcactggatgccaccatgcgcatctgggcctctgaggatggtcgctgcatccgagagatccctgaccccgatagcgctgaactgctctgctgcaccttccagcctgtcaacaacaacctcactgtggtggggaacgccaagcacaacgtgcatgtcatgaacatctccacaggcaagaaagtgaaggggggctccagcaagctgacaggccgtgtccttgctctgtcctttgatgcccctggccggctgctctgggcgggtgatgaccgtggcagtgtcttctctttcctctttgatatggccacagggaagctgaccaaagccaagcgtttggtggtgcatgaggggagccctgtgaccagcatctcagcccggtcctgggtcagccgcgaggcccgggatccctcactgctcatcaatgcttgcctcaacaagttgctgctctacagggtggtagacaacgaggggaccctgcagctgaagagaagcttccccatcgagcagagctcacatcctgtgcgcagcatcttctgtcccctcatgtccttccgccagggggcctgcgtggtgacgggcagtgaggacatgtgcgtgcacttctttgatgtggagcgggcggccaaggctgctgtcaacaagctgcagggccacagtgcacctgtgcttgatgtcagcttcaactgcgacgagagcctactggcctccagtgacgccagcggcatggtcatcgtctggaggcgggagcagaagtagggtcctgtcggccctgctgctgtcctccatcccacccctcttactccagcctcgtgttgtaaataaagtttcggtggtcatgctgagggccggctcccagctctgccggggacggacagggcagagggcagcgggcagctccaggaacacggtggaacggggaaaaaaaac

SEQ ID NO: 453180 - DNA, 2862 bp, Homo sapiens
  misc_feature (16)..(16): n is a, c, g, or t
  misc_feature (18)..(18): n is a, c, g, or t
  misc_feature (21)..(21): n is a, c, g, or t
  misc_feature (39)..(39): n is a, c, g, or t
  misc_feature (52)..(52): n is a, c, g, or t
cggcgcaacaaatttntncancctggagacggaaactancttcggcttcggnaaacccacgcgtgcagccatcttgcctggagcctgagaaagggaggagagacagaaggaaccggcgacagtggtctcagggccgctccggggggcctcaagaaccggaggcagccccggaggtggtccccgatcccgggctatgctcttggatctgagaagggaaggcggagggcggcggggacaagatgggtggagaatgtcaagcaaggaatgctaggcgggggaggggcgttgctatggcgactggggaggggcggtgtctgttctgaatcgctgtgtgtcacccgggcgctgcccaggaagggcagggctggggtgatgaccatggtaacacccgggtgggagttcgtgacatctccggcgcggagggactcgatgtctatggcaatggtcgcctggtggaagggacggaactagatcccttcgctcgggacgctcacattccaggcccttgtcctgcaggctgccgcgggcggacacgccagaggaggaggccggggaatggccgcggtgtggcagcaagtcttagcagtggacgcgaggtgaggcgtggggtcaaagcccatgggagcagaacttactgtggtgcatgcgcaatggcgataagtgaggctgggcggagaacttgccttatgcggctgcgtgggcatgccggaggtgagcatgcgcagtagcgggggcgggcacgcccgcggtgagttggctgcgccggagaggattctaaacagcaagctgggaaaatgtggtcagatgtgggcatgcgcaaagcggctacctgtgagagggaggtggggctcaggcaggtgacatcctatcccctatgggtgtcccctagactttttttttttacatcatcacttccccattctgaccccatcacctcccaacgctgacccccataatgtcagtctgatttctgtcgccctggtatactgaccctaattattgtctgcgctgacccagtcaccccgtagggaccccagcacggcagcagactgactctgttgtctgcaaactgacctcatgaccatgctcattattactgcagactcactcccaccacaggaccaagaggtccctcatcaccactgctagtcattcttaccacctaggccccagtcactgccacacacctcactctcctgccgtacccccccccccgagctgattgattccctctgtcctgtgcctgctgcctgccctgcatcctgaccctgcaggtacaacgcgtaccgcacaccaacgtttccacagtttcggacgcagtatatccgccggcgcagccagctgctgcgggagaatgccaaggctgggcaccccccagcgctgcgtcggcagtacctgaggcttcgggggcagctgctgggccagcgctacgggcccctctccgagccaggcagtgctcgtgcctatagcaacagcatcgtccgcagtagccgcactactcttgaccgcatggaggactttgaggatgatcctcgggccctgggggcccgtgggcaccgtcgttctgtcagcagaggctcctaccagctgcaggcgcagatgaaccgtgccgtctatgaggacaggccccctggcagcgtggtgcccacgtcagcagcagaggcaagtcgggccatggccggggacacgtcactgagcgagaactatgcctttgcgggcatgtatcatgtttttgaccagcacgtggatgaggcagtcccaagggtgcgcttcgccaatgatgaccgacaccgcctggcctgctgctcactcgacggcagcatctccctgtgccagctggtgcctgccccacccacagtgcttcgcgtgctacggggccacacccgtggtgtctccgacttcgcctggtccctctccaatgacatcctcgtgtccacctcactggatgccaccatgcgcatctgggcctctgaggatggtcgctgcatccgagagatccctgaccccgatagcgctgaactgctctgctgcaccttccagcctgtcaacaacaacctcactgtggtggggaacgccaagcacaacgtgcatgtcatgaacatctccacaggcaagaaagtgaaggggggctccagcaagctgacaggccgtgtccttgctctgtcctttgatgcccctggccggctgctctgggcgggtgatgaccgtggcagtgtcttctctttcctctttgatatggccacagggaagctgaccaaagccaagcgtttggtggtgcatgaggggagccctgtgaccagcatctcagcccggtcctgggtcagccgcgaggcccgggatccctcactgctcatcaatgcttgcctcaacaagttgctgctctacagggtggtagacaacgaggggaccctgcagctgaagagaagcttccccatcgagcagagctcacatcctgtgcgcagcatcttctgtcccctcatgtccttccgccagggggcctgcgtggtgacgggcagtgaggacatgtgcgtgcacttctttgatgtggagcgggcggccaaggctgctgtcaacaagctgcagggccacagtgcacctgtgcttgatgtcagcttcaactgcgacgagagcctactggcctccagtgacgccagcggcatggtcatcgtctggaggcgggagcagaagtagggtcctgtcggccctgctgctgtcctccatcccacccctcttactccagcctcgtgttgtaaataaagtttcggtggtcatgctgagggccggctcccagctctgccggggacggacagggcagagggcagcgggcagctccaggaacacggtggaacggggaaaaaaaac

SEQ ID NO: 453181 - DNA, 1914 bp, Homo sapiens
ctatctaccaaggagcctgttgtgagacagttttctccccacctcctgaggttctggtggggtttgaggctttctacccctcacctctgggctatagaactgcttagctgcagcatgaaattagctcctcagcaacaaggtgtcctgccacctggtgtgtggtcatctcgcccctttcatttcggtgttgcccggcacaagggacatgaaccagaatctgtggatgttcttgctttcgtggtccacgctgccgcgggcggacacgccagaggaggaggccggggaatggccgcggtgtggcagcaagtcttagcagtggacgcgaggtacaacgcgtaccgcacaccaacgtttccacagtttcggacgcagtatatccgccggcgcagccagctgctgcgggagaatgccaaggctgggcaccccccagcgctgcgtcggcagtacctgaggcttcgggggcagctgctgggccagcgctacgggcccctctccgagccaggcagtgctcgtgcctatagcaacagcatcgtccgcagtagccgcactactcttgaccgcatggaggactttgaggatgatcctcgggccctgggggcccgtgggcaccgtcgttctgtcagcagaggctcctaccagctgcaggcgcagatgaaccgtgccgtctatgaggacaggccccctggcagcgtggtgcccacgtcagcagcagaggcaagtcgggccatggccggggacacgtcactgagcgagaactatgcctttgcgggcatgtatcatgtttttgaccagcacgtggatgaggcagtcccaagggtgcgcttcgccaatgatgaccgacaccgcctggcctgctgctcactcgacggcagcatctccctgtgccagctggtgcctgccccacccacagtgcttcgcgtgctacggggccacacccgtggtgtctccgacttcgcctggtccctctccaatgacatcctcgtgtccacctcactggatgccaccatgcgcatctgggcctctgaggatggtcgctgcatccgagagatccctgaccccgatagcgctgaactgctctgctgcaccttccagcctgtcaacaacaacctcactgtggtggggaacgccaagcacaacgtgcatgtcatgaacatctccacaggcaagaaagtgaaggggggctccagcaagctgacaggccgtgtccttgctctgtcctttgatgcccctggccggctgctctgggcgggtgatgaccgtggcagtgtcttctctttcctctttgatatggccacagggaagctgaccaaagccaagcgtttggtggtgcatgaggggagccctgtgaccagcatctcagcccggtcctgggtcagccgcgaggcccgggatccctcactgctcatcaatgcttgcctcaacaagttgctgctctacagggtggtagacaacgaggggaccctgcagctgaagagaagcttccccatcgagcagagctcacatcctgtgcgcagcatcttctgtcccctcatgtccttccgccagggggcctgcgtggtgacgggcagtgaggacatgtgcgtgcacttctttgatgtggagcgggcggccaaggctgctgtcaacaagctgcagggccacagtgcacctgtgcttgatgtcagcttcaactgcgacgagagcctactggcctccagtgacgccagcggcatggtcatcgtctggaggcgggagcagaagtagggtcctgtcggccctgctgctgtcctccatcccacccctcttactccagcctcgtgttgtaaataaagtttcggtggtcatgctgagggccggctcccagctctgccggggacggacagggcagagggcagcgggcagctccaggaacacggtggaacggggaaaaaaaac

SEQ ID NO: 453182 - DNA, 1748 bp, Homo sapiens
tgggctcggcagttctttctgatagcaggcagccatcttgcctggagcctgagaaagggaggagagacagaaggaaccggcgacagtggtctcagggccgctccggggggcctcaagaaccggaggcagccccggaggctgccgcgggcggacacgccagaggaggaggccggggaatggccgcggtgtggcagcaagtcttagcagtggacgcgaggtacaacgcgtaccgcacaccaacgtttccacagtttcggacgcagtatatccgccggcgcagccagctgctgcgggagaatgccaaggctgggcaccccccagcgctgcgtcggcagtacctgaggcttcgggggcagctgctgggccagcgctacgggcccctctccgagccaggcagtgctcgtgcctatagcaacagcatcgtccgcagtagccgcactactcttgaccgcatggaggactttgaggatgatcctcgggccctgggggcccgtgggcaccgtcgttctgtcagcagaggctcctaccagctgcaggcgcagatgaaccgtgccgtctatgaggacaggccccctggcagcgtggtgcccacgtcagcagcagaggcaagtcgggccatggccggggacacgtcactgagcgagaactatgcctttgcgggcatgtatcatgtttttgaccagcacgtggatgaggcagtcccaagggtgcgcttcgccaatgatgaccgacaccgcctggcctgctgctcactcgacggcagcatctccctgtgccagctggtgcctgccccacccacagtgcttcgcgtgctacggggccacacccgtggtgtctccgacttcgcctggtccctctccaatgacatcctcgtgtccacctcactggatgccaccatgcgcatctgggcctctgaggatggtcgctgcatccgagagatccctgaccccgatagcgctgaactgctctgctgcaccttccagcctgtcaacaacaacctcactgtggtggggaacgccaagcacaacgtgcatgtcatgaacatctccacaggcaagaaagtgaaggggggctccagcaagctgacaggccgtgtccttgctctgtcctttgatgcccctggccggctgctctgggcgggtgatgaccgtggcagtgtcttctctttcctctttgatatggccacagggaagctgaccaaagccaagcgtttggtggtgcatgaggggagccctgtgaccagcatctcagcccggtcctgggtcagccgcgaggcccgggatccctcactgctcatcaatgcttgcctcaacaagttgctgctctacagggtggtagacaacgaggggaccctgcagctgaagagaagcttccccatcgagcagagctcacatcctgtgcgcagcatcttctgtcccctcatgtccttccgccagggggcctgcgtggtgacgggcagtgaggacatgtgcgtgcacttctttgatgtggagcgggcggccaaggctgctgtcaacaagctgcagggccacagtgcacctgtgcttgatgtcagcttcaactgcgacgagagcctactggcctccagtgacgccagcggcatggtcatcgtctggaggcgggagcagaagtagggtcctgtcggccctgctgctgtcctccatcccacccctcttactccagcctcgtgttgtaaataaagtttcggtggtcatgctgaaacactacgagcacatataatacagggg

SEQ ID NO: 453183 - DNA, 1830 bp, Homo sapiens
tgggctcggcagttctttctgatagcaggcagccatcttgcctggagcctgagaaagggaggagagacagaaggaaccggcgacagtggtctcagggccgctccggggggcctcaagaaccggaggcagccccggaggctgccgcgggcggacacgccagaggaggaggccggggaatggccgcggtgtggcagcaagtcttagcagtggacgcgaggtacaacgcgtaccgcacaccaacgtttccacagtttcggacgcagtatatccgccggcgcagccagctgctgcgggagaatgccaaggctgggcaccccccagcgctgcgtcggcagtacctgaggcttcgggggcagctgctgggccagcgctacgggcccctctccgagccaggcagtgctcgtgcctatagcaacagcatcgtccgcagtagccgcactactcttgaccgcatggaggactttgaggatgatcctcgggccctgggggcccgtgggcaccgtcgttctgtcagcagaggctcctaccagctgcaggcgcagatgaaccgtgccgtctatgaggacaggccccctggcagcgtggtgcccacgtcagcagcagaggcaagtcgggccatggccggggacacgtcactgagcgagaactatgcctttgcgggcatgtatcatgtttttgaccagcacgtggatgaggcagtcccaagggtgcgcttcgccaatgatgaccgacaccgcctggcctgctgctcactcgacggcagcatctccctgtgccagctggtgcctgccccacccacagtgcttcgcgtgctacggggccacacccgtggtgtctccgacttcgcctggtccctctccaatgacatcctcgtgtccacctcactggatgccaccatgcgcatctgggcctctgaggatggtcgctgcatccgagagatccctgaccccgatagcgctgaactgctctgctgcaccttccagcctgtcaacaacaacctcactgtggtggggaacgccaagcacaacgtgcatgtcatgaacatctccacaggcaagaaagtgaaggggggctccagcaagctgacaggccgtgtccttgctctgtcctttgatgcccctggccggctgctctgggcgggtgatgaccgtggcagtgtcttctctttcctctttgatatggccacagggaagctgaccaaagccaagcgtttggtggtgcatgaggggagccctgtgaccagcatctcagcccggtcctgggtcagccgcgaggcccgggatccctcactgctcatcaatgcttgcctcaacaagttgctgctctacagggtggtagacaacgaggggaccctgcagctgaagagaagcttccccatcgagcagagctcacatcctgtgcgcagcatcttctgtcccctcatgtccttccgccagggggcctgcgtggtgaccgggccgtgcaggacttgtgcgttcacttctttgctgtggagcggcggcaaggccgctgtcaacagctgcgggcccagtgcactggctggtgtcgctcactggagagagctatggcccttgagcacgggcgtgtccctggctggagacgggaccaacatcgtccgctttgccgcgctgtgcttcatcccgacatttatcacgcccgttgcaaaagccctggctcgcgtccaaccaaggggcgccacaacctctgaggccacagcccctatgttcatgcacaccgaattcacacgccgaccaggcatacactcgtacacctgcggtgtccccctacatcctagcttgccactgtgctctgccgaccgtcatgctgaag

SEQ ID NO: 453184 - DNA, 1505 bp, Homo sapiens
tgggctcggcagttctttctgatagcaggcagccatcttgcctggagcctgagaaagggaggagagacagaaggaaccggcgacagtggtctcagggccgctccggggggcctcaagaaccggaggcagccccggaggctgccgcgggcggacacgccagaggaggaggccggggaatggccgcggtgtggcagcaagtcttagcagtggacgcgaggtacaacgcgtaccgcacaccaacgtttccacagtttcggacgcagtatatccgccggcgcagccagctgctgcgggagaatgccaaggctgggcaccccccagcgctgcgtcggcagtacctgaggcttcgggggcagctgctgggccagcgctacgggcccctctccgagccaggcagtgctcgtgcctatagcaacagcatcgtccgcagtagccgcactactcttgaccgcatggaggactttgaggatgatcctcgggccctgggggcccgtgggcaccgtcgttctgtcagcagaggctcctaccagctgcaggcgcagatgaaccgtgccgtctatgaggacaggccccctggcagcgtggtgcccacgtcagcagcagaggcaagtcgggccatggccggggacacgtcactgagcgagaactatgcctttgcgggcatgtatcatgtttttgaccagcacgtggatgaggcagtcccaagggtgcgcttcgccaatgatgaccgacaccgcctggcctgctgctcactcgacggcagcatctccctgtgccagctggtgcctgccccacccacagtgcttcgcgtgctacggggccacacccgtggtgtctccgacttcgcctggtccctctccaatgacatcctcgtgtccacctcactggatgccaccatgcgcatctgggcctctgaggatggtcgctgcatccgagagatccctgaccccgatagcgctgaactgctctgctgcaccttccagcctgtcaacaacaacctcactgtggtggggaacgccaagcacaacgtgcatgtcatgaacatctccacaggcaagaaagtgaaggggggctccagcaagctgacaggccgtgtccttgctctgtcctttgatgcccctggccggctgctctgggcgggtgatgacctgacgggcagtgaggacatgtgcgtgcacttctttgatgtggagcgggcggccaaggctgctgtcaacaagctgcagggccacagtgcacctgtgcttgatgtcagcttcaactgcgacgagagcctactggcctccagtgacgccagcggcatggtcatcgtctggaggcgggagcagaagtagggtcctgtcggccctgctgctgtcctccatcccacccctcttactccagcctcgtgttgtaaataaagtttcggtggtcatgctgagggccggctcccagctctgccggggacggacagggcagagggcagcgggcagctccaggaacacggtggaacggggaaaaaaaac

SEQ ID NO: 453185 - DNA, 1196 bp, Homo sapiens
tgggctcggcagttctttctgatagcaggcagccatcttgcctggagcctgagaaagggaggagagacagaaggaaccggcgacagtggtctcagggccgctccggggggcctcaagaaccggaggcagccccggaggctgccgcgggcggacacgccagaggaggaggccggggaatggccgcggtgtggcagcaagtcttagcagtggacgcgaggtacaacgcgtaccgcacaccaacgtttccacagtttcggacgcagtatatccgccggcgcagccagctgctgcgggagaatgccaaggctgggcaccccccagcgctgcgtcggcagtacctgaggcttcgggggcagctgctgggccagcgctacgggcccctctccgagccaggcagtgctcgtgcctatagcaacagcatcgtccgcagtagccgcactactcttgaccgcatggaggactttgaggatgatcctcgggccctgggggcccgtgggcaccgtcgttctgtcagcagaggctcctaccagctgcaggcgcagatgaaccgtgccgtctatgaggacaggccccctggcagcgtggtgcccacgtcagcagcagaggcaagtcgggccatggccggggacacgtcactgagcgagaactatgcctttgcgggcatgtatcatgtttttgaccagcacgtggatgaggcagtcccaagggtgcgcttcgccaatgatgaccgacaccgcctggcctgctgctcactcgacggcagcatctccctgtgccagctggtgcctgccccacccacagtgcttcgcgtgctacggggccacacccgtggtgtctccgacttcgcctggtccctctccaatgacatcctcgtgtccacctcactggatgccaccatgcgcatctgggcctctgaggatggtcgctgcatccgagagatccctgaccccgatagcgctgaactgctctgctgcaccttccagcctgtcaacaacaacctcactgtggtggggaacgccaagcacaacgtgcatgtcatgaacatctccctccatcccacccctcttactccagcctcgtgttgtaaataaagtttcggtggtcatgctgagggccggctcccagctctgccggggacggacagggcagagggcagcgggcagctccaggaacacggtggaacggggaaaaaaaac

SEQ ID NO: 453186 - DNA, 2720 bp, Homo sapiens
  misc_feature (16)..(16): n is a, c, g, or t
  misc_feature (18)..(18): n is a, c, g, or t
  misc_feature (21)..(21): n is a, c, g, or t
  misc_feature (39)..(39): n is a, c, g, or t
  misc_feature (52)..(52): n is a, c, g, or t
  misc_feature (2627)..(2627): n is a, c, g, or t
  misc_feature (2713)..(2713): n is a, c, g, or t
cggcgcaacaaatttntncancctggagacggaaactancttcggcttcggnaaacccacgcgtgcagccatcttgcctggagcctgagaaagggaggagagacagaaggaaccggcgacagtggtctcagggccgctccggggggcctcaagaaccggaggcagccccggaggtggtccccgatcccgggctatgctcttggatctgagaagggaaggcggagggcggcggggacaagatgggtggagaatgtcaagcaaggaatgctaggcgggggaggggcgttgctatggcgactggggaggggcggtgtctgttctgaatcgctgtgtgtcacccgggcgctgcccaggaagggcagggctggggtgatgaccatggtaacacccgggtgggagttcgtgacatctccggcgcggagggactcgatgtctatggcaatggtcgcctggtggaagggacggaactagatcccttcgctcgggacgctcacattccaggcccttgtcctgcaggctgccgcgggcggacacgccagaggaggaggccggggaatggccgcggtgtggcagcaagtcttagcagtggacgcgaggtgaggcgtggggtcaaagcccatgggagcagaacttactgtggtgcatgcgcaatggcgataagtgaggctgggcggagaacttgccttatgcggctgcgtgggcatgccggaggtgagcatgcgcagtagcgggggcgggcacgcccgcggtgagttggctgcgccggagaggattctaaacagcaagctgggaaaatgtggtcagatgtgggcatgcgcaaagcggctacctgtgagagggaggtggggctcaggcaggtgacatcctatcccctatgggtgtcccctagactttttttttttacatcatcacttccccattctgaccccatcacctcccaacgctgacccccataatgtcagtctgatttctgtcgccctggtatactgaccctaattattgtctgcgctgacccagtcaccccgtagggaccccagcacggcagcagactgactctgttgtctgcaaactgacctcatgaccatgctcattattactgcagactcactcccaccacaggaccaagaggtccctcatcaccactgctagtcattcttaccacctaggccccagtcactgccacacacctcactctcctgccgtacccccccccccgagctgattgattccctctgtcctgtgcctgctgcctgccctgcatcctgaccctgcaggtacaacgcgtaccgcacaccaacgtttccacagtttcggacgcagtatatccgccggcgcagccagctgctgcgggagaatgccaaggctgggcaccccccagcgctgcgtcggcagtacctgaggcttcgggggcagctgctgggccagcgctacgggcccctctccgagccaggcagtgctcgtgcctatagcaacagcatcgtccgcagtagccgcactactcttgaccgcatggaggtgagcttctggccacattcacccccgggcataccctgcctgcacacattcactccactgactttcatcaagcacctgctctttgctgggcactgttctgcatcagcagaggacaaaaagataatatgccaagtaaaccagtaaacacacaaactttgtaaacaggtcagtaaacatatagcaagccctgtctttagtatctgctgagcagggggagggcaggaacagcagaactcgtgaggaagccactgcagtagtacaagtgggcagcggtggtggtggcaggggacacagtgagaagtgatctgactctaggtagattttcagggctccacacctcaaaggttctcgggctttttgcaagatgcacccaccctgaccctctccatttgcaggactttgaggatgatcctcgggccctgggggcccgtgggcaccgtcgttctgtcagcagaggctcctaccagctgcaggcgcagatgaaccgtgccgtctatgaggacaggccccctggcagcgtggtgcccacgtcagcagcagaggcaagtcgggccatggccggggacacgtcactgagcgagaactatgcctttgcgggcatgtatcatgtttttgaccagcacgtggatgaggcaggtgagccagtgggtagcgggttccatcaccaaggtttgcccaaactgtgacaaccaaccaaggcatccttttctgaatccaaggcccctggcacactccaaaggaggaatgaccatccataaagccttttgtagactgaaaatccctctgcaaagtggtcagtgcttcgtctactggaaagggcctcagaagcctaagagagagccctttgcagcaggctgcctgggttcctgagtcacttggaagagttcaaagcctttgctgatgataaatccccttgcagagggcagagtggctacagtgtcaagggttttgcaaattgccaagaccttgattataaagtgttcgctaagacaggaactttttcatgttgcagaagacttttgcaatctgcaaaggagctgctaagacttagggagctttggcagagggtcttcaggggttacagttccctttgtcagccaaggaaagccctntgctgaggccactgttcctcatgcagtgggccccagccccaggcacacacgtcagagccttttagagagaaaagtgcccagtgagnggaattc

SEQ ID NO: 453187 - DNA, 584 bp, Homo sapiens
  misc_feature (343)..(343): n is a, c, g, or t
  misc_feature (345)..(345): n is a, c, g, or t
  misc_feature (349)..(352): n is a, c, g, or t
  misc_feature (356)..(356): n is a, c, g, or t
  misc_feature (360)..(360): n is a, c, g, or t
  misc_feature (365)..(366): n is a, c, g, or t
  misc_feature (369)..(371): n is a, c, g, or t
  misc_feature (375)..(376): n is a, c, g, or t
  misc_feature (378)..(381): n is a, c, g, or t
  misc_feature (383)..(383): n is a, c, g, or t
  misc_feature (385)..(387): n is a, c, g, or t
  misc_feature (389)..(391): n is a, c, g, or t
  misc_feature (395)..(395): n is a, c, g, or t
  misc_feature (400)..(400): n is a, c, g, or t
  misc_feature (402)..(403): n is a, c, g, or t
  misc_feature (405)..(407): n is a, c, g, or t
  misc_feature (412)..(413): n is a, c, g, or t
  misc_feature (419)..(419): n is a, c, g, or t
  misc_feature (422)..(423): n is a, c, g, or t
  misc_feature (425)..(427): n is a, c, g, or t
  misc_feature (429)..(429): n is a, c, g, or t
  misc_feature (436)..(437): n is a, c, g, or t
  misc_feature (440)..(440): n is a, c, g, or t
  misc_feature (443)..(443): n is a, c, g, or t
  misc_feature (445)..(445): n is a, c, g, or t
  misc_feature (452)..(452): n is a, c, g, or t
  misc_feature (482)..(483): n is a, c, g, or t
  misc_feature (519)..(519): n is a, c, g, or t
  misc_feature (572)..(572): n is a, c, g, or t
tgggctcggcagttctttctgatagcaggcagccatcttgcctggagcctgagaaagggaggagagacagaaggaaccggcgacagtggtctcagggccgctccggggggcctcaagaaccggaggcagccccggaggctgccgcgggcggacacgccagaggaggaggccggggaatggccgcggtgtggcagcaagtcttagcagtggacgcgaggtacaacgcgtaccgcacaccaacgtttccacagtttcggacgcagtatatccgccggcgcagccagctgctgcgggagaatgccaaggctgggcaccccccagcgctgcgtcggcagtacctgantnatcnnnntcancatnatttnnaannncacnntnnnntntnnnannnattnattangnnannntatannaacatnaanntnnngnttatagnngantantntataccncatttattacttatattattaacctctttnncgtttttccgatttcaccttctaactttcaacatantctccaaccatcgatcattctcataataaccgtttcgcttctattattacatnccccccttcatc

SEQ ID NO: 453188 - DNA, 103 bp, Homo sapiens
cgattgcttagtgtgtacagggtctcttttgggggtgatgaaaatgtgctggaactatatagaggtggcggttacataacattgttaatgtgccaaatgccac

SEQ ID NO: 453189 - DNA, 1211 bp, Homo sapiens
cgcgcttccagtcgccccggcaacagccgcctccctcgcgtcccccactccccctctgtctctccaaggaaaactaggcccctgcgcggccaacgcccaggatccgcaagctgcgcgcccacgagctccaccagcccattggagaaaagttactgttcagtccctgaaggcttgtgccataaaagagtgggagacattcccagggagtttcagcacccatttggactttcacaatcagagatggcagcggtaaaggcatcaacatcgaaagctaccaggccttggtattctcatccggtatatgcaagatactggcaacattatcatcaagcaatggcttggatgcaaagccatcacaatgcctacaggaaggccgtggaatcctgtttcaatcttccatggtacttaccttctgcgcttcttccccaaagctcttacgataatgaggctgcgtatcctcagtccttctatgaccatcatgtggcctggcaggactacccctgcagttcttcacatttcagaagatctgggcagcatccacgttacagcagtaggatccaggcatccacaaaagaagaccaagctttgtccaaagaggaagagatggagactgagtcagatgcagaggtagaatgtgacctgagcaatatggaaatcactgaagagctccgccagtactttgcagagaccgagaggcatagagaagaacgacggcggcagcagcagctggatgcagagcgcctggacagctatgtgaacgctgaccacgacctgtactgcaacacccgccggtcggtagaagccccaactgagaggcctggtgagcggcgccaggccgagatgaagcgtttgtacggggacagtgctgccaagatccaagccatggaggccgcggtgcagctgagctttgacaagcactgtgaccgaaagcagcccaagtactggccggtcatccccctgaagttctgagctcagggcacagggtacccagcctctccttcttccttttgggtacacgctctttatctctccttctgtacatttcttagggaaaggggactttgtactggggtacaggcatgttcaccacagtcccagtgggcctgtcacggggtggatgtactatgccagccacttggaggtctgcaggacatgttctgttgccaacatgataaattttctcctgacataaaataattttgcatatacta

SEQ ID NO: 453190 - DNA, 1129 bp, Homo sapiens
cgcgcttccagtcgccccggcaacagccgcctccctcgcgtcccccactccccctctgtctctccaaggaaaactaggcccctgcgcggccaacgcccaggatccgcaagctgcgcgcccacgagtttcagcacccatttggactttcacaatcagagatggcagcggtaaaggcatcaacatcgaaagctaccaggccttggtattctcatccggtatatgcaagatactggcaacattatcatcaagcaatggcttggatgcaaagccatcacaatgcctacaggaaggccgtggaatcctgtttcaatcttccatggtacttaccttctgcgcttcttccccaaagctcttacgataatgaggctgcgtatcctcagtccttctatgaccatcatgtggcctggcaggactacccctgcagttcttcacatttcagaagatctgggcagcatccacgttacagcagtaggatccaggcatccacaaaagaagaccaagctttgtccaaagaggaagagatggagactgagtcagatgcagaggtagaatgtgacctgagcaatatggaaatcactgaagagctccgccagtactttgcagagaccgagaggcatagagaagaacgacggcggcagcagcagctggatgcagagcgcctggacagctatgtgaacgctgaccacgacctgtactgcaacacccgccggtcggtagaagccccaactgagaggcctggtgagcggcgccaggccgagatgaagcgtttgtacggggacagtgctgccaagatccaagccatggaggccgcggtgcagctgagctttgacaagcactgtgaccgaaagcagcccaagtactggccggtcatccccctgaagttctgagctcagggcacagggtacccagcctctccttcttccttttgggtacacgctctttatctctccttctgtacatttcttagggaaaggggactttgtactggggtacaggcatgttcaccacagtcccagtgggcctgtcacggggtggatgtactatgccagccacttggaggtctgcaggacatgttctgttgccaacatgataaattttctcctgacataaaataattttgcatatacta

SEQ ID NO: 453191 - DNA, 847 bp, Homo sapiens
ttgaggataataaacactttggtgtccaccctccacctcctttcattttgtaggcatcaacatcgaaagctaccaggccttggtattctcatccggtatatgcaagatactggcaacattatcatcaagcaatggcttggatgcaaagccatcacaatgcctacaggaaggccgtggaatcctgtttcaatcttccatggtacttaccttctgcgcttcttccccaaagctcttacgataatgaggctgcgtatcctcagtccttctatgaccatcatgtggcctggcaggactacccctgcagttcttcacatttcagaagatctgggcagcatccacgttacagcagtaggatccaggcatccacaaaagaagaccaagctttgtccaaagaggaagagatggagactgagtcagatgcagaggtagaatgtgacctgagcaatatggaaatcactgaagagctccgccagtactttgcagagaccgagaggcatagagaagaacgacatattcacaggtgcacaaaaccgatcagtgagatgatacgtgttaatggctgtagaaaagtggaaaggaacatgaaaatgcacttctgttgtaaaagtaaaaatggcggttgtccagtaacttcaggattacatttgtcatggggcaagggatgtgcgacgaagagagaagaccagtctgaaatggctccagttctgctggcatgtacctgtgttctgggtggttgctgacaagccagaaatgaggcattcatggcatacatcaagtttgtgctttccctcggttgtgctacaattattcattttggcaaaatagcagaaaatataatcagaaagat

SEQ ID NO: 453192 - DNA, 369 bp, Homo sapiens
atatttatatggtcattttcatagactttacttcctatagggaaataagtaattgaaccatgcaggatcttttgacccacttaatcaaacctaagtggatccctccttttcagaccacaaagttatagcccaggaaccaacgtcatatagataggttgcatgaaatcaggcatggtcctgggaagaggcagttccttgggagctgcctcacaaaccatagaatagccacaaatatcacacagccatactgatcagacgtttgcactgtgattcttctttcctagtttcagcacccatttggactttcacaatcagagatggcagcggtaaaggtaagatttttatttttttattttttttttgagctcg

SEQ ID NO: 453193 - DNA, 1693 bp, Homo sapiens
cgcgcttccagtcgccccggcaacagccgcctccctcgcgtcccccactccccctctgtctctccaaggaaaactaggcccctgcgcggccaacgcccaggatccgcaagctgcgcgcccacgagctccaccagcccattggagaaaagttactgttcagtccctgaaggcttgtgccataaaagagtgggagacattcccagggaggtgaggaatgaaagatcgaattaaagaccattaaagaccaaagggcatctaaatctgcagcaaccatcagctctcttttctttgagagtttcagcacccatttggactttcacaatcagagatggcagcggtaaaggcatcaacatcgaaagctaccaggccttggtattctcatccggtatatgcaagatactggcaacattatcatcaagcaatggcttggatgcaaagccatcacaatgcctacaggaaggccgtggaatcctgtttcaatcttccatggtacttaccttctgcgcttcttccccaaagctcttacgataatgaggctgcgtatcctcagtccttctatgaccatcatgtggcctggcaggactacccctgcagttcttcacatttcagaagatctgggcagcatccacgttacagcagtaggatccaggcatccacaaaagaagaccaagctttgtccaaagaggaagagatggagactgagtcagatgcagaggtagaatgtgacctgagcaatatggaaatcactgaagagctccgccagtactttgcagagaccgagaggcatagagaagaacgacggcggcagcagcagctggatgcagagcgcctggacagctatgtgaacgctgaccacgacctgtactgcaacacccgccggtcggtagaagccccaactgagaggcctggtgagcggcgccaggccgagatgaagcgtttgtacggggacagtgctgccaagatccaagccatggaggccgcggtgcagctgagctttgacaagcactgtgaccgaaagcagcccaagtactggccggtcatccccctgaagttctgagctcagggcacagggtacccagcctctccttcttccttttgggtacacgctctttatctctccttctgtacatttcttagggaaaggggactttgtactggggtacaggcatgttcaccacagtcccagtgggcctgtcacggggtggatgtactatgccagccacttggaggtctgcaggacatgttctgttgccaacatgataaattttctcctgacataaaataattttgcatatactatactggttttttatgttgttggtaacagttcaattcattaacgttcttgcctagagatactgcctggtgttttgcttttttatcttttcttgtctttaacctgtctgaactacacaaatgcctttaaaaaaccagatatcctctctgactctagctccattagcccccactaaaaatgagccaagtgtgtagtgagacaaataccactacctgtagtggagagggatgcatgttctataaagggccagagagtgaatatctttggcactgcaagccacacggtcagtgttgtgactactcaaccctccctttgtagtgtgaaagcagctgtagacagtaagtaaacaaatgggtgtggctgtgttctaataaaactttatttataaaaacaggc

SEQ ID NO: 453194 - DNA, 1222 bp, Homo sapiens
atcttctgtgatagggttattattgcatgtacagagagattccttggaaccgcatatgactcaatctatctcactcagatttctcaccataccttcacttattttgctgcagtgtccagcagatctccttgaaacactccaccagcccattggagaaaagttactgttcagtccctgaaggcttgtgccataaaagagtgggagacattcccagggagtttcagcacccatttggactttcacaatcagagatggcagcggtaaaggcatcaacatcgaaagctaccaggccttggtattctcatccggtatatgcaagatactggcaacattatcatcaagcaatggcttggatgcaaagccatcacaatgcctacaggaaggccgtggaatcctgtttcaatcttccatggtacttaccttctgcgcttcttccccaaagctcttacgataatgaggctgcgtatcctcagtccttctatgaccatcatgtggcctggcaggactacccctgcagttcttcacatttcagaagatctgggcagcatccacgttacagcagtaggatccaggcatccacaaaagaagaccaagctttgtccaaagaggaagagatggagactgagtcagatgcagaggtagaatgtgacctgagcaatatggaaatcactgaagagctccgccagtactttgcagagaccgagaggcatagagaagaacgacggcggcagcagcagctggatgcagagcgcctggacagctatgtgaacgctgaccacgacctgtactgcaacacccgccggtcggtagaagccccaactgagaggcctggtgagcggcgccaggccgagatgaagcgtttgtacggggacagtgctgccaagatccaagccatggaggccgcggtgcagctgagctttgacaagcactgtgaccgaaagcagcccaagtactggccggtcatccccctgaagttctgagctcagggcacagggtacccagcctctccttcttccttttgggtacacgctctttatctctccttctgtacatttcttagggaaaggggactttgtactggggtacaggcatgttcaccacagtcccagtgggcctgtcacggggtggatgtactatgccagccacttggaggtctgcaggacatgttctgttgccaacatgataaattttctcctgacataaaataattttgcatatacta

SEQ ID NO: 453195 - DNA, 189 bp, Homo sapiens
gcctttgagttttctcctatcaaggaaggggagacacacatgatgctcacgtgtctgtctatctcaggagactggggttaccctctggggccggtccctgggaggatctgctatgggacaccagctggaggctggctaggcagtgaggcaacaacccaattccttcaactcctcgggccctgcttggat

SEQ ID NO: 453196 - DNA, 1768 bp, Homo sapiens
  misc_feature (1514)..(1514): n is a, c, g, or t
ggaggagggctgccctgaagaaagatggcctccgcgagaggaggaaccggaagcgtgggtctggcggctgcaccggttcgcggtcggcgcgagaacaagcagggtggcgcgggtccgggcatgaagctgggccgggccgtgctgggcctgctgctgctggcgccgtccgtggtgcaggcggtggagcccatcagcctgggactggccctggccggcgtcctcaccggctacatctacccgcgtctctactgcctcttcgccgagtgctgcgggcagaagcggagccttagccgggaggcactgcagaaggatctggacgacaacctctttggacagcatcttgcaaagaaaatcatcttaaatgccgtgtttggtttcataaacaacccaaagcccaagaaacctctcacgctctccctgcacgggtggacaggcaccggcaaaaatttcgtcagcaagatcatcgcagagaatatttacgagggtggtctgaacagtgactatgtccacctgtttgtggccacattgcactttccacatgcttcaaacatcaccttgtacaaggcaaggatggaagtttggaatcccttcctggatgtcatcgggtttggggtctctttgttgtgggatgagatttgggagttctatgttgaaatgagtgagcccggaaaacggttcatgtctcagttccccttggaaaggtgtagaagttaagagtttgagatgcgtggagcagttaataccatcaaagctttgtggtgggttctgaaaatcggtccagtgagtatgtagggtcatgggattttagaggtggacatgatcaaatccatcttagagatcaacacatctcactcatttttttatttttttctttattttgagacggagtttcactcttcttacccgggctggagtgcaatggcatgatctcagctcactgcaacctctgcctcccggttgaagcaattatcctgcctcagcctcccgggtagctgggattacagggtcctgccaccatgcccagctaatttttgtatttttagtagagatggggttttgccaacttggccaggctggtctcgaactcctgatctcaggtgatgtgcctgcctcagcttcccgaagtgctgggattacaggcgtgagccaccatgcctggccacatctcactcattttgtgaaagaggaaacatgtagagtcctaagtttgttgaacctactgttgtaaactgcctttttttttttttctttgagtcagggtctcactctgttgtccaggctggagtgcagtgacgccatctcagctcactacagcctccaccttcccggttcaagcgattctcctgcctcagcctcccaagtagctgtgactacaggcatgtgccaccacagccggctaatttttgtatttctagtagagatggggtttcctcacattggccaggctggtctcgaactcctgacctcaagtgatctgcctacctcagcctcccagagtgctaggattacaggcntgagccaccttgcccagccgcaaacagcttttatggttgaactcactgatgagcagcttgggctttggcagcagacacatctggatttgagtcctaacactctcccagctccgtagtcttaggaaagttgcctgacctgagactcagattctgacttacaaagtgttgcttgtaacaatccagggagctctgtctgtcaagtgcataacatgtacctggtgcatgttacaaataaatgttaactgttgcctttt

SEQ ID NO: 453197 - DNA, 2871 bp, Homo sapiens
tggaggctgggggatggcagtagggccgggctaggactggggctggagcggagtttgggggctggggctcaggagcgggggctggggctggggctggggctgggggatggcactagggccaggccggggtaggggtcacatcccaggagggccgggcctgggcagagctgagtccgcgggggccggaccccggaagccaagcggccggcctgcaggatgaggcctggctcctcggccatgaccacagacgtgccagacttaagtcggagacctgaggagccaggctgcagcactgcagaaggatctggacgacaacctctttggacagcatcttgcaaagaaaatcatcttaaatgccgtgtttggtttcataaacaacccaaagcccaagaaacctctcacgctctccctgcacgggtggacaggcaccggcaaaaatttcgtcagcaagatcatcgcagagaatatttacgagggtggtctgaacagtgactatgtccacctgtttgtggccacattgcactttccacatgcttcaaacatcaccttgtacaaggatcagttacagttgtggattcgaggcaacgtgagtgcctgtgcgaggtccatcttcatatttgatgaaatggataagatgcatgcaggcctcatagatgccatcaagcctttcctcgactattatgacctggtggatggggtctcctaccagaaagccatgttcatatttctcagcaatgctggagcagaaaggatcacagatgtggctttggatttctggaggagtggaaagcagagggaagacatcaagctcaaagacattgaacacgcgttgtctgtgtcggttttcaataacaagaacagtggcttctggcacagcagcttaattgaccggaacctcattgattattttgttcccttcctccccctggaatacaaacacctaaaaatgtgtatccgagtggaaatgcagtcccgaggctatgaaattgatgaagacattgtaagcagagtggctgaggagatgacatttttccccaaagaggagagagttttctcagataaaggctgcaaaacggtgttcaccaagttagattattactacgatgattgacagtcatgattggcagccggagtcactgcctggagttggaaaagaaacaacactcagtccttccacacttccacccccagctcctttccctggaagaggaatccagtgaatgttcctgtttgatgtgacaggaattctccctggcattgtttccaccccctggtgcctgcaggccacccagggaccacgggcgaggacgtgaagcctcccgaacacgcacagaaggaaggagccagctcccagcccactcatcgcagggctcatgattttttacaaattatgttttaattccaagtgtttctgtttcaaggaaggatgaataagttttattgaaaatgtggtaactttatttaaaatgatttttaacattatgagagactgctcagattctaagttgttggccttgtgtgtgtgtttttttttaagttctcatcattattacatagactgtgatgtatctttactggaaatgagcccaagcacacatgcatggcatttgttccacaggagggcatccctggggatgtggctggagcatgagccagctctgtcccaggatggtcccagcggatgctgccaggggcagtgaagtgtttaggtgaaggacaagtaggtaagaggacgccttcaggcaccacagataagcctgaaacagcctctccaagggttttcaccttagcaacaatgggagctgtgggagtgattttggccacactgtcaacatttgttagaaccagtcttttgaaagaaaagtatttccaacttgtcacttgccagtcactccgttttgcaaaaggtggcccttcactgtccattccaaatagcccacacgtgctctctgctggattctaaattatgtgaattttgccatattaaatcttcctcatttatactattatttgttacgttcaatcagaatccccgaaacctcctataaagcttagctgccccttctgaggatgctgagaacggtgtctttctttataaatgcaaatggctaccgttttacaataaaattttgcatgtgccattggtgagtacgtttttgaagagggagaagcgcccctccactgtagaccttatgaggtaaggctgcgagtgaagacctagcagaacaatccaggttggaaagaaacgaagtctcacacagggatctgaggatcctaggatggctctgtcccctcgcccagtggtctggggaagtcgccctccattgtgggggttcttggagctcctgacacccagccacggagtttcaagtacagcttgagatgccagcagggaacagtgccctaggattaagggtaaggcacaccttatttttatccaacatgcctgtgtcccagcacgtgggcagtgctcccatgggtgcggctgctgcagagagcactgcaggggccacttctagtaggcacagaagacgagtttgtggcctcgactgcaggtctaacgcaggaaccctctgccttatggcttcccagcctgcatggggtccccctagggcagcccagggcacctaaagatggctccaagcgttagaaagttcttggtattgagctgcagccagcctgctatgtccctgggagtcacagattaggtctaatcattcctttgaagagtgtggcccaggcaccagaagtccctagttagagaacacgggtcccctgacagttttggaaggttcagtcttagtagatgaggcagtgtaggtagaataggaactgcgttaagactgagaaccagacctagaaagtcagtct

SEQ ID NO: 453198 - DNA, 2590 bp, Homo sapiens
ggtttggtttcataaacacggcatttaagatgattttctttgcaagatgctgtccaaagaaaatcatcttaaatgccgtgtttggtttcataaacaacccaaagcccaagaaacctctcacgctctccctgcacgggtggacaggcaccggcaaaaatttcgtcagcaagatcatcgcagagaatatttacgagggtggtctgaacagtgactatgtccacctgtttgtggccacattgcactttccacatgcttcaaacatcaccttgtacaaggatcagttacagttgtggattcgaggcaacgtgagtgcctgtgcgaggtccatcttcatatttgatgaaatggataagatgcatgcaggcctcatagatgccatcaagcctttcctcgactattatgacctggtggatggggtctcctaccagaaagccatgttcatatttctcagcaatgctggagcagaaaggatcacagatgtggctttggatttctggaggagtggaaagcagagggaagacatcaagctcaaagacattgaacacgcgttgtctgtgtcggttttcaataacaagaacagtggcttctggcacagcagcttaattgaccggaacctcattgattattttgttcccttcctccccctggaatacaaacacctaaaaatgtgtatccgagtggaaatgcagtcccgaggctatgaaattgatgaagacattgtaagcagagtggctgaggagatgacatttttccccaaagaggagagagttttctcagataaaggctgcaaaacggtgttcaccaagttagattattactacgatgattgacagtcatgattggcagccggagtcactgcctggagttggaaaagaaacaacactcagtccttccacacttccacccccagctcctttccctggaagaggaatccagtgaatgttcctgtttgatgtgacaggaattctccctggcattgtttccaccccctggtgcctgcaggccacccagggaccacgggcgaggacgtgaagcctcccgaacacgcacagaaggaaggagccagctcccagcccactcatcgcagggctcatgattttttacaaattatgttttaattccaagtgtttctgtttcaaggaaggatgaataagttttattgaaaatgtggtaactttatttaaaatgatttttaacattatgagagactgctcagattctaagttgttggccttgtgtgtgtgtttttttttaagttctcatcattattacatagactgtgatgtatctttactggaaatgagcccaagcacacatgcatggcatttgttccacaggagggcatccctggggatgtggctggagcatgagccagctctgtcccaggatggtcccagcggatgctgccaggggcagtgaagtgtttaggtgaaggacaagtaggtaagaggacgccttcaggcaccacagataagcctgaaacagcctctccaagggttttcaccttagcaacaatgggagctgtgggagtgattttggccacactgtcaacatttgttagaaccagtcttttgaaagaaaagtatttccaacttgtcacttgccagtcactccgttttgcaaaaggtggcccttcactgtccattccaaatagcccacacgtgctctctgctggattctaaattatgtgaattttgccatattaaatcttcctcatttatactattatttgttacgttcaatcagaatccccgaaacctcctataaagcttagctgccccttctgaggatgctgagaacggtgtctttctttataaatgcaaatggctaccgttttacaataaaattttgcatgtgccattggtgagtacgtttttgaagagggagaagcgcccctccactgtagaccttatgaggtaaggctgcgagtgaagacctagcagaacaatccaggttggaaagaaacgaagtctcacacagggatctgaggatcctaggatggctctgtcccctcgcccagtggtctggggaagtcgccctccattgtgggggttcttggagctcctgacacccagccacggagtttcaagtacagcttgagatgccagcagggaacagtgccctaggattaagggtaaggcacaccttatttttatccaacatgcctgtgtcccagcacgtgggcagtgctcccatgggtgcggctgctgcagagagcactgcaggggccacttctagtaggcacagaagacgagtttgtggcctcgactgcaggtctaacgcaggaaccctctgccttatggcttcccagcctgcatggggtccccctagggcagcccagggcacctaaagatggctccaagcgttagaaagttcttggtattgagctgcagccagcctgctatgtccctgggagtcacagattaggtctaatcattcctttgaagagtgtggcccaggcaccagaagtccctagttagagaacacgggtcccctgacagttttggaaggttcagtcttagtagatgaggcagtgtaggtagaataggaactgcgttaagactgagaaccagacctagaaagtcagtct

SEQ ID NO: 453199 - DNA, 2403 bp, Homo sapiens
cgccggtgttaagggagtgaggatgtaaaccgtgtgggggggcaaatgggactttcgacatgcttcgaaacatcgagcttgttacaaggatcagttacagttgtggattcgaggcaacgtgagtgcctgtgcgaggtccatcttcatatttgatgaaatggataagatgcatgcaggcctcatagatgccatcaagcctttcctcgactattatgacctggtggatggggtctcctaccagaaagccatgttcatatttctcagcaatgctggagcagaaaggatcacagatgtggctttggatttctggaggagtggaaagcagagggaagacatcaagctcaaagacattgaacacgcgttgtctgtgtcggttttcaataacaagaacagtggcttctggcacagcagcttaattgaccggaacctcattgattattttgttcccttcctccccctggaatacaaacacctaaaaatgtgtatccgagtggaaatgcagtcccgaggctatgaaattgatgaagacattgtaagcagagtggctgaggagatgacatttttccccaaagaggagagagttttctcagataaaggctgcaaaacggtgttcaccaagttagattattactacgatgattgacagtcatgattggcagccggagtcactgcctggagttggaaaagaaacaacactcagtccttccacacttccacccccagctcctttccctggaagaggaatccagtgaatgttcctgtttgatgtgacaggaattctccctggcattgtttccaccccctggtgcctgcaggccacccagggaccacgggcgaggacgtgaagcctcccgaacacgcacagaaggaaggagccagctcccagcccactcatcgcagggctcatgattttttacaaattatgttttaattccaagtgtttctgtttcaaggaaggatgaataagttttattgaaaatgtggtaactttatttaaaatgatttttaacattatgagagactgctcagattctaagttgttggccttgtgtgtgtgtttttttttaagttctcatcattattacatagactgtgatgtatctttactggaaatgagcccaagcacacatgcatggcatttgttccacaggagggcatccctggggatgtggctggagcatgagccagctctgtcccaggatggtcccagcggatgctgccaggggcagtgaagtgtttaggtgaaggacaagtaggtaagaggacgccttcaggcaccacagataagcctgaaacagcctctccaagggttttcaccttagcaacaatgggagctgtgggagtgattttggccacactgtcaacatttgttagaaccagtcttttgaaagaaaagtatttccaacttgtcacttgccagtcactccgttttgcaaaaggtggcccttcactgtccattccaaatagcccacacgtgctctctgctggattctaaattatgtgaattttgccatattaaatcttcctcatttatactattatttgttacgttcaatcagaatccccgaaacctcctataaagcttagctgccccttctgaggatgctgagaacggtgtctttctttataaatgcaaatggctaccgttttacaataaaattttgcatgtgccattggtgagtacgtttttgaagagggagaagcgcccctccactgtagaccttatgaggtaaggctgcgagtgaagacctagcagaacaatccaggttggaaagaaacgaagtctcacacagggatctgaggatcctaggatggctctgtcccctcgcccagtggtctggggaagtcgccctccattgtgggggttcttggagctcctgacacccagccacggagtttcaagtacagcttgagatgccagcagggaacagtgccctaggattaagggtaaggcacaccttatttttatccaacatgcctgtgtcccagcacgtgggcagtgctcccatgggtgcggctgctgcagagagcactgcaggggccacttctagtaggcacagaagacgagtttgtggcctcgactgcaggtctaacgcaggaaccctctgccttatggcttcccagcctgcatggggtccccctagggcagcccagggcacctaaagatggctccaagcgttagaaagttcttggtattgagctgcagccagcctgctatgtccctgggagtcacagattaggtctaatcattcctttgaagagtgtggcccaggcaccagaagtccctagttagagaacacgggtcccctgacagttttggaaggttcagtcttagtagatgaggcagtgtaggtagaataggaactgcgttaagactgagaaccagacctagaaagtcagtct

SEQ ID NO: 453200 - DNA, 3020 bp, Homo sapiens
ccctggccataggctccactctgtcagtcagccacacatttattgagtaccagttgtgtgcaaagcactgttgggcatgaaaagcattaacccagtgaatgaggaggagcttgggttggggacggagccccagaattacatggcagaccagaagggaatcagctcagtagaagacacgcatgggctcgtgggcgacgcagtgtgtgctgtgtcatctggggctgggaggaagtgtcctgggtcaggagttccaggagcccaggaggagtggacgggtcagtgcagagccagcccgcattcaggggagaaaacacggccaaggccaggcggtgcccacatgctctgcagggtctgggcactgtggcagcggcagcaggcttccctgttgctagtccagctgctgaaactccagggagagtcaaaaagttcccaaatacagaggcgtggctggtagtccttcccgggaattcttcttgcttcccgcctgtggaactctgccttccccactctgcctctctgcttgttcctgggccccaggacctctttcccatcttcgatctcttaagtcataccttgggaggcctcccccagcccgccgtgtaaagagggctgtcacagcttctgctgtcacagaagcattacaatgtgcaggtgcctgttaacatctgccttccccactgatctggagctccacaagggagagggcacacccagtaggtatgtgtgggatggataggagggtggatgacacccagtagatgtgtatgggatggataggagggtggatgacacccagtaggtgtgtatgggatggatgggagggtgggtgacccctagtagatgtggggggggtgggtgggtgacccccagtaggtgtgtgtggcatggataggtgacccccagtagacgtttgtgggacggatgggagggtaggtaagtgacccccaggaggcgtctatagggcaggtgggtggatgtggatgaacagcaccttgtttcttcttcccaggtggcttctggcacagcagcttaattgaccggaacctcattgattattttgttcccttcctccccctggaatacaaacacctaaaaatgtgtatccgagtggaaatgcagtcccgaggctatgaaattgatgaagacattgtaagcagagtggctgaggagatgacatttttccccaaagaggagagagttttctcagataaaggctgcaaaacggtgttcaccaagttagattattactacgatgattgacagtcatgattggcagccggagtcactgcctggagttggaaaagaaacaacactcagtccttccacacttccacccccagctcctttccctggaagaggaatccagtgaatgttcctgtttgatgtgacaggaattctccctggcattgtttccaccccctggtgcctgcaggccacccagggaccacgggcgaggacgtgaagcctcccgaacacgcacagaaggaaggagccagctcccagcccactcatcgcagggctcatgattttttacaaattatgttttaattccaagtgtttctgtttcaaggaaggatgaataagttttattgaaaatgtggtaactttatttaaaatgatttttaacattatgagagactgctcagattctaagttgttggccttgtgtgtgtgtttttttttaagttctcatcattattacatagactgtgatgtatctttactggaaatgagcccaagcacacatgcatggcatttgttccacaggagggcatccctggggatgtggctggagcatgagccagctctgtcccaggatggtcccagcggatgctgccaggggcagtgaagtgtttaggtgaaggacaagtaggtaagaggacgccttcaggcaccacagataagcctgaaacagcctctccaagggttttcaccttagcaacaatgggagctgtgggagtgattttggccacactgtcaacatttgttagaaccagtcttttgaaagaaaagtatttccaacttgtcacttgccagtcactccgttttgcaaaaggtggcccttcactgtccattccaaatagcccacacgtgctctctgctggattctaaattatgtgaattttgccatattaaatcttcctcatttatactattatttgttacgttcaatcagaatccccgaaacctcctataaagcttagctgccccttctgaggatgctgagaacggtgtctttctttataaatgcaaatggctaccgttttacaataaaattttgcatgtgccattggtgagtacgtttttgaagagggagaagcgcccctccactgtagaccttatgaggtaaggctgcgagtgaagacctagcagaacaatccaggttggaaagaaacgaagtctcacacagggatctgaggatcctaggatggctctgtcccctcgcccagtggtctggggaagtcgccctccattgtgggggttcttggagctcctgacacccagccacggagtttcaagtacagcttgagatgccagcagggaacagtgccctaggattaagggtaaggcacaccttatttttatccaacatgcctgtgtcccagcacgtgggcagtgctcccatgggtgcggctgctgcagagagcactgcaggggccacttctagtaggcacagaagacgagtttgtggcctcgactgcaggtctaacgcaggaaccctctgccttatggcttcccagcctgcatggggtccccctagggcagcccagggcacctaaagatggctccaagcgttagaaagttcttggtattgagctgcagccagcctgctatgtccctgggagtcacagattaggtctaatcattcctttgaagagtgtggcccaggcaccagaagtccctagttagagaacacgggtcccctgacagttttggaaggttcagtcttagtagatgaggcagtgtaggtagaataggaactgcgttaagactgagaaccagacctagaaagtcagtct

SEQ ID NO: 453201 - DNA, 1740 bp, Homo sapiens
  misc_feature (1)..(1): n is a, c, g, or t
nacgccaagctggcacgaggggtggaagtgtggaaggactgagtgttgtttcttccccagctcctttccctggaagaggaatccagtgaatgttcctgtttgatgtgacaggaattctccctggcattgtttccaccccctggtgcctgcaggccacccagggaccacgggcgaggacgtgaagcctcccgaacacgcacagaaggaaggagccagctcccagcccactcatcgcagggctcatgattttttacaaattatgttttaattccaagtgtttctgtttcaaggaaggatgaataagttttattgaaaatgtggtaactttatttaaaatgatttttaacattatgagagactgctcagattctaagttgttggccttgtgtgtgtgtttttttttaagttctcatcattattacatagactgtgatgtatctttactggaaatgagcccaagcacacatgcatggcatttgttccacaggagggcatccctggggatgtggctggagcatgagccagctctgtcccaggatggtcccagcggatgctgccaggggcagtgaagtgtttaggtgaaggacaagtaggtaagaggacgccttcaggcaccacagataagcctgaaacagcctctccaagggttttcaccttagcaacaatgggagctgtgggagtgattttggccacactgtcaacatttgttagaaccagtcttttgaaagaaaagtatttccaacttgtcacttgccagtcactccgttttgcaaaaggtggcccttcactgtccattccaaatagcccacacgtgctctctgctggattctaaattatgtgaattttgccatattaaatcttcctcatttatactattatttgttacgttcaatcagaatccccgaaacctcctataaagcttagctgccccttctgaggatgctgagaacggtgtctttctttataaatgcaaatggctaccgttttacaataaaattttgcatgtgccattggtgagtacgtttttgaagagggagaagcgcccctccactgtagaccttatgaggtaaggctgcgagtgaagacctagcagaacaatccaggttggaaagaaacgaagtctcacacagggatctgaggatcctaggatggctctgtcccctcgcccagtggtctggggaagtcgccctccattgtgggggttcttggagctcctgacacccagccacggagtttcaagtacagcttgagatgccagcagggaacagtgccctaggattaagggtaaggcacaccttatttttatccaacatgcctgtgtcccagcacgtgggcagtgctcccatgggtgcggctgctgcagagagcactgcaggggccacttctagtaggcacagaagacgagtttgtggcctcgactgcaggtctaacgcaggaaccctctgccttatggcttcccagcctgcatggggtccccctagggcagcccagggcacctaaagatggctccaagcgttagaaagttcttggtattgagctgcagccagcctgctatgtccctgggagtcacagattaggtctaatcattcctttgaagagtgtggcccaggcaccagaagtccctagttagagaacacgggtcccctgacagttttggaaggttcagtcttagtagatgaggcagtgtaggtagaataggaactgcgttaagactgagaaccagacctagaaagtcagtct

SEQ ID NO: 453202 - DNA, 1777 bp, Homo sapiens
attgccaggcgtgatctctagaggtcgatctgtggcgtgtgcttgcttgggactggacgttccgattcataccgtcgttcacatggccagaccccagctcctttccctggaagaggaatccagtgaatgttcctgtttgatgtgacaggaattctccctggcattgtttccaccccctggtgcctgcaggccacccagggaccacgggcgaggacgtgaagcctcccgaacacgcacagaaggaaggagccagctcccagcccactcatcgcagggctcatgattttttacaaattatgttttaattccaagtgtttctgtttcaaggaaggatgaataagttttattgaaaatgtggtaactttatttaaaatgatttttaacattatgagagactgctcagattctaagttgttggccttgtgtgtgtgtttttttttaagttctcatcattattacatagactgtgatgtatctttactggaaatgagcccaagcacacatgcatggcatttgttccacaggagggcatccctggggatgtggctggagcatgagccagctctgtcccaggatggtcccagcggatgctgccaggggcagtgaagtgtttaggtgaaggacaagtaggtaagaggacgccttcaggcaccacagataagcctgaaacagcctctccaagggttttcaccttagcaacaatgggagctgtgggagtgattttggccacactgtcaacatttgttagaaccagtcttttgaaagaaaagtatttccaacttgtcacttgccagtcactccgttttgcaaaaggtggcccttcactgtccattccaaatagcccacacgtgctctctgctggattctaaattatgtgaattttgccatattaaatcttcctcatttatactattatttgttacgttcaatcagaatccccgaaacctcctataaagcttagctgccccttctgaggatgctgagaacggtgtctttctttataaatgcaaatggctaccgttttacaataaaattttgcatgtgccattggtgagtacgtttttgaagagggagaagcgcccctccactgtagaccttatgaggtaaggctgcgagtgaagacctagcagaacaatccaggttggaaagaaacgaagtctcacacagggatctgaggatcctaggatggctctgtcccctcgcccagtggtctggggaagtcgccctccattgtgggggttcttggagctcctgacacccagccacggagtttcaagtacagcttgagatgccagcagggaacagtgccctaggattaagggtaaggcacaccttatttttatccaacatgcctgtgtcccagcacgtgggcagtgctcccatgggtgcggctgctgcagagagcactgcaggggccacttctagtaggcacagaagacgagtttgtggcctcgactgcaggtctaacgcaggaaccctctgccttatggcttcccagcctgcatggggtccccctagggcagcccagggcacctaaagatggctccaagcgttagaaagttcttggtattgagctgcagccagcctgctatgtccctgggagtcacagattaggtctaatcattcctttgaagagtgtggcccaggcaccagaagtccctagttagagaacacgggtcccctgacagttttggaaggttcagtcttagtagatgaggcagtgtaggtagaataggaactgcgttaagactgagaaccagacctagaaagtcagtct

SEQ ID NO: 453203 - DNA, 1064 bp, Homo sapiens
ggaggagggctgccctgaagaaagatggcctccgcgagaggaggaaccggaagcgtgggtctggcggctgcaccggttcgcggtcggcgcgagaacaagcagggtggcgcgggtccgggcatgaagctgggccgggccgtgctgggcctgctgctgctggcgccgtccgtggtgcaggcggtggagcccatcagcctgggactggccctggccggcgtcctcaccggctacatctacccgcgtctctactgcctcttcgccgagtgctgcgggcagaagcggagccttagccgggaggcactgcagaaggatctggacgacaacctctttggacagcatcttgcaaagaaaatcatcttaaatgccgtgtttggtttcataaacaacccaaagcccaagaaacctctcacgctctccctgcacgggtggacaggcaccggcaaaaatttcgtcagcaagatcatcgcagagaatatttacgagggtggtctgaacagtgactatgtccacctgtttgtggccacattgcactttccacatgcttcaaacatcaccttgtacaaggatcagttacagttgtggattcgaggcaacgtgagtgcctgtgcgaggtccatcttcatatttgatgaaatggataagatgcatgcaggcctcatagatgccatcaagcctttcctcgactattatgacctggtggatggggtctcctaccagaaagccatgttcatatttctcagcaatgctggagcagaaaggatcacagatgtggctttggatttctggaggagtggaaagcagagggaagacatcaagctcaaagacattgaacacgcgttgtctgtgtcggttttcaataacaagaacagtgagtagggccatccaccgccagtcccatctggttcctaatcctgcaccctaagtgttaaaagcatcagggtcactgtcagcatcacctgggagctgggtagaaagaaatgcagattctcagtccccttccgagtcatgaggggaatctttgctgatgaactccaggtaacttttatgaacactaatgtttgaca

SEQ ID NO: 453204 - DNA, 2147 bp, Homo sapiens
ggaggagggctgccctgaagaaagatggcctccgcgagaggaggaaccggaagcgtgggtctggcggctgcaccggttcgcggtcggcgcgagaacaagcagggtggcgcgggtccgggcatgaagctgggccgggccgtgctgggcctgctgctgctggcgccgtccgtggtgcaggcggtggagcccatcagcctgggactggccctggccggcgtcctcaccggctacatctacccgcgtctctactgcctcttcgccgagtgctgcgggcagaagcggagccttagccgggaggcactgcagaaggatctggacgacaacctctttggacagcatcttgcaaagaaaatcatcttaaatgccgtgtttggtttcataaacaacccaaagcccaagaaacctctcacgctctccctgcacgggtggacaggcaccggcaaaaatttcgtcagcaagatcatcgcagagaatatttacgagggtggtctgaacagtgactatgtccacctgtttgtggccacattgcactttccacatgcttcaaacatcaccttgtacaaggatcagttacagttgtggattcgaggcaacgtgagtgcctgtgcgaggtccatcttcatatttgatgaaatggataagatgcatgcaggcctcatagatgccatcaagcctttcctcgactattatgacctggtggatggggtctcctaccagaaagccatgttcatatttctcagcaatgctggagcagaaaggatcacagatgtggctttggatttctggaggagtggaaagcagagggaagacatcaagctcaaagacattgaacacgcgttgtctgtgtcggttttcaataacaagaacagtggcttctggcacagcagcttaattgaccggaacctcattgattattttgttcccttcctccccctggaatacaaacacctaaaaatgtgtatccgagtggaaatgcagtcccgaggctatgaaattgatgaagacattgtaagcagagtggctgaggagatgacatttttccccaaagaggagagagttttctcagataaaggctgcaaaacggtgttcaccaagttagattattactacgatgattgacagtcatgattggcagccggagtcactgcctggagttggaaaagaaacaacactcagtccttccacacttccacccccagctcctttccctggaagaggaatccagtgaatgttcctgtttgatgtgacaggaattctccctggcattgtttccaccccctggtgcctgcaggccacccagggaccacgggcgaggacgtgaagcctcccgaacacgcacagaaggaaggagccagctcccagcccactcatcgcagggctcatgattttttacaaattatgttttaattccaagtgtttctgtttcaaggaaggatgaataagttttattgaaaatgtggtaactttatttaaaatgatttttaacattatgagagactgctcagattctaagttgttggccttgtgtgtgtgtttttttttaagttctcatcattattacatagactgtgatgtatctttactggaaatgagcccaagcacacatgcatggcatttgttccacaggagggcatccctggggatgtggctggagcatgagccagctctgtcccaggatggtcccagcggatgctgccaggggcagtgaagtgtttaggtgaaggacaagtaggtaagaggacgccttcaggcaccacagataagcctgaaacagcctctccaagggttttcaccttagcaacaatgggagctgtgggagtgattttggccacactgtcaacatttgttagaaccagtcttttgaaagaaaagtatttccaacttgtcacttgccagtcactccgttttgcaaaaggtggcccttcactgtccattccaaatagcccacacgtgctctctgctggattctaaattatgtgaattttgccatattaaatcttcctcatttatactattatttgttacgttcaatcagaatccccgaaacctcctataaagcttagctgccccttctgaggatgctgagaacggtgtctttctttataaatgcaaatggctaccgttttacaataaaattttgcatgtgc

SEQ ID NO: 453205 - DNA, 2879 bp, Homo sapiens
ggaggagggctgccctgaagaaagatggcctccgcgagaggaggaaccggaagcgtgggtctggcggctgcaccggttcgcggtcggcgcgagaacaagcagggtggcgcgggtccgggcatgaagctgggccgggccgtgctgggcctgctgctgctggcgccgtccgtggtgcaggcggtggagcccatcagcctgggactggccctggccggcgtcctcaccggctacatctacccgcgtctctactgcctcttcgccgagtgctgcgggcagaagcggagccttagccgggaggcactgcagaaggatctggacgacaacctctttggacagcatcttgcaaagaaaatcatcttaaatgccgtgtttggtttcataaacaacccaaagcccaagaaacctctcacgctctccctgcacgggtggacaggcaccggcaaaaatttcgtcagcaagatcatcgcagagaatatttacgagggtggtctgaacagtgactatgtccacctgtttgtggccacattgcactttccacatgcttcaaacatcaccttgtacaaggatcagttacagttgtggattcgaggcaacgtgagtgcctgtgcgaggtccatcttcatatttgatgaaatggataagatgcatgcaggcctcatagatgccatcaagcctttcctcgactattatgacctggtggatggggtctcctaccagaaagccatgttcatatttctcagcaatgctggagcagaaaggatcacagatgtggctttggatttctggaggagtggaaagcagagggaagacatcaagctcaaagacattgaacacgcgttgtctgtgtcggttttcaataacaagaacagtggcttctggcacagcagcttaattgaccggaacctcattgattattttgttcccttcctccccctggaatacaaacacctaaaaatgtgtatccgagtggaaatgcagtcccgaggctatgaaattgatgaagacattgtaagcagagtggctgaggagatgacatttttccccaaagaggagagagttttctcagataaaggctgcaaaacggtgttcaccaagttagattattactacgatgattgacagtcatgattggcagccggagtcactgcctggagttggaaaagaaacaacactcagtccttccacacttccacccccagctcctttccctggaagaggaatccagtgaatgttcctgtttgatgtgacaggaattctccctggcattgtttccaccccctggtgcctgcaggccacccagggaccacgggcgaggacgtgaagcctcccgaacacgcacagaaggaaggagccagctcccagcccactcatcgcagggctcatgattttttacaaattatgttttaattccaagtgtttctgtttcaaggaaggatgaataagttttattgaaaatgtggtaactttatttaaaatgatttttaacattatgagagactgctcagattctaagttgttggccttgtgtgtgtgtttttttttaagttctcatcattattacatagactgtgatgtatctttactggaaatgagcccaagcacacatgcatggcatttgttccacaggagggcatccctggggatgtggctggagcatgagccagctctgtcccaggatggtcccagcggatgctgccaggggcagtgaagtgtttaggtgaaggacaagtaggtaagaggacgccttcaggcaccacagataagcctgaaacagcctctccaagggttttcaccttagcaacaatgggagctgtgggagtgattttggccacactgtcaacatttgttagaaccagtcttttgaaagaaaagtatttccaacttgtcacttgccagtcactccgttttgcaaaaggtggcccttcactgtccattccaaatagcccacacgtgctctctgctggattctaaattatgtgaattttgccatattaaatcttcctcatttatactattatttgttacgttcaatcagaatccccgaaacctcctataaagcttagctgccccttctgaggatgctgagaacggtgtctttctttataaatgcaaatggctaccgttttacaataaaattttgcatgtgccattggtgagtacgtttttgaagagggagaagcgcccctccactgtagaccttatgaggtaaggctgcgagtgaagacctagcagaacaatccaggttggaaagaaacgaagtctcacacagggatctgaggatcctaggatggctctgtcccctcgcccagtggtctggggaagtcgccctccattgtgggggttcttggagctcctgacacccagccacggagtttcaagtacagcttgagatgccagcagggaacagtgccctaggattaagggtaaggcacaccttatttttatccaacatgcctgtgtcccagcacgtgggcagtgctcccatgggtgcggctgctgcagagagcactgcaggggccacttctagtaggcacagaagacgagtttgtggcctcgactgcaggtctaacgcaggaaccctctgccttatggcttcccagcctgcatggggtccccctagggcagcccagggcacctaaagatggctccaagcgttagaaagttcttggtattgagctgcagccagcctgctatgtccctgggagtcacagattaggtctaatcattcctttgaagagtgtggcccaggcaccagaagtccctagttagagaacacgggtcccctgacagttttggaaggttcagtcttagtagatgaggcagtgtaggtagaataggaactgcgttaagactgagaaccagacctagaaagtcagtct

SEQ ID NO: 453206 - DNA, 3046 bp, Homo sapiens
ggaggagggctgccctgaagaaagatggcctccgcgagaggaggaaccggaagcgtgggtctggcggctgcaccggttcgcggtcggcgcgagaacaagcagggtggcgcgggtccgggcatgaagctgggccgggccgtgctgggcctgctgctgctggcgccgtccgtggtgcaggcggtggagcccatcagcctgggactggccctggccggcgtcctcaccggctacatctacccgcgtctctactgcctcttcgccgagtgctgcgggcagaagcggagccttagccgggaggcactgcagaaggatctggacgacaacctctttggacagcatcttgcaaagaaaatcatcttaaatgccgtgtttggtttcataaacaacccaaagcccaagaaacctctcacgctctccctgcacgggtggacaggcaccggcaaaaatttcgtcagcaagatcatcgcagagaatatttacgagggtggtctgaacagtgactatgtccacctgtttgtggccacattgcactttccacatgcttcaaacatcaccttgtacaaggatcagttacagttgtggattcgaggcaacgtgagtgcctgtgcgaggtccatcttcatatttgatgaaatggataagatgcatgcaggcctcatagatgccatcaagcctttcctcgactattatgacctggtggatggggtctcctaccagaaagccatgttcatatttctcagcaatgctggagcagaaaggatcacagatgtggctttggatttctggaggagtggaaagcagagggaagacatcaagctcaaagacattgaacacgcgttgtctgtgtcggttttcaataacaagaacagtgagtagggccatccaccgccagtcccatctggttcctaatcctgcaccctaagtgttaaaagcatcagggtcactgtcagcatcacctgggagctgggtagaaagaaatgcagattctcagtccccttccgagtcatgaggggaatctttgctgatgaactccaggtggcttctggcacagcagcttaattgaccggaacctcattgattattttgttcccttcctccccctggaatacaaacacctaaaaatgtgtatccgagtggaaatgcagtcccgaggctatgaaattgatgaagacattgtaagcagagtggctgaggagatgacatttttccccaaagaggagagagttttctcagataaaggctgcaaaacggtgttcaccaagttagattattactacgatgattgacagtcatgattggcagccggagtcactgcctggagttggaaaagaaacaacactcagtccttccacacttccacccccagctcctttccctggaagaggaatccagtgaatgttcctgtttgatgtgacaggaattctccctggcattgtttccaccccctggtgcctgcaggccacccagggaccacgggcgaggacgtgaagcctcccgaacacgcacagaaggaaggagccagctcccagcccactcatcgcagggctcatgattttttacaaattatgttttaattccaagtgtttctgtttcaaggaaggatgaataagttttattgaaaatgtggtaactttatttaaaatgatttttaacattatgagagactgctcagattctaagttgttggccttgtgtgtgtgtttttttttaagttctcatcattattacatagactgtgatgtatctttactggaaatgagcccaagcacacatgcatggcatttgttccacaggagggcatccctggggatgtggctggagcatgagccagctctgtcccaggatggtcccagcggatgctgccaggggcagtgaagtgtttaggtgaaggacaagtaggtaagaggacgccttcaggcaccacagataagcctgaaacagcctctccaagggttttcaccttagcaacaatgggagctgtgggagtgattttggccacactgtcaacatttgttagaaccagtcttttgaaagaaaagtatttccaacttgtcacttgccagtcactccgttttgcaaaaggtggcccttcactgtccattccaaatagcccacacgtgctctctgctggattctaaattatgtgaattttgccatattaaatcttcctcatttatactattatttgttacgttcaatcagaatccccgaaacctcctataaagcttagctgccccttctgaggatgctgagaacggtgtctttctttataaatgcaaatggctaccgttttacaataaaattttgcatgtgccattggtgagtacgtttttgaagagggagaagcgcccctccactgtagaccttatgaggtaaggctgcgagtgaagacctagcagaacaatccaggttggaaagaaacgaagtctcacacagggatctgaggatcctaggatggctctgtcccctcgcccagtggtctggggaagtcgccctccattgtgggggttcttggagctcctgacacccagccacggagtttcaagtacagcttgagatgccagcagggaacagtgccctaggattaagggtaaggcacaccttatttttatccaacatgcctgtgtcccagcacgtgggcagtgctcccatgggtgcggctgctgcagagagcactgcaggggccacttctagtaggcacagaagacgagtttgtggcctcgactgcaggtctaacgcaggaaccctctgccttatggcttcccagcctgcatggggtccccctagggcagcccagggcacctaaagatggctccaagcgttagaaagttcttggtattgagctgcagccagcctgctatgtccctgggagtcacagattaggtctaatcattcctttgaagagtgtggcccaggcaccagaagtccctagttagagaacacgggtcccctgacagttttggaaggttcagtcttagtagatgaggcagtgtaggtagaataggaactgcgttaagactgagaaccagacctagaaagtcagtct

SEQ ID NO: 453207 - DNA, 3073 bp, Homo sapiens
ccctggccataggctccactctgtcagtcagccacacatttattgagtaccagttgtgtgcaaagcactgttgggcatgaaaagcattaacccagtgaatgaggaggagcttgggttggggacggagccccagaattacatggcagaccagaagggaatcagctcagtagaagacacgcatgggctcgtgggcgacgcagtgtgtgctgtgtcatctggggctgggaggaagtgtcctgggtcaggagttccaggagcccaggaggagtggacgggtcagtgcagagccagcccgcattcaggggagaaaacacggccaaggccaggccttcacggggagcccagcgtgggctgcacatctgcactctccaggctagttttggtgcccacatgctctgcagggtctgggcactgtggcagcggcagcaggcttccctgttgctagtccagctgctgaaactccagggagagtcaaaaagttcccaaatacagaggcgtggctggtagtccttcccgggaattcttcttgcttcccgcctgtggaactctgccttccccactctgcctctctgcttgttcctgggccccaggacctctttcccatcttcgatctcttaagtcataccttgggaggcctcccccagcccgccgtgtaaagagggctgtcacagcttctgctgtcacagaagcattacaatgtgcaggtgcctgttaacatctgccttccccactgatctggagctccacaagggagagggcacacccagtaggtatgtgtgggatggataggagggtggatgacacccagtagatgtgtatgggatggataggagggtggatgacacccagtaggtgtgtatgggatggatgggagggtgggtgacccctagtagatgtggggggggtgggtgggtgacccccagtaggtgtgtgtggcatggataggtgacccccagtagacgtttgtgggacggatgggagggtaggtaagtgacccccaggaggcgtctatagggcaggtgggtggatgtggatgaacagcaccttgtttcttcttcccaggtggcttctggcacagcagcttaattgaccggaacctcattgattattttgttcccttcctccccctggaatacaaacacctaaaaatgtgtatccgagtggaaatgcagtcccgaggctatgaaattgatgaagacattgtaagcagagtggctgaggagatgacatttttccccaaagaggagagagttttctcagataaaggctgcaaaacggtgttcaccaagttagattattactacgatgattgacagtcatgattggcagccggagtcactgcctggagttggaaaagaaacaacactcagtccttccacacttccacccccagctcctttccctggaagaggaatccagtgaatgttcctgtttgatgtgacaggaattctccctggcattgtttccaccccctggtgcctgcaggccacccagggaccacgggcgaggacgtgaagcctcccgaacacgcacagaaggaaggagccagctcccagcccactcatcgcagggctcatgattttttacaaattatgttttaattccaagtgtttctgtttcaaggaaggatgaataagttttattgaaaatgtggtaactttatttaaaatgatttttaacattatgagagactgctcagattctaagttgttggccttgtgtgtgtgtttttttttaagttctcatcattattacatagactgtgatgtatctttactggaaatgagcccaagcacacatgcatggcatttgttccacaggagggcatccctggggatgtggctggagcatgagccagctctgtcccaggatggtcccagcggatgctgccaggggcagtgaagtgtttaggtgaaggacaagtaggtaagaggacgccttcaggcaccacagataagcctgaaacagcctctccaagggttttcaccttagcaacaatgggagctgtgggagtgattttggccacactgtcaacatttgttagaaccagtcttttgaaagaaaagtatttccaacttgtcacttgccagtcactccgttttgcaaaaggtggcccttcactgtccattccaaatagcccacacgtgctctctgctggattctaaattatgtgaattttgccatattaaatcttcctcatttatactattatttgttacgttcaatcagaatccccgaaacctcctataaagcttagctgccccttctgaggatgctgagaacggtgtctttctttataaatgcaaatggctaccgttttacaataaaattttgcatgtgccattggtgagtacgtttttgaagagggagaagcgcccctccactgtagaccttatgaggtaaggctgcgagtgaagacctagcagaacaatccaggttggaaagaaacgaagtctcacacagggatctgaggatcctaggatggctctgtcccctcgcccagtggtctggggaagtcgccctccattgtgggggttcttggagctcctgacacccagccacggagtttcaagtacagcttgagatgccagcagggaacagtgccctaggattaagggtaaggcacaccttatttttatccaacatgcctgtgtcccagcacgtgggcagtgctcccatgggtgcggctgctgcagagagcactgcaggggccacttctagtaggcacagaagacgagtttgtggcctcgactgcaggtctaacgcaggaaccctctgccttatggcttcccagcctgcatggggtccccctagggcagcccagggcacctaaagatggctccaagcgttagaaagttcttggtattgagctgcagccagcctgctatgtccctgggagtcacagattaggtctaatcattcctttgaagagtgtggcccaggcaccagaagtccctagttagagaacacgggtcccctgacagttttggaaggttcagtcttagtagatgaggcagtgtaggtagaataggaactgcgttaagactgagaaccagacctagaaagtcagtct

SEQ ID NO: 453208 - DNA, 2789 bp, Homo sapiens
aggtcgggtcagaagttccagaagcccagaaggagttgaacgggtcaggtcagagccagccgtcattcagggaagaaaacacgtcccagggccaaggggtgcccacatgctctgcagggtctgggcactgtggcagcggcagcaggcttccctgttgctagtccagctgctgaaactccagggagagtcaaaaagttcccaaatacagaggcgtggctggtagtccttcccgggaattcttcttgcttcccgcctgtggaactctgccttccccactctgcctctctgcttgttcctgggccccaggacctctttcccatcttcgatctcttaagtcataccttgggaggcctcccccagcccgccgtgtaaagagggctgtcacagcttctgctgtcacagaagcattacaatgtgcaggtgcctgttaacatctgccttccccactgatctggagctccacaagggagagggcacacccagtaggtatgtgtgggatggataggagggtggatgacacccagtagatgtgtatgggatggataggagggtggatgacacccagtaggtgtgtatgggatggatgggagggtgggtgacccctagtagatgtggggggggtgggtgggtgacccccagtaggtgtgtgtggcatggataggtgacccccagtagacgtttgtgggacggatgggagggtaggtaagtgacccccaggaggcgtctatagggcaggtgggtggatgtggatgaacagcaccttgtttcttcttcccaggtggcttctggcacagcagcttaattgaccggaacctcattgattattttgttcccttcctccccctggaatacaaacacctaaaaatgtgtatccgagtggaaatgcagtcccgaggctatgaaattgatgaagacattgtaagcagagtggctgaggagatgacatttttccccaaagaggagagagttttctcagataaaggctgcaaaacggtgttcaccaagttagattattactacgatgattgacagtcatgattggcagccggagtcactgcctggagttggaaaagaaacaacactcagtccttccacacttccacccccagctcctttccctggaagaggaatccagtgaatgttcctgtttgatgtgacaggaattctccctggcattgtttccaccccctggtgcctgcaggccacccagggaccacgggcgaggacgtgaagcctcccgaacacgcacagaaggaaggagccagctcccagcccactcatcgcagggctcatgattttttacaaattatgttttaattccaagtgtttctgtttcaaggaaggatgaataagttttattgaaaatgtggtaactttatttaaaatgatttttaacattatgagagactgctcagattctaagttgttggccttgtgtgtgtgtttttttttaagttctcatcattattacatagactgtgatgtatctttactggaaatgagcccaagcacacatgcatggcatttgttccacaggagggcatccctggggatgtggctggagcatgagccagctctgtcccaggatggtcccagcggatgctgccaggggcagtgaagtgtttaggtgaaggacaagtaggtaagaggacgccttcaggcaccacagataagcctgaaacagcctctccaagggttttcaccttagcaacaatgggagctgtgggagtgattttggccacactgtcaacatttgttagaaccagtcttttgaaagaaaagtatttccaacttgtcacttgccagtcactccgttttgcaaaaggtggcccttcactgtccattccaaatagcccacacgtgctctctgctggattctaaattatgtgaattttgccatattaaatcttcctcatttatactattatttgttacgttcaatcagaatccccgaaacctcctataaagcttagctgccccttctgaggatgctgagaacggtgtctttctttataaatgcaaatggctaccgttttacaataaaattttgcatgtgccattggtgagtacgtttttgaagagggagaagcgcccctccactgtagaccttatgaggtaaggctgcgagtgaagacctagcagaacaatccaggttggaaagaaacgaagtctcacacagggatctgaggatcctaggatggctctgtcccctcgcccagtggtctggggaagtcgccctccattgtgggggttcttggagctcctgacacccagccacggagtttcaagtacagcttgagatgccagcagggaacagtgccctaggattaagggtaaggcacaccttatttttatccaacatgcctgtgtcccagcacgtgggcagtgctcccatgggtgcggctgctgcagagagcactgcaggggccacttctagtaggcacagaagacgagtttgtggcctcgactgcaggtctaacgcaggaaccctctgccttatggcttcccagcctgcatggggtccccctagggcagcccagggcacctaaagatggctccaagcgttagaaagttcttggtattgagctgcagccagcctgctatgtccctgggagtcacagattaggtctaatcattcctttgaagagtgtggcccaggcaccagaagtccctagttagagaacacgggtcccctgacagttttggaaggttcagtcttagtagatgaggcagtgtaggtagaataggaactgcgttaagactgagaaccagacctagaaagtcagtct

SEQ ID NO: 453209 - DNA, 595 bp, Homo sapiens
taagggataagatagaacaaaatccttttgagctctgtgcttttttgcataacttggtctaaaaaaaaagcaaaggttttaacatcttccttatctatgtgtttttgtcattttcataggcaaacaacaataagcagtggctagaaattgatctactcaagatcaagaagataacggcaattataacacagggctgcaagtctctgtcctctgaaatgtatgtaaagagctataccatccactacagtgagcagggagtggaatggaaaccatacaggctgaaatcctccatggtggacaagatttttgaaggaaatactaataccaaaggacatgtgaagaactttttcaaccccccaatcatttccaggtttatccgtgtcattcctaaaacatggaatcaaagtattgcacttcgcctggaactctttggctgtgatatttactagaattgaacattcaaaaacccctggaagagactctttaagacctcaaaccatttagaatgggcaatgtattttacgctgtgttaaatgttaacagttttccactatttctctttcttttctattagtgaataaaattttatacaaga

SEQ ID NO: 453210 - DNA, 7035 bp, Homo sapiens
caaacccctgccaggaaaagccccagaaaaagcggagggagtgagagccagaggctgctgctgccgtttgcaagaactgcaggggaggaggacgctgccacccacagcctctagagctcattgcagctgggacagcccggagtgtggttagcagctcggcaagcgctgcccaggtcctggggtggtggcagccagcgggagcaggaaaggaagcatgttcccaggctgcccacgcctctgggtcctggtggtcttgggcaccagctgggtaggctgggggagccaagggacagaagcggcacagctaaggcagttctacgtggctgctcagggcatcagttggagctaccgacctgagcccacaaactcaagtttgaatctttctgtaacttcctttaagaaaattgtctacagagagtatgaaccatattttaagaaagaaaaaccacaatctaccatttcaggacttcttgggcctactttatatgctgaagtcggagacatcataaaagttcactttaaaaataaggcagataagcccttgagcatccatcctcaaggaattaggtacagtaaattatcagaaggtgcttcttaccttgaccacacattccctgcagagaagatggacgacgctgtggctccaggccgagaatacacctatgaatggagtatcagtgaggacagtggacccacccatgatgaccctccatgcctcacacacatctattactcccatgaaaatctgatcgaggatttcaactcggggctgattgggcccctgcttatctgtaaaaaagggaccctaactgagggtgggacacagaagacgtttgacaagcaaatcgtgctactatttgctgtgtttgatgaaagcaagagctggagccagtcatcatccctaatgtacacagtcaatggatatgtgaatgggacaatgccagatataacagtttgtgcccatgaccacatcagctggcatctgctgggaatgagctcggggccagaattattctccattcatttcaacggccaggtcctggagcagaaccatcataaggtctcagccatcacccttgtcagtgctacatccactaccgcaaatatgactgtgggcccagagggaaagtggatcatatcttctctcaccccaaaacatttgcaagctgggatgcaggcttacattgacattaaaaactgcccaaagaaaaccaggaatcttaagaaaataactcgtgagcagaggcggcacatgaagaggtgggaatacttcattgctgcagaggaagtcatttgggactatgcacctgtaataccagcgaatatggacaaaaaatacaggtctcagcatttggataatttctcaaaccaaattggaaaacattataagaaagttatgtacacacagtacgaagatgagtccttcaccaaacatacagtgaatcccaatatgaaagaagatgggattttgggtcctattatcagagcccaggtcagagacacactcaaaatcgtgttcaaaaatatggccagccgcccctatagcatttaccctcatggagtgaccttctcgccttatgaagatgaagtcaactcttctttcacctcaggcaggaacaacaccatgatcagagcagttcaaccaggggaaacctatacttataagtggaacatcttagagtttgatgaacccacagaaaatgatgcccagtgcttaacaagaccatactacagtgacgtggacatcatgagagacatcgcctctgggctaataggactacttctaatctgtaagagcagatccctggacaggcgaggaatacagagggcagcagacatcgaacagcaggctgtgtttgctgtgtttgatgagaacaaaagctggtaccttgaggacaacatcaacaagttttgtgaaaatcctgatgaggtgaaacgtgatgaccccaagttttatgaatcaaacatcatgagcactatcaatggctatgtgcctgagagcataactactcttggattctgctttgatgacactgtccagtggcacttctgtagtgtggggacccagaatgaaattttgaccatccacttcactgggcactcattcatctatggaaagaggcatgaggacaccttgaccctcttccccatgcgtggagaatctgtgacggtcacaatggataatgttggaacttggatgttaacttccatgaattctagtccaagaagcaaaaagctgaggctgaaattcagggatgttaaatgtatcccagatgatgatgaagactcatatgagatttttgaacctccagaatctacagtcatggctacacggaaaatgcatgatcgtttagaacctgaagatgaagagagtgatgctgactatgattaccagaacagactggctgcagcattaggaattaggtcattccgaaactcatcattgaaccaggaagaagaagagttcaatcttactgccctagctctggagaatggcactgaattcgtttcttcgaacacagatataattgttggttcaaattattcttccccaagtaatattagtaagttcactgtcaataaccttgcagaacctcagaaagccccttctcaccaacaagccaccacagctggttccccactgagacacctcattggcaagaactcagttctcaattcttccacagcagagcattccagcccatattctgaagaccctatagaggatcctctacagccagatgtcacagggatacgtctactttcacttggtgctggagaattcaaaagtcaagaacatgctaagcataagggacccaaggtagaaagagatcaagcagcaaagcacaggttctcctggatgaaattactagcacataaagttgggagacacctaagccaagacactggttctccttccggaatgaggccctgggaggaccttcctagccaagacactggttctccttccagaatgaggccctggaaggaccctcctagtgatctgttactcttaaaacaaagtaactcatctaagattttggttgggagatggcatttggcttctgagaaaggtagctatgaaataatccaagatactgatgaagacacagctgttaacaattggctgatcagcccccagaatgcctcacgtgcttggggagaaagcacccctcttgccaacaagcctggaaagcagagtggccacccaaagtttcctagagttagacataaatctctacaagtaagacaggatggaggaaagagtagactgaagaaaagccagtttctcattaagacacgaaaaaagaaaaaagagaagcacacacaccatgctcctttatctccgaggacctttcaccctctaagaagtgaagcctacaacacattttcagaaagaagacttaagcattcgttggtgcttcataaatccaatgaaacatctcttcccacagacctcaatcagacattgccctctatggattttggctggatagcctcacttcctgaccataatcagaattcctcaaatgacactggtcaggcaagctgtcctccaggtctttatcagacagtgcccccagaggaacactatcaaacattccccattcaagaccctgatcaaatgcactctacttcagaccccagtcacagatcctcttctccagagctcagtgaaatgcttgagtatgaccgaagtcacaagtccttccccacagatataagtcaaatgtccccttcctcagaacatgaagtctggcagacagtcatctctccagacctcagccaggtgaccctctctccagaactcagccagacaaacctctctccagacctcagccacacgactctctctccagaactcattcagagaaacctttccccagccctcggtcagatgcccatttctccagacctcagccatacaaccctttctccagacctcagccatacaaccctttctttagacctcagccagacaaacctctctccagaactcagtcagacaaacctttctccagccctcggtcagatgcccctttctccagacctcagccatacaaccctttctctagacttcagccagacaaacctctctccagaactcagccatatgactctctctccagaactcagtcagacaaacctttccccagccctcggtcagatgcccatttctccagacctcagccatacaaccctttctctagacttcagccagacaaacctctctccagaactcagtcaaacaaacctttccccagccctcggtcagatgcccctttctccagaccccagccatacaaccctttctctagacctcagccagacaaacctctctccagaactcagtcagacaaacctttccccagacctcagtgagatgcccctctttgcagatctcagtcaaattccccttaccccagacctcgaccagatgacactttctccagaccttggtgagacagatctttccccaaactttggtcagatgtccctttccccagacctcagccaggtgactctctctccagacatcagtgacaccacccttctcccggatctcagccagatatcacctcctccagaccttgatcagatattctacccttctgaatctagtcagtcattgcttcttcaagaatttaatgagtcttttccttatccagaccttggtcagatgccatctccttcatctcctactctcaatgatacttttctatcaaaggaatttaatccactggttatagtgggcctcagtaaagatggtacagattacattgagatcattccaaaggaagaggtccagagcagtgaagatgactatgctgaaattgattatgtgccctatgatgacccctacaaaactgatgttaggacaaacatcaactcctccagagatcctgacaacattgcagcatggtacctccgcagcaacaatggaaacagaagaaattattacattgctgctgaagaaatatcctgggattattcagaatttgtacaaagggaaacagatattgaagactctgatgatattccagaagataccacatataagaaagtagtttttcgaaagtacctcgacagcacttttaccaaacgtgatcctcgaggggagtatgaagagcatctcggaattcttggtcctattatcagagctgaagtggatgatgttatccaagttcgttttaaaaatttagcatccagaccgtattctctacatgcccatggactttcctatgaaaaatcatcagagggaaagacttatgaagatgactctcctgaatggtttaaggaagataatgctgttcagccaaatagcagttatacctacgtatggcatgccactgagcgatcagggccagaaagtcctggctctgcctgtcgggcttgggcctactactcagctgtgaacccagaaaaagatattcactcaggcttgataggtcccctcctaatctgccaaaaaggaatactacataaggacagcaacatgcctgtggacatgagagaatttgtcttactatttatgacctttgatgaaaagaagagctggtactatgaaaagaagtcccgaagttcttggagactcacatcctcagaaatgaaaaaatcccatgagtttcacgccattaatgggatgatctacagcttgcctggcctgaaaatgtatgagcaagagtgggtgaggttacacctgctgaacataggcggctcccaagacattcacgtggttcactttcacggccagaccttgctggaaaatggcaataaacagcaccagttaggggtctggccccttctgcctggttcatttaaaactcttgaaatgaaggcatcaaaacctggctggtggctcctaaacacagaggttggagaaaaccagagagcagggatgcaaacgccatttcttatcatggacagagactgtaggatgccaatgggactaagcactggtatcatatctgattcacagatcaaggcttcagagtttctgggttactgggagcccagattagcaagattaaacaatggtggatcttataatgcttggagtgtagaaaaacttgcagcagaatttgcctctaaaccttggatccaggtggacatgcaaaaggaagtcataatcacagggatccagacccaaggtgccaaacactacctgaagtcctgctataccacagagttctatgtagcttacagttccaaccagatcaactggcagatcttcaaagggaacagcacaaggaatgtgatgtattttaatggcaattcagatgcctctacaataaaagagaatcagtttgacccacctattgtggctagatatattaggatctctccaactcgagcctataacagacctacccttcgattggaactgcaaggttgtgaggtaaatggatgttccacacccctgggtatggaaaatggaaagatagaaaacaagcaaatcacagcttcttcgtttaagaaatcttggtggggagattactgggaacccttccgtgcccgtctgaatgcccagggacgtgtgaatgcctggcaagccaaggcaaacaacaataagcagtggctagaaattgatctactcaagatcaagaagataacggcaattataacacagggctgcaagtctctgtcctctgaaatgtatgtaaagagctataccatccactacagtgagcagggagtggaatggaaaccatacaggctgaaatcctccatggtggacaagatttttgaaggaaatactaataccaaaggacatgtgaagaactttttcaaccccccaatcatttccaggtttatccgtgtcattcctaaaacatggaatcaaagtattgcacttcgcctggaactctttggctgtgatatttactagaattgaacattcaaaaacccctggaagagactctttaagacctcaaaccatttagaatgggcaatgtattttacgctgtgttaaatgttaacagttttccactatttctctttcttttctattagtgaataaaattttatacaaga

SEQ ID NO: 453211 - DNA, 6983 bp, Homo sapiens
caaacccctgccaggaaaagccccagaaaaagcggagggagtgagagccagaggctgctgctgccgtttgcaagaactgcaggggaggaggacgctgccacccacagcctctagagctcattgcagctgggacagcccggagtgtggttagcagctcggcaagcgctgcccaggtcctggggtggtggcagccagcgggagcaggaaaggaagcatgttcccaggctgcccacgcctctgggtcctggtggtcttgggcaccagctgggtaggctgggggagccaagggacagaagcggcacagctaaggcagttctacgtggctgctcagggcatcagttggagctaccgacctgagcccacaaactcaagtttgaatctttctgtaacttcctttaagaaaattgtctacagagagtatgaaccatattttaagaaagaaaaaccacaatctaccatttcaggacttcttgggcctactttatatgctgaagtcggagacatcataaaagttcactttaaaaataaggcagataagcccttgagcatccatcctcaaggaattaggtacagtaaattatcagaaggtgcttcttaccttgaccacacattccctgcagagaagatggacgacgctgtggctccaggccgagaatacacctatgaatggagtatcagtgaggacagtggacccacccatgatgaccctccatgcctcacacacatctattactcccatgaaaatctgatcgaggatttcaactcggggctgattgggcccctgcttatctgtaaaaaagggaccctaactgagggtgggacacagaagacgtttgacaagcaaatcgtgctactatttgctgtgtttgatgaaagcaagagctggagccagtcatcatccctaatgtacacagtcaatggatatgtgaatgggacaatgccagatataacagtttgtgcccatgaccacatcagctggcatctgctgggaatgagctcggggccagaattattctccattcatttcaacggccaggtcctggagcagaaccatcataaggtctcagccatcacccttgtcagtgctacatccactaccgcaaatatgactgtgggcccagagggaaagtggatcatatcttctctcaccccaaaacatttgcaagctgggatgcaggcttacattgacattaaaaactgcccaaagaaaaccaggaatcttaagaaaataactcgtgagcagaggcggcacatgaagaggtgggaatacttcattgctgcagaggaagtcatttgggactatgcacctgtaataccagcgaatatggacaaaaaatacaggtctcagcatttggataatttctcaaaccaaattggaaaacattataagaaagttatgtacacacagtacgaagatgagtccttcaccaaacatacagtgaatcccaatatgaaagaagatgggattttgggtcctattatcagagcccaggtcagagacacactcaaaatcgtgttcaaaaatatggccagccgcccctatagcatttaccctcatggagtgaccttctcgccttatgaagatgaagtcaactcttctttcacctcaggcaggaacaacaccatgatcagagcagttcaaccaggggaaacctatacttataagtggaacatcttagagtttgatgaacccacagaaaatgatgcccagtgcttaacaagaccatactacagtgacgtggacatcatgagagacatcgcctctgggctaataggactacttctaatctgtaagagcagatccctggacaggcgaggaatacagagggcagcagacatcgaacagcaggctgtgtttgctgtgtttgatgagaacaaaagctggtaccttgaggacaacatcaacaagttttgtgaaaatcctgatgaggtgaaacgtgatgaccccaagttttatgaatcaaacatcatgagcactatcaatggctatgtgcctgagagcataactactcttggattctgctttgatgacactgtccagtggcacttctgtagtgtggggacccagaatgaaattttgaccatccacttcactgggcactcattcatctatggaaagaggcatgaggacaccttgaccctcttccccatgcgtggagaatctgtgacggtcacaatggataatgttggaacttggatgttaacttccatgaattctagtccaagaagcaaaaagctgaggctgaaattcagggatgttaaatgtatcccagatgatgatgaagactcatatgagatttttgaacctccagaatctacagtcatggctacacggaaaatgcatgatcgtttagaacctgaagatgaagagagtgatgctgactatgattaccagaacagactggctgcagcattaggaattaggtcattccgaaactcatcattgaaccaggaagaagaagagttcaatcttactgccctagctctggagaatggcactgaattcgtttcttcgaacacagatataattgttggttcaaattattcttccccaagtaatattagtaagttcactgtcaataaccttgcagaacctcagaaagccccttctcaccaacaagccaccacagctggttccccactgagacacctcattggcaagaactcagttctcaattcttccacagcagagcattccagcccatattctgaagaccctatagaggatcctctacagccagatgtcacagggatacgtctactttcacttggtgctggagaattcaaaagtcaagaacatgctaagcataagggacccaaggtagaaagagatcaagcagcaaagcacaggttctcctggatgaaattactagcacataaagttgggagacacctaagccaagacactggttctccttccggaatgaggccctgggaggaccttcctagccaagacactggttctccttccagaatgaggccctggaaggaccctcctagtgatctgttactcttaaaacaaagtaactcatctaagattttggttgggagatggcatttggcttctgagaaaggtagctatgaaataatccaagatactgatgaagacacagctgttaacaattggctgatcagcccccagaatgcctcacgtgcttggggagaaagcacccctcttgccaacaagcctggaaagcagagtggccacccaaagtttcctagagttagacataaatctctacaagtaagacaggatggaggaaagagtagactgaagaaaagccagtttctcattaagacacgaaaaaagaaaaaagagaagcacacacaccatgctcctttatctccgaggacctttcaccctctaagaagtgaagcctacaacacattttcagaaagaagacttaagcattcgttggtgcttcataaatccaatgaaacatctcttcccacagacctcaatcagacattgccctctatggattttggctggatagcctcacttcctgaccataatcagaattcctcaaatgacactggtcaggcaagctgtcctccaggtctttatcagacagtgcccccagaggaacactatcaaacattccccattcaagaccctgatcaaatgcactctacttcagaccccagtcacagatcctcttctccagagctcagtgaaatgcttgagtatgaccgaagtcacaagtccttccccacagatataagtcaaatgtccccttcctcagaacatgaagtctggcagacagtcatctctccagacctcagccaggtgaccctctctccagaactcagccagacaaacctctctccagacctcagccacacgactctctctccagaactcattcagagaaacctttccccagccctcggtcagatgcccatttctccagacctcagccatacaaccctttctccagacctcagccatacaaccctttctttagacctcagccagacaaacctctctccagaactcagtcagacaaacctttctccagccctcggtcagatgcccctttctccagacctcagccatacaaccctttctctagacttcagccagacaaacctctctccagaactcagccatatgactctctctccagaactcagtcagacaaacctttccccagccctcggtcagatgcccatttctccagacctcagccatacaaccctttctctagacttcagccagacaaacctctctccagaactcagtcaaacaaacctttccccagccctcggtcagatgcccctttctccagaccccagccatacaaccctttctctagacctcagccagacaaacctctctccagaactcagtcagacaaacctttccccagacctcagtgagatgcccctctttgcagatctcagtcaaattccccttaccccagacctcgaccagatgacactttctccagaccttggtgagacagatctttccccaaactttggtcagatgtccctttccccagacctcagccaggtgactctctctccagacatcagtgacaccacccttctcccggatctcagccagatatcacctcctccagaccttgatcagatattctacccttctgaatctagtcagtcattgcttcttcaagaatttaatgagtcttttccttatccagaccttggtcagatgccatctccttcatctcctactctcaatgatacttttctatcaaaggaatttaatccactggttatagtgggcctcagtaaagatggtacagattacattgagatcattccaaaggaagaggtccagagcagtgaagatgactatgctgaaattgattatgtgccctatgatgacccctacaaaactgatgttaggacaaacatcaactcctccagagatcctgacaacattgcagcatggtacctccgcagcaacaatggaaacagaagaaattattacattgctgctgaagaaatatcctgggattattcagaatttgtacaaagggaaacagatattgaagactctgatgatattccagaagataccacatataagaaagggagtatgaagagcatctcggaattcttggtcctattatcagagctgaagtggatgatgttatccaagttcgttttaaaaatttagcatccagaccgtattctctacatgcccatggactttcctatgaaaaatcatcagagggaaagacttatgaagatgactctcctgaatggtttaaggaagataatgctgttcagccaaatagcagttatacctacgtatggcatgccactgagcgatcagggccagaaagtcctggctctgcctgtcgggcttgggcctactactcagctgtgaacccagaaaaagatattcactcaggcttgataggtcccctcctaatctgccaaaaaggaatactacataaggacagcaacatgcctgtggacatgagagaatttgtcttactatttatgacctttgatgaaaagaagagctggtactatgaaaagaagtcccgaagttcttggagactcacatcctcagaaatgaaaaaatcccatgagtttcacgccattaatgggatgatctacagcttgcctggcctgaaaatgtatgagcaagagtgggtgaggttacacctgctgaacataggcggctcccaagacattcacgtggttcactttcacggccagaccttgctggaaaatggcaataaacagcaccagttaggggtctggccccttctgcctggttcatttaaaactcttgaaatgaaggcatcaaaacctggctggtggctcctaaacacagaggttggagaaaaccagagagcagggatgcaaacgccatttcttatcatggacagagactgtaggatgccaatgggactaagcactggtatcatatctgattcacagatcaaggcttcagagtttctgggttactgggagcccagattagcaagattaaacaatggtggatcttataatgcttggagtgtagaaaaacttgcagcagaatttgcctctaaaccttggatccaggtggacatgcaaaaggaagtcataatcacagggatccagacccaaggtgccaaacactacctgaagtcctgctataccacagagttctatgtagcttacagttccaaccagatcaactggcagatcttcaaagggaacagcacaaggaatgtgatgtattttaatggcaattcagatgcctctacaataaaagagaatcagtttgacccacctattgtggctagatatattaggatctctccaactcgagcctataacagacctacccttcgattggaactgcaaggttgtgaggtaaatggatgttccacacccctgggtatggaaaatggaaagatagaaaacaagcaaatcacagcttcttcgtttaagaaatcttggtggggagattactgggaacccttccgtgcccgtctgaatgcccagggacgtgtgaatgcctggcaagccaaggcaaacaacaataagcagtggctagaaattgatctactcaagatcaagaagataacggcaattataacacagggctgcaagtctctgtcctctgaaatgtatgtaaagagctataccatccactacagtgagcagggagtggaatggaaaccatacaggctgaaatcctccatggtggacaagatttttgaaggaaatactaataccaaaggacatgtgaagaactttttcaaccccccaatcatttccaggtttatccgtgtcattcctaaaacatggaatcaaagtattgcacttcgcctggaactctttggctgtgatatttactagaattgaacattcaaaaacccctggaagagactctttaagacctcaaaccatttagaatgggcaatgtattttacgctgtgttaaatgttaacagttttccactatttctctttcttttctattagtgaataaaattttatacaaga

SEQ ID NO: 453212 - DNA, 6942 bp, Homo sapiens
caaacccctgccaggaaaagccccagaaaaagcggagggagtgagagccagaggctgctgctgccgtttgcaagaactgcaggggaggaggacgctgccacccacagcctctagagctcattgcagctgggacagcccggagtgtggttagcagctcggcaagcgctgcccaggtcctggggtggtggcagccagcgggagcaggaaaggaagcatgttcccaggctgcccacgcctctgggtcctggtggtcttgggcaccagctgggtaggctgggggagccaagggacagaagcggcacagctaaggcagttctacgtggctgctcagggcatcagttggagctaccgacctgagcccacaaactcaagtttgaatctttctgtaacttcctttaagaaaattgtctacagagagtatgaaccatattttaagaaagaaaaaccacaatctaccatttcaggacttcttgggcctactttatatgctgaagtcggagacatcataaaagttcactttaaaaataaggcagataagcccttgagcatccatcctcaaggaattaggtacagtaaattatcagaaggtgcttcttaccttgaccacacattccctgcagagaagatggacgacgctgtggctccaggccgagaatacacctatgaatggagtatcagtgaggacagtggacccacccatgatgaccctccatgcctcacacacatctattactcccatgaaaatctgatcgaggatttcaactcggggctgattgggcccctgcttatctgtaaaaaagggaccctaactgagggtgggacacagaagacgtttgacaagcaaatcgtgctactatttgctgtgtttgatgaaagcaagagctggagccagtcatcatccctaatgtacacagtcaatggatatgtgaatgggacaatgccagatataacagtttgtgcccatgaccacatcagctggcatctgctgggaatgagctcggggccagaattattctccattcatttcaacggccaggtcctggagcagaaccatcataaggtctcagccatcacccttgtcagtgctacatccactaccgcaaatatgactgtgggcccagagggaaagtggatcatatcttctctcaccccaaaacatttgcaagctgggatgcaggcttacattgacattaaaaactgcccaaagaaaaccaggaatcttaagaaaataactcgtgagcagaggcggcacatgaagaggtgggaatacttcattgctgcagaggaagtcatttgggactatgcacctgtaataccagcgaatatggacaaaaaatacaggtctcagcatttggataatttctcaaaccaaattggaaaacattataagaaagttatgtacacacagtacgaagatgagtccttcaccaaacatacagtgaatcccaatatgaaagaagatgggattttgggtcctattatcagagcccaggtcagagacacactcaaaatcgtgttcaaaaatatggccagccgcccctatagcatttaccctcatggagtgaccttctcgccttatgaagatgaagtcaactcttctttcacctcaggcaggaacaacaccatgatcagagcagttcaaccaggggaaacctatacttataagtggaacatcttagagtttgatgaacccacagaaaatgatgcccagtgcttaacaagaccatactacagtgacgtggacatcatgagagacatcgcctctgggctaataggactacttctaatctgtaagagcagatccctggacaggcgaggaatacagagggcagcagacatcgaacagcaggctgtgtttgctgtgtttgatgagaacaaaagctggtaccttgaggacaacatcaacaagttttgtgaaaatcctgatgaggtgaaacgtgatgaccccaagttttatgaatcaaacatcatgagcactatcaatggctatgtgcctgagagcataactactcttggattctgctttgatgacactgtccagtggcacttctgtagtgtggggacccagaatgaaattttgaccatccacttcactgggcactcattcatctatggaaagaggcatgaggacaccttgaccctcttccccatgcgtggagaatctgtgacggtcacaatggataatgttggaacttggatgttaacttccatgaattctagtccaagaagcaaaaagctgaggctgaaattcagggatgttaaatgtatcccagatgatgatgaagactcatatgagatttttgaacctccagaatctacagtcatggctacacggaaaatgcatgatcgtttagaacctgaagatgaagagagtgatgctgactatgattaccagaacagactggctgcagcattaggaattaggtcattccgaaactcatcattgaaccaggaagaagaagagttcaatcttactgccctagctctggagaatggcactgaattcgtttcttcgaacacagatataattgttggttcaaattattcttccccaagtaatattagtaagttcactgtcaataaccttgcagaacctcagaaagccccttctcaccaacaagccaccacagctggttccccactgagacacctcattggcaagaactcagttctcaattcttccacagcagagcattccagcccatattctgaagaccctatagaggatcctctacagccagatgtcacagggatacgtctactttcacttggtgctggagaattcaaaagtcaagaacatgctaagcataagggacccaaggtagaaagagatcaagcagcaaagcacaggttctcctggatgaaattactagcacataaagttgggagacacctaagccaagacactggttctccttccggaatgaggccctgggaggaccttcctagccaagacactggttctccttccagaatgaggccctggaaggaccctcctagtgatctgttactcttaaaacaaagtaactcatctaagattttggttgggagatggcatttggcttctgagaaaggtagctatgaaataatccaagatactgatgaagacacagctgttaacaattggctgatcagcccccagaatgcctcacgtgcttggggagaaagcacccctcttgccaacaagcctggaaagcagagtggccacccaaagtttcctagagttagacataaatctctacaagtaagacaggatggaggaaagagtagactgaagaaaagccagtttctcattaagacacgaaaaaagaaaaaagagaagcacacacaccatgctcctttatctccgaggacctttcaccctctaagaagtgaagcctacaacacattttcagaaagaagacttaagcattcgttggtgcttcataaatccaatgaaacatctcttcccacagacctcaatcagacattgccctctatggattttggctggatagcctcacttcctgaccataatcagaattcctcaaatgacactggtcaggcaagctgtcctccaggtctttatcagacagtgcccccagaggaacactatcaaacattccccattcaagaccctgatcaaatgcactctacttcagaccccagtcacagatcctcttctccagagctcagtgaaatgcttgagtatgaccgaagtcacaagtccttccccacagatataagtcaaatgtccccttcctcagaacatgaagtctggcagacagtcatctctccagacctcagccaggtgaccctctctccagaactcagccagacaaacctctctccagacctcagccacacgactctctctccagaactcattcagagaaacctttccccagccctcggtcagatgcccatttctccagacctcagccatacaaccctttctccagacctcagccatacaaccctttctttagacctcagccagacaaacctctctccagaactcagtcagacaaacctttctccagccctcggtcagatgcccctttctccagacctcagccatacaaccctttctctagacttcagccagacaaacctctctccagaactcagccatatgactctctctccagaactcagtcagacaaacctttccccagccctcggtcagatgcccatttctccagacctcagccatacaaccctttctctagacttcagccagacaaacctctctccagaactcagtcaaacaaacctttccccagccctcggtcagatgcccctttctccagaccccagccatacaaccctttctctagacctcagccagacaaacctctctccagaactcagtcagacaaacctttccccagacctcagtgagatgcccctctttgcagatctcagtcaaattccccttaccccagacctcgaccagatgacactttctccagaccttggtgagacagatctttccccaaactttggtcagatgtccctttccccagacctcagccaggtgactctctctccagacatcagtgacaccacccttctcccggatctcagccagatatcacctcctccagaccttgatcagatattctacccttctgaatctagtcagtcattgcttcttcaagaatttaatgagtcttttccttatccagaccttggtcagatgccatctccttcatctcctactctcaatgatacttttctatcaaaggaatttaatccactggttatagtgggcctcagtaaagatggtacagattacattgagatcattccaaaggaagaggtccagagcagtgaagatgactatgctgaaattgattatgtgccctatgatgacccctacacatggtacctccgcagcaacaatggaaacagaagaaattattacattgctgctgaagaaatatcctgggattattcagaatttgtacaaagggaaacagatattgaagactctgatgatattccagaagataccacatataagaaagtagtttttcgaaagtacctcgacagcacttttaccaaacgtgatcctcgaggggagtatgaagagcatctcggaattcttggtcctattatcagagctgaagtggatgatgttatccaagttcgttttaaaaatttagcatccagaccgtattctctacatgcccatggactttcctatgaaaaatcatcagagggaaagacttatgaagatgactctcctgaatggtttaaggaagataatgctgttcagccaaatagcagttatacctacgtatggcatgccactgagcgatcagggccagaaagtcctggctctgcctgtcgggcttgggcctactactcagctgtgaacccagaaaaagatattcactcaggcttgataggtcccctcctaatctgccaaaaaggaatactacataaggacagcaacatgcctgtggacatgagagaatttgtcttactatttatgacctttgatgaaaagaagagctggtactatgaaaagaagtcccgaagttcttggagactcacatcctcagaaatgaaaaaatcccatgagtttcacgccattaatgggatgatctacagcttgcctggcctgaaaatgtatgagcaagagtgggtgaggttacacctgctgaacataggcggctcccaagacattcacgtggttcactttcacggccagaccttgctggaaaatggcaataaacagcaccagttaggggtctggccccttctgcctggttcatttaaaactcttgaaatgaaggcatcaaaacctggctggtggctcctaaacacagaggttggagaaaaccagagagcagggatgcaaacgccatttcttatcatggacagagactgtaggatgccaatgggactaagcactggtatcatatctgattcacagatcaaggcttcagagtttctgggttactgggagcccagattagcaagattaaacaatggtggatcttataatgcttggagtgtagaagtggacatgcaaaaggaagtcataatcacagggatccagacccaaggtgccaaacactacctgaagtcctgctataccacagagttctatgtagcttacagttccaaccagatcaactggcagatcttcaaagggaacagcacaaggaatgtgatgtattttaatggcaattcagatgcctctacaataaaagagaatcagtttgacccacctattgtggctagatatattaggatctctccaactcgagcctataacagacctacccttcgattggaactgcaaggttgtgaggtaaatggatgttccacacccctgggtatggaaaatggaaagatagaaaacaagcaaatcacagcttcttcgtttaagaaatcttggtggggagattactgggaacccttccgtgcccgtctgaatgcccagggacgtgtgaatgcctggcaagccaaggcaaacaacaataagcagtggctagaaattgatctactcaagatcaagaagataacggcaattataacacagggctgcaagtctctgtcctctgaaatgtatgtaaagagctataccatccactacagtgagcagggagtggaatggaaaccatacaggctgaaatcctccatggtggacaagatttttgaaggaaatactaataccaaaggacatgtgaagaactttttcaaccccccaatcatttccaggtttatccgtgtcattcctaaaacatggaatcaaagtattgcacttcgcctggaactctttggctgtgatatttactagaattgaacattcaaaaacccctggaagagactctttaagacctcaaaccatttagaatgggcaatgtattttacgctgtgttaaatgttaacagttttccactatttctctttcttttctattagtgaataaaattttatacaaga

SEQ ID NO: 453213 - DNA, 6930 bp, Homo sapiens
caaacccctgccaggaaaagccccagaaaaagcggagggagtgagagccagaggctgctgctgccgtttgcaagaactgcaggggaggaggacgctgccacccacagcctctagagctcattgcagctgggacagcccggagtgtggttagcagctcggcaagcgctgcccaggtcctggggtggtggcagccagcgggagcaggaaaggaagcatgttcccaggctgcccacgcctctgggtcctggtggtcttgggcaccagctgggtaggctgggggagccaagggacagaagcggcacagctaaggcagttctacgtggctgctcagggcatcagttggagctaccgacctgagcccacaaactcaagtttgaatctttctgtaacttcctttaagaaaattgtctacagagagtatgaaccatattttaagaaagaaaaaccacaatctaccatttcaggacttcttgggcctactttatatgctgaagtcggagacatcataaaagttcactttaaaaataaggcagataagcccttgagcatccatcctcaaggaattaggtacagtaaattatcagaaggtgcttcttaccttgaccacacattccctgcagagaagatggacgacgctgtggctccaggccgagaatacacctatgaatggagtatcagtgaggacagtggacccacccatgatgaccctccatgcctcacacacatctattactcccatgaaaatctgatcgaggatttcaactcggggctgattgggcccctgcttatctgtaaaaaagggaccctaactgagggtgggacacagaagacgtttgacaagcaaatcgtgctactatttgctgtgtttgatgaaagcaagagctggagccagtcatcatccctaatgtacacagtcaatggatatgtgaatgggacaatgccagatataacagtttgtgcccatgaccacatcagctggcatctgctgggaatgagctcggggccagaattattctccattcatttcaacggccaggtcctggagcagaaccatcataaggtctcagccatcacccttgtcagtgctacatccactaccgcaaatatgactgtgggcccagagggaaagtggatcatatcttctctcaccccaaaacatttgcaagctgggatgcaggcttacattgacattaaaaactgcccaaagaaaaccaggaatcttaagaaaataactcgtgagcagaggcggcacatgaagaggtgggaatacttcattgctgcagaggaagtcatttgggactatgcacctgtaataccagcgaatatggacaaaaaatacaggtctcagcatttggataatttctcaaaccaaattggaaaacattataagaaagttatgtacacacagtacgaagatgagtccttcaccaaacatacagtgaatcccaatatgaaagaagatgggattttgggtcctattatcagagcccaggtcagagacacactcaaaatcgtgttcaaaaatatggccagccgcccctatagcatttaccctcatggagtgaccttctcgccttatgaagatgaagtcaactcttctttcacctcaggcaggaacaacaccatgatcagagcagttcaaccaggggaaacctatacttataagtggaacatcttagagtttgatgaacccacagaaaatgatgcccagtgcttaacaagaccatactacagtgacgtggacatcatgagagacatcgcctctgggctaataggactacttctaatctgtaagagcagatccctggacaggcgaggaatacagagggcagcagacatcgaacagcaggctgtgtttgctgtgtttgatgagaacaaaagctggtaccttgaggacaacatcaacaagttttgtgaaaatcctgatgaggtgaaacgtgatgaccccaagttttatgaatcaaacatcatgagcactatcaatggctatgtgcctgagagcataactactcttggattctgctttgatgacactgtccagtggcacttctgtagtgtggggacccagaatgaaattttgaccatccacttcactgggcactcattcatctatggaaagaggcatgaggacaccttgaccctcttccccatgcgtggagaatctgtgacggtcacaatggataatgttggaacttggatgttaacttccatgaattctagtccaagaagcaaaaagctgaggctgaaattcagggatgttaaatgtatcccagatgatgatgaagactcatatgagatttttgaacctccagaatctacagtcatggctacacggaaaatgcatgatcgtttagaacctgaagatgaagagagtgatgctgactatgattaccagaacagactggctgcagcattaggaattaggtcattccgaaactcatcattgaaccaggaagaagaagagttcaatcttactgccctagctctggagaatggcactgaattcgtttcttcgaacacagatataattgttggttcaaattattcttccccaagtaatattagtaagttcactgtcaataaccttgcagaacctcagaaagccccttctcaccaacaagccaccacagctggttccccactgagacacctcattggcaagaactcagttctcaattcttccacagcagagcattccagcccatattctgaagaccctatagaggatcctctacagccagatgtcacagggatacgtctactttcacttggtgctggagaattcaaaagtcaagaacatgctaagcataagggacccaaggtagaaagagatcaagcagcaaagcacaggttctcctggatgaaattactagcacataaagttgggagacacctaagccaagacactggttctccttccggaatgaggccctggaaggaccctcctagtgatctgttactcttaaaacaaagtaactcatctaagattttggttgggagatggcatttggcttctgagaaaggtagctatgaaataatccaagatactgatgaagacacagctgttaacaattggctgatcagcccccagaatgcctcacgtgcttggggagaaagcacccctcttgccaacaagcctggaaagcagagtggccacccaaagtttcctagagttagacataaatctctacaagtaagacaggatggaggaaagagtagactgaagaaaagccagtttctcattaagacacgaaaaaagaaaaaagagaagcacacacaccatgctcctttatctccgaggacctttcaccctctaagaagtgaagcctacaacacattttcagaaagaagacttaagcattcgttggtgcttcataaatccaatgaaacatctcttcccacagacctcaatcagacattgccctctatggattttggctggatagcctcacttcctgaccataatcagaattcctcaaatgacactggtcaggcaagctgtcctccaggtctttatcagacagtgcccccagaggaacactatcaaacattccccattcaagaccctgatcaaatgcactctacttcagaccccagtcacagatcctcttctccagagctcagtgaaatgcttgagtatgaccgaagtcacaagtccttccccacagatataagtcaaatgtccccttcctcagaacatgaagtctggcagacagtcatctctccagacctcagccaggtgaccctctctccagaactcagccagacaaacctctctccagacctcagccacacgactctctctccagaactcattcagagaaacctttccccagccctcggtcagatgcccatttctccagacctcagccatacaaccctttctccagacctcagccatacaaccctttctttagacctcagccagacaaacctctctccagaactcagtcagacaaacctttctccagccctcggtcagatgcccctttctccagacctcagccatacaaccctttctctagacttcagccagacaaacctctctccagaactcagccatatgactctctctccagaactcagtcagacaaacctttccccagccctcggtcagatgcccatttctccagacctcagccatacaaccctttctctagacttcagccagacaaacctctctccagaactcagtcaaacaaacctttccccagccctcggtcagatgcccctttctccagaccccagccatacaaccctttctctagacctcagccagacaaacctctctccagaactcagtcagacaaacctttccccagacctcagtgagatgcccctctttgcagatctcagtcaaattccccttaccccagacctcgaccagatgacactttctccagaccttggtgagacagatctttccccaaactttggtcagatgtccctttccccagacctcagccaggtgactctctctccagacatcagtgacaccacccttctcccggatctcagccagatatcacctcctccagaccttgatcagatattctacccttctgaatctagtcagtcattgcttcttcaagaatttaatgagtcttttccttatccagaccttggtcagatgccatctccttcatctcctactctcaatgatacttttctatcaaaggaatttaatccactggttatagtgggcctcagtaaagatggtacagattacattgagatcattccaaaggaagaggtccagagcagtgaagatgactatgctgaaattgattatgtgccctatgatgacccctacacatggtacctccgcagcaacaatggaaacagaagaaattattacattgctgctgaagaaatatcctgggattattcagaatttgtacaaagggaaacagatattgaagactctgatgatattccagaagataccacatataagaaagtagtttttcgaaagtacctcgacagcacttttaccaaacgtgatcctcgaggggagtatgaagagcatctcggaattcttggtcctattatcagagctgaagtggatgatgttatccaagttcgttttaaaaatttagcatccagaccgtattctctacatgcccatggactttcctatgaaaaatcatcagagggaaagacttatgaagatgactctcctgaatggtttaaggaagataatgctgttcagccaaatagcagttatacctacgtatggcatgccactgagcgatcagggccagaaagtcctggctctgcctgtcgggcttgggcctactactcagctgtgaacccagaaaaagatattcactcaggcttgataggtcccctcctaatctgccaaaaaggaatactacataaggacagcaacatgcctgtggacatgagagaatttgtcttactatttatgacctttgatgaaaagaagagctggtactatgaaaagaagtcccgaagttcttggagactcacatcctcagaaatgaaaaaatcccatgagtttcacgccattaatgggatgatctacagcttgcctggcctgaaaatgtatgagcaagagtgggtgaggttacacctgctgaacataggcggctcccaagacattcacgtggttcactttcacggccagaccttgctggaaaatggcaataaacagcaccagttaggggtctggccccttctgcctggttcatttaaaactcttgaaatgaaggcatcaaaacctggctggtggctcctaaacacagaggttggagaaaaccagagagcagggatgcaaacgccatttcttatcatggacagagactgtaggatgccaatgggactaagcactggtatcatatctgattcacagatcaaggcttcagagtttctgggttactgggagcccagattagcaagattaaacaatggtggatcttataatgcttggagtgtagaaaaacttgcagcagaatttgcctctaaaccttggatccaggtggacatgcaaaaggaagtcataatcacagggatccagacccaaggtgccaaacactacctgaagtcctgctataccacagagttctatgtagcttacagttccaaccagatcaactggcagatcttcaaagggaacagcacaaggaatgtgatgtattttaatggcaattcagatgcctctacaataaaagagaatcagtttgacccacctattgtggctagatatattaggatctctccaactcgagcctataacagacctacccttcgattggaactgcaaggttgtgaggtaaatggatgttccacacccctgggtatggaaaatggaaagatagaaaacaagcaaatcacagcttcttcgtttaagaaatcttggtggggagattactgggaacccttccgtgcccgtctgaatgcccagggacgtgtgaatgcctggcaagccaaggcaaacaacaataagcagtggctagaaattgatctactcaagatcaagaagataacggcaattataacacagggctgcaagtctctgtcctctgaaatgtatgtaaagagctataccatccactacagtgagcagggagtggaatggaaaccatacaggctgaaatcctccatggtggacaagatttttgaaggaaatactaataccaaaggacatgtgaagaactttttcaaccccccaatcatttccaggtttatccgtgtcattcctaaaacatggaatcaaagtattgcacttcgcctggaactctttggctgtgatatttactagaattgaacattcaaaaacccctggaagagactctttaagacctcaaaccatttagaatgggcaatgtattttacgctgtgttaaatgttaacagttttccactatttctctttcttttctattagtgaataaaattttatacaaga

SEQ ID NO: 453214 - DNA, 3502 bp, Homo sapiens
caaacccctgccaggaaaagccccagaaaaagcggagggagtgagagccagaggctgctgctgccgtttgcaagaactgcaggggaggaggacgctgccacccacagcctctagagctcattgcagctgggacagcccggagtgtggttagcagctcggcaagcgctgcccaggtcctggggtggtggcagccagcgggagcaggaaaggaagcatgttcccaggctgcccacgcctctgggtcctggtggtcttgggcaccagctgggtaggctgggggagccaagggacagaagcggcacagctaaggcagttctacgtggctgctcagggcatcagttggagctaccgacctgagcccacaaactcaagtttgaatctttctgtaacttcctttaagaaaattgtctacagagagtatgaaccatattttaagaaagaaaaaccacaatctaccatttcaggacttcttgggcctactttatatgctgaagtcggagacatcataaaagttcactttaaaaataaggcagataagcccttgagcatccatcctcaaggaattaggtacagtaaattatcagaaggtgcttcttaccttgaccacacattccctgcagagaagatggacgacgctgtggctccaggccgagaatacacctatgaatggagtatcagtgaggacagtggacccacccatgatgaccctccatgcctcacacacatctattactcccatgaaaatctgatcgaggatttcaatcagtcaaacaaacctttccccagccctcggtcagatgcccctttctccagaccccagccatacaaccctttctctagacctcagccagacaaacctctctccagaactcagtcagacaaacctttccccagacctcagtgagatgcccctctttgcagatctcagtcaaattccccttaccccagacctcgaccagatgacactttctccagaccttggtgagacagatctttccccaaactttggtcagatgtccctttccccagacctcagccaggtgactctctctccagacatcagtgacaccacccttctcccggatctcagccagatatcacctcctccagaccttgatcagatattctacccttctgaatctagtcagtcattgcttcttcaagaatttaatgagtcttttccttatccagaccttggtcagatgccatctccttcatctcctactctcaatgatacttttctatcaaaggaatttaatccactggttatagtgggcctcagtaaagatggtacagattacattgagatcattccaaaggaagaggtccagagcagtgaagatgactatgctgaaattgattatgtgccctatgatgacccctacacatggtacctccgcagcaacaatggaaacagaagaaattattacattgctgctgaagaaatatcctgggattattcagaatttgtacaaagggaaacagatattgaagactctgatgatattccagaagataccacatataagaaagtagtttttcgaaagtacctcgacagcacttttaccaaacgtgatcctcgaggggagtatgaagagcatctcggaattcttggtcctattatcagagctgaagtggatgatgttatccaagttcgttttaaaaatttagcatccagaccgtattctctacatgcccatggactttcctatgaaaaatcatcagagggaaagacttatgaagatgactctcctgaatggtttaaggaagataatgctgttcagccaaatagcagttatacctacgtatggcatgccactgagcgatcagggccagaaagtcctggctctgcctgtcgggcttgggcctactactcagctgtgaacccagaaaaagatattcactcaggcttgataggtcccctcctaatctgccaaaaaggaatactacataaggacagcaacatgcctgtggacatgagagaatttgtcttactatttatgacctttgatgaaaagaagagctggtactatgaaaagaagtcccgaagttcttggagactcacatcctcagaaatgaaaaaatcccatgagtttcacgccattaatgggatgatctacagcttgcctggcctgaaaatgtatgagcaagagtgggtgaggttacacctgctgaacataggcggctcccaagacattcacgtggttcactttcacggccagaccttgctggaaaatggcaataaacagcaccagttaggggtctggccccttctgcctggttcatttaaaactcttgaaatgaaggcatcaaaacctggctggtggctcctaaacacagaggttggagaaaaccagagagcagggatgcaaacgccatttcttatcatggacagagactgtaggatgccaatgggactaagcactggtatcatatctgattcacagatcaaggcttcagagtttctgggttactgggagcccagattagcaagattaaacaatggtggatcttataatgcttggagtgtagaaaaacttgcagcagaatttgcctctaaaccttggatccaggtggacatgcaaaaggaagtcataatcacagggatccagacccaaggtgccaaacactacctgaagtcctgctataccacagagttctatgtagcttacagttccaaccagatcaactggcagatcttcaaagggaacagcacaaggaatgtgatgtattttaatggcaattcagatgcctctacaataaaagagaatcagtttgacccacctattgtggctagatatattaggatctctccaactcgagcctataacagacctacccttcgattggaactgcaaggttgtgaggtaaatggatgttccacacccctgggtatggaaaatggaaagatagaaaacaagcaaatcacagcttcttcgtttaagaaatcttggtggggagattactgggaacccttccgtgcccgtctgaatgcccagggacgtgtgaatgcctggcaagccaaggcaaacaacaataagcagtggctagaaattgatctactcaagatcaagaagataacggcaattataacacagggctgcaagtctctgtcctctgaaatgtatgtaaagagctataccatccactacagtgagcagggagtggaatggaaaccatacaggctgaaatcctccatggtggacaagatttttgaaggaaatactaataccaaaggacatgtgaagaactttttcaaccccccaatcatttccaggtttatccgtgtcattcctaaaacatggaatcaaagtattgcacttcgcctggaactctttggctgtgatatttactagaattgaacattcaaaaacccctggaagagactctttaagacctcaaaccatttagaatgggcaatgtattttacgctgtgttaaatgttaacagttttccactatttctctttcttttctattagtgaataaaattttatacaaga

SEQ ID NO: 453215 - DNA, 1672 bp, Homo sapiens
ttttcagtattaccgatacctgctccaatcttctgttttaaaaagttggctttttctgacattgctctgtcaggaaaaggggtagggcacagcctgtttactgccaagtgggggtcaaagtccaggttccccactccattgccacctaagaagggattgttccttggtggctgggtgggaagggaagttccccatttggcctccactgatactgcaggggcaggagcttcattaggggctggagatgaaagccctaaatccctacatggccttttctgacacaaccccagtgagggtgtagggtgcctctttagcctcaggagcatagaagtctaggctccccattcagcctttgctgttgtgggttggggaggggcctcaggtttttctgtggtgtttgactaaaggacagaagtcagtgtccaccagttttctatcatatctcgctatgctgccctttactggtactttggttagagaaagcagattttatttgggctttttcagtctgtactcattggtgtttccaggttgccggcttcttcatctctaagtctgggatttatgaggcaaaaagaaaattcaagacactgatcaccattttgttccttccgagaaccctagccagtctgtcttctgagctcttttcagggtcttatgtttctctgagctataatgtccaaagtttttagttgtacttagcaggaggaatagggcaaagtacatatatacaatcttcctggaactggaattatccccaagtatattttataaccaaattgatttagtttggaccccatgaaaatgtagtattacaatattaaattagatcaaaattttaatataaagtcactttatagatcattgttacataactaaactttcctcttttcttctagtattttaatggcaattcagatgcctctacaataaaagagaatcagtttgacccacctattgtggctagatatattaggatctctccaactcgagcctataacagacctacccttcgattggaactgcaaggttgtgaggtaaatggatgttccacacccctgggtatggaaaatggaaagatagaaaacaagcaaatcacagcttcttcgtttaagaaatcttggtggggagattactgggaacccttccgtgcccgtctgaatgcccagggacgtgtgaatgcctggcaagccaaggcaaacaacaataagcagtggctagaaattgatctactcaagatcaagaagataacggcaattataacacagggctgcaagtctctgtcctctgaaatgtatgtaaagagctataccatccactacagtgagcagggagtggaatggaaaccatacaggctgaaatcctccatggtggacaagatttttgaaggaaatactaataccaaaggacatgtgaagaactttttcaaccccccaatcatttccaggtttatccgtgtcattcctaaaacatggaatcaaagtattgcacttcgcctggaactctttggctgtgatatttactagaattgaacattcaaaaacccctggaagagactctttaagacctcaaaccatttagaatgggcaatgtattttacgctgtgttaaatgttaacagttttccactatttctctttcttttctattagtgaataaaattttatacaaga

SEQ ID NO: 453216 - DNA, 388 bp, Homo sapiens
atcaaacatgacctgtgtgcaagaaaggggataggaggtggttggcagttgaccaaacacagacctgaagcccagatttcatcatcaaggactggcctagtagctgaggcccatgcctagactcctgactacaacacaggtcctccaaggatctggttttccactggattaaactcacttgagaaattgctgggtttttaaaaaattcagaataaatctttttcttcccttgagtttaggttactgggagcccagattagcaagattaaacaatggtggatcttataatgcttggagtgtagaaaaacttgcagcagaatttgcctctaaaccttggatccaggtttgtcttaatagactgataatatttactgctatcgtaataata

SEQ ID NO: 453217 - DNA, 6981 bp, Homo sapiens
caaacccctgccaggaaaagccccagaaaaagcggagggagtgagagccagaggctgctgctgccgtttgcaagaactgcaggggaggaggacgctgccacccacagcctctagagctcattgcagctgggacagcccggagtgtggttagcagctcggcaagcgctgcccaggtcctggggtggtggcagccagcgggagcaggaaaggaagcatgttcccaggctgcccacgcctctgggtcctggtggtcttgggcaccagctgggtaggctgggggagccaagggacagaagcggcacagctaaggcagttctacgtggctgctcagggcatcagttggagctaccgacctgagcccacaaactcaagtttgaatctttctgtaacttcctttaagaaaattgtctacagagagtatgaaccatattttaagaaagaaaaaccacaatctaccatttcaggacttcttgggcctactttatatgctgaagtcggagacatcataaaagttcactttaaaaataaggcagataagcccttgagcatccatcctcaaggaattaggtacagtaaattatcagaaggtgcttcttaccttgaccacacattccctgcagagaagatggacgacgctgtggctccaggccgagaatacacctatgaatggagtatcagtgaggacagtggacccacccatgatgaccctccatgcctcacacacatctattactcccatgaaaatctgatcgaggatttcaactcggggctgattgggcccctgcttatctgtaaaaaagggaccctaactgagggtgggacacagaagacgtttgacaagcaaatcgtgctactatttgctgtgtttgatgaaagcaagagctggagccagtcatcatccctaatgtacacagtcaatggatatgtgaatgggacaatgccagatataacagtttgtgcccatgaccacatcagctggcatctgctgggaatgagctcggggccagaattattctccattcatttcaacggccaggtcctggagcagaaccatcataaggtctcagccatcacccttgtcagtgctacatccactaccgcaaatatgactgtgggcccagagggaaagtggatcatatcttctctcaccccaaaacatttgcaagctgggatgcaggcttacattgacattaaaaactgcccaaagaaaaccaggaatcttaagaaaataactcgtgagcagaggcggcacatgaagaggtgggaatacttcattgctgcagaggaagtcatttgggactatgcacctgtaataccagcgaatatggacaaaaaatacaggtctcagcatttggataatttctcaaaccaaattggaaaacattataagaaagttatgtacacacagtacgaagatgagtccttcaccaaacatacagtgaatcccaatatgaaagaagatgggattttgggtcctattatcagagcccaggtcagagacacactcaaaatcgtgttcaaaaatatggccagccgcccctatagcatttaccctcatggagtgaccttctcgccttatgaagatgaagtcaactcttctttcacctcaggcaggaacaacaccatgatcagagcagttcaaccaggggaaacctatacttataagtggaacatcttagagtttgatgaacccacagaaaatgatgcccagtgcttaacaagaccatactacagtgacgtggacatcatgagagacatcgcctctgggctaataggactacttctaatctgtaagagcagatccctggacaggcgaggaatacagagggcagcagacatcgaacagcaggctgtgtttgctgtgtttgatgagaacaaaagctggtaccttgaggacaacatcaacaagttttgtgaaaatcctgatgaggtgaaacgtgatgaccccaagttttatgaatcaaacatcatgagcactatcaatggctatgtgcctgagagcataactactcttggattctgctttgatgacactgtccagtggcacttctgtagtgtggggacccagaatgaaattttgaccatccacttcactgggcactcattcatctatggaaagaggcatgaggacaccttgaccctcttccccatgcgtggagaatctgtgacggtcacaatggataatgttggaacttggatgttaacttccatgaattctagtccaagaagcaaaaagctgaggctgaaattcagggatgttaaatgtatcccagatgatgatgaagactcatatgagatttttgaacctccagaatctacagtcatggctacacggaaaatgcatgatcgtttagaacctgaagatgaagagagtgatgctgactatgattaccagaacagactggctgcagcattaggaattaggtcattccgaaactcatcattgaaccaggaagaagaagagttcaatcttactgccctagctctggagaatggcactgaattcgtttcttcgaacacagatataattgttggttcaaattattcttccccaagtaatattagtaagttcactgtcaataaccttgcagaacctcagaaagccccttctcaccaacaagccaccacagctggttccccactgagacacctcattggcaagaactcagttctcaattcttccacagcagagcattccagcccatattctgaagaccctatagaggatcctctacagccagatgtcacagggatacgtctactttcacttggtgctggagaattcaaaagtcaagaacatgctaagcataagggacccaaggtagaaagagatcaagcagcaaagcacaggttctcctggatgaaattactagcacataaagttgggagacacctaagccaagacactggttctccttccggaatgaggccctgggaggaccttcctagccaagacactggttctccttccagaatgaggccctggaaggaccctcctagtgatctgttactcttaaaacaaagtaactcatctaagattttggttgggagatggcatttggcttctgagaaaggtagctatgaaataatccaagatactgatgaagacacagctgttaacaattggctgatcagcccccagaatgcctcacgtgcttggggagaaagcacccctcttgccaacaagcctggaaagcagagtggccacccaaagtttcctagagttagacataaatctctacaagtaagacaggatggaggaaagagtagactgaagaaaagccagtttctcattaagacacgaaaaaagaaaaaagagaagcacacacaccatgctcctttatctccgaggacctttcaccctctaagaagtgaagcctacaacacattttcagaaagaagacttaagcattcgttggtgcttcataaatccaatgaaacatctcttcccacagacctcaatcagacattgccctctatggattttggctggatagcctcacttcctgaccataatcagaattcctcaaatgacactggtcaggcaagctgtcctccaggtctttatcagacagtgcccccagaggaacactatcaaacattccccattcaagaccctgatcaaatgcactctacttcagaccccagtcacagatcctcttctccagagctcagtgaaatgcttgagtatgaccgaagtcacaagtccttccccacagatataagtcaaatgtccccttcctcagaacatgaagtctggcagacagtcatctctccagacctcagccaggtgaccctctctccagaactcagccagacaaacctctctccagacctcagccacacgactctctctccagaactcattcagagaaacctttccccagccctcggtcagatgcccatttctccagacctcagccatacaaccctttctccagacctcagccatacaaccctttctttagacctcagccagacaaacctctctccagaactcagtcagacaaacctttctccagccctcggtcagatgcccctttctccagacctcagccatacaaccctttctctagacttcagccagacaaacctctctccagaactcagccatatgactctctctccagaactcagtcagacaaacctttccccagccctcggtcagatgcccatttctccagacctcagccatacaaccctttctctagacttcagccagacaaacctctctccagaactcagtcaaacaaacctttccccagccctcggtcagatgcccctttctccagaccccagccatacaaccctttctctagacctcagccagacaaacctctctccagaactcagtcagacaaacctttccccagacctcagtgagatgcccctctttgcagatctcagtcaaattccccttaccccagacctcgaccagatgacactttctccagaccttggtgagacagatctttccccaaactttggtcagatgtccctttccccagacctcagccaggtgactctctctccagacatcagtgacaccacccttctcccggatctcagccagatatcacctcctccagaccttgatcagatattctacccttctgaatctagtcagtcattgcttcttcaagaatttaatgagtcttttccttatccagaccttggtcagatgccatctccttcatctcctactctcaatgatacttttctatcaaaggaatttaatccactggttatagtgggcctcagtaaagatggtacagattacattgagatcattccaaaggaagaggtccagagcagtgaagatgactatgctgaaattgattatgtgccctatgatgacccctacacatggtacctccgcagcaacaatggaaacagaagaaattattacattgctgctgaagaaatatcctgggattattcagaatttgtacaaagggaaacagatattgaagactctgatgatattccagaagataccacatataagaaagtagtttttcgaaagtacctcgacagcacttttaccaaacgtgatcctcgaggggagtatgaagagcatctcggaattcttggtcctattatcagagctgaagtggatgatgttatccaagttcgttttaaaaatttagcatccagaccgtattctctacatgcccatggactttcctatgaaaaatcatcagagggaaagacttatgaagatgactctcctgaatggtttaaggaagataatgctgttcagccaaatagcagttatacctacgtatggcatgccactgagcgatcagggccagaaagtcctggctctgcctgtcgggcttgggcctactactcagctgtgaacccagaaaaagatattcactcaggcttgataggtcccctcctaatctgccaaaaaggaatactacataaggacagcaacatgcctgtggacatgagagaatttgtcttactatttatgacctttgatgaaaagaagagctggtactatgaaaagaagtcccgaagttcttggagactcacatcctcagaaatgaaaaaatcccatgagtttcacgccattaatgggatgatctacagcttgcctggcctgaaaatgtatgagcaagagtgggtgaggttacacctgctgaacataggcggctcccaagacattcacgtggttcactttcacggccagaccttgctggaaaatggcaataaacagcaccagttaggggtctggccccttctgcctggttcatttaaaactcttgaaatgaaggcatcaaaacctggctggtggctcctaaacacagaggttggagaaaaccagagagcagggatgcaaacgccatttcttatcatggacagagactgtaggatgccaatgggactaagcactggtatcatatctgattcacagatcaaggcttcagagtttctgggttactgggagcccagattagcaagattaaacaatggtggatcttataatgcttggagtgtagaaaaacttgcagcagaatttgcctctaaaccttggatccaggtggacatgcaaaaggaagtcataatcacagggatccagacccaaggtgccaaacactacctgaagtcctgctataccacagagttctatgtagcttacagttccaaccagatcaactggcagatcttcaaagggaacagcacaaggaatgtgatgtattttaatggcaattcagatgcctctacaataaaagagaatcagtttgacccacctattgtggctagatatattaggatctctccaactcgagcctataacagacctacccttcgattggaactgcaaggttgtgaggtaaatggatgttccacacccctgggtatggaaaatggaaagatagaaaacaagcaaatcacagcttcttcgtttaagaaatcttggtggggagattactgggaacccttccgtgcccgtctgaatgcccagggacgtgtgaatgcctggcaagccaaggcaaacaacaataagcagtggctagaaattgatctactcaagatcaagaagataacggcaattataacacagggctgcaagtctctgtcctctgaaatgtatgtaaagagctataccatccactacagtgagcagggagtggaatggaaaccatacaggctgaaatcctccatggtggacaagatttttgaaggaaatactaataccaaaggacatgtgaagaactttttcaaccccccaatcatttccaggtttatccgtgtcattcctaaaacatggaatcaaagtattgcacttcgcctggaactctttggctgtgatatttactagaattgaacattcaaaaacccctggaagagactctttaagacctcaaaccatttagaatgggcaatgtattttacgctgtgttaaatgttaacagttttccactatttctctttcttttctattagtgaataaaattttatacaaga

SEQ ID NO: 453218 - DNA, 7202 bp, Homo sapiens
caaacccctgccaggaaaagccccagaaaaagcggagggagtgagagccagaggctgctgctgccgtttgcaagaactgcaggggaggaggacgctgccacccacagcctctagagctcattgcagctgggacagcccggagtgtggttagcagctcggcaagcgctgcccaggtcctggggtggtggcagccagcgggagcaggaaaggaagcatgttcccaggctgcccacgcctctgggtcctggtggtcttgggcaccagctgggtaggctgggggagccaagggacagaagcggcacagctaaggcagttctacgtggctgctcagggcatcagttggagctaccgacctgagcccacaaactcaagtttgaatctttctgtaacttcctttaagaaaattgtctacagagagtatgaaccatattttaagaaagaaaaaccacaatctaccatttcaggacttcttgggcctactttatatgctgaagtcggagacatcataaaagttcactttaaaaataaggcagataagcccttgagcatccatcctcaaggaattaggtacagtaaattatcagaaggtgcttcttaccttgaccacacattccctgcagagaagatggacgacgctgtggctccaggccgagaatacacctatgaatggagtatcagtgaggacagtggacccacccatgatgaccctccatgcctcacacacatctattactcccatgaaaatctgatcgaggatttcaactcggggctgattgggcccctgcttatctgtaaaaaagggaccctaactgagggtgggacacagaagacgtttgacaagcaaatcgtgctactatttgctgtgtttgatgaaagcaagagctggagccagtcatcatccctaatgtacacagtcaatggatatgtgaatgggacaatgccagatataacagtttgtgcccatgaccacatcagctggcatctgctgggaatgagctcggggccagaattattctccattcatttcaacggccaggtcctggagcagaaccatcataaggtctcagccatcacccttgtcagtgctacatccactaccgcaaatatgactgtgggcccagagggaaagtggatcatatcttctctcaccccaaaacatttgcaagctgggatgcaggcttacattgacattaaaaactgcccaaagaaaaccaggaatcttaagaaaataactcgtgagcagaggcggcacatgaagaggtgggaatacttcattgctgcagaggaagtcatttgggactatgcacctgtaataccagcgaatatggacaaaaaatacaggtctcagcatttggataatttctcaaaccaaattggaaaacattataagaaagttatgtacacacagtacgaagatgagtccttcaccaaacatacagtgaatcccaatatgaaagaagatgggattttgggtcctattatcagagcccaggtcagagacacactcaaaatcgtgttcaaaaatatggccagccgcccctatagcatttaccctcatggagtgaccttctcgccttatgaagatgaagtcaactcttctttcacctcaggcaggaacaacaccatgatcagagcagttcaaccaggggaaacctatacttataagtggaacatcttagagtttgatgaacccacagaaaatgatgcccagtgcttaacaagaccatactacagtgacgtggacatcatgagagacatcgcctctgggctaataggactacttctaatctgtaagagcagatccctggacaggcgaggaatacagagggcagcagacatcgaacagcaggctgtgtttgctgtgtttgatgagaacaaaagctggtaccttgaggacaacatcaacaagttttgtgaaaatcctgatgaggtgaaacgtgatgaccccaagttttatgaatcaaacatcatgagcactatcaatggctatgtgcctgagagcataactactcttggattctgctttgatgacactgtccagtggcacttctgtagtgtggggacccagaatgaaattttgaccatccacttcactgggcactcattcatctatggaaagaggcatgaggacaccttgaccctcttccccatgcgtggagaatctgtgacggtcacaatggataatgttggaacttggatgttaacttccatgaattctagtccaagaagcaaaaagctgaggctgaaattcagggatgttaaatgtatcccagatgatgatgaagactcatatgagatttttgaacctccagaatctacagtcatggctacacggaaaatgcatgatcgtttagaacctgaagatgaagagagtgatgctgactatgattaccagaacagactggctgcagcattaggaattaggtcattccgaaactcatcattgaaccaggaagaagaagagttcaatcttactgccctagctctggagaatggcactgaattcgtttcttcgaacacagatataattgttggttcaaattattcttccccaagtaatattagtaagttcactgtcaataaccttgcagaacctcagaaagccccttctcaccaacaagccaccacagctggttccccactgagacacctcattggcaagaactcagttctcaattcttccacagcagagcattccagcccatattctgaagaccctatagaggatcctctacagccagatgtcacagggatacgtctactttcacttggtgctggagaattcaaaagtcaagaacatgctaagcataagggacccaaggtagaaagagatcaagcagcaaagcacaggttctcctggatgaaattactagcacataaagttgggagacacctaagccaagacactggttctccttccggaatgaggccctgggaggaccttcctagccaagacactggttctccttccagaatgaggccctggaaggaccctcctagtgatctgttactcttaaaacaaagtaactcatctaagattttggttgggagatggcatttggcttctgagaaaggtagctatgaaataatccaagatactgatgaagacacagctgttaacaattggctgatcagcccccagaatgcctcacgtgcttggggagaaagcacccctcttgccaacaagcctggaaagcagagtggccacccaaagtttcctagagttagacataaatctctacaagtaagacaggatggaggaaagagtagactgaagaaaagccagtttctcattaagacacgaaaaaagaaaaaagagaagcacacacaccatgctcctttatctccgaggacctttcaccctctaagaagtgaagcctacaacacattttcagaaagaagacttaagcattcgttggtgcttcataaatccaatgaaacatctcttcccacagacctcaatcagacattgccctctatggattttggctggatagcctcacttcctgaccataatcagaattcctcaaatgacactggtcaggcaagctgtcctccaggtctttatcagacagtgcccccagaggaacactatcaaacattccccattcaagaccctgatcaaatgcactctacttcagaccccagtcacagatcctcttctccagagctcagtgaaatgcttgagtatgaccgaagtcacaagtccttccccacagatataagtcaaatgtccccttcctcagaacatgaagtctggcagacagtcatctctccagacctcagccaggtgaccctctctccagaactcagccagacaaacctctctccagacctcagccacacgactctctctccagaactcattcagagaaacctttccccagccctcggtcagatgcccatttctccagacctcagccatacaaccctttctccagacctcagccatacaaccctttctttagacctcagccagacaaacctctctccagaactcagtcagacaaacctttctccagccctcggtcagatgcccctttctccagacctcagccatacaaccctttctctagacttcagccagacaaacctctctccagaactcagccatatgactctctctccagaactcagtcagacaaacctttccccagccctcggtcagatgcccatttctccagacctcagccatacaaccctttctctagacttcagccagacaaacctctctccagaactcagtcaaacaaacctttccccagccctcggtcagatgcccctttctccagaccccagccatacaaccctttctctagacctcagccagacaaacctctctccagaactcagtcagacaaacctttccccagacctcagtgagatgcccctctttgcagatctcagtcaaattccccttaccccagacctcgaccagatgacactttctccagaccttggtgagacagatctttccccaaactttggtcagatgtccctttccccagacctcagccaggtgactctctctccagacatcagtgacaccacccttctcccggatctcagccagatatcacctcctccagaccttgatcagatattctacccttctgaatctagtcagtcattgcttcttcaagaatttaatgagtcttttccttatccagaccttggtcagatgccatctccttcatctcctactctcaatgatacttttctatcaaaggaatttaatccactggttatagtgggcctcagtaaagatggtacagattacattgagatcattccaaaggaagaggtccagagcagtgaagatgactatgctgaaattgattatgtgccctatgatgacccctacacatggtacctccgcagcaacaatggaaacagaagaaattattacattgctgctgaagaaatatcctgggattattcagaatttgtacaaagggaaacagatattgaagactctgatgatattccagaagataccacatataagaaagtagtttttcgaaagtacctcgacagcacttttaccaaacgtgatcctcgaggggagtatgaagagcatctcggaattcttggtcctattatcagagctgaagtggatgatgttatccaagttcgttttaaaaatttagcatccagaccgtattctctacatgcccatggactttcctatgaaaaatcatcagagggaaagacttatgaagatgactctcctgaatggtttaaggaagataatgctgttcagccaaatagcagttatacctacgtatggcatgccactgagcgatcagggccagaaagtcctggctctgcctgtcgggcttgggcctactactcagctgtgaacccagaaaaagatattcactcaggcttgataggtcccctcctaatctgccaaaaaggaatactacataaggacagcaacatgcctgtggacatgagagaatttgtcttactatttatgacctttgatgaaaagaagagctggtactatgaaaagaagtcccgaagttcttggagactcacatcctcagaaatgaaaaaatcccatgagtttcacgccattaatgggatgatctacagcttgcctggcctgaaaatgtatgagcaagagtgggtgaggttacacctgctgaacataggcggctcccaagacattcacgtggttcactttcacggccagaccttgctggaaaatggcaataaacagcaccagttaggggtctggccccttctgcctggttcatttaaaactcttgaaatgaaggcatcaaaacctggctggtggctcctaaacacagaggttggagaaaaccagagagcagggatgcaaacgccatttcttatcatggacagagactgtaggatgccaatgggactaagcactggtatcatatctgattcacagatcaaggcttcagagtttctgggttactgggagcccagattagcaagattaaacaatggtggatcttataatgcttggagtgtagaaaaacttgcagcagaatttgcctctaaaccttggatccaggtggacatgcaaaaggaagtcataatcacagggatccagacccaaggtgccaaacactacctgaagtcctgctataccacagagttctatgtagcttacagttccaaccagatcaactggcagatcttcaaagggaacagcacaaggaatgtgatgtattttaatggcaattcagatgcctctacaataaaagagaatcagtttgacccacctattgtggctagatatattaggatctctccaactcgagcctataacagacctacccttcgattggaactgcaaggttgtgaggtaaatggatgttccacacccctgggtatggaaaatggaaagatagaaaacaagcaaatcacagcttcttcgtttaagaaatcttggtggggagattactgggaacccttccgtgcccgtctgaatgcccagggacgtgtgaatgcctggcaagccaaggcaaacaacaataagcagtggctagaaattgatctactcaagatcaagaagataacggcaattataacacagggctgcaagtctctgtcctctgaaatgtatgtaaagagctataccatccactacagtgagcagggagtggaatggaaaccatacaggctgaaatcctccatggtggacaagatttttgaaggaaatactaataccaaaggacatgtgaagaactttttcaaccccccaatcatttccaggtttatccgtgtcattcctaaaacatggaatcaaagtattgcacttcgcctggaactctttggctgtgatatttactagaattgaacattcaaaaacccctggaagagactctttaagacctcaaaccatttagaatgggcaatgtattttacgctgtgttaaatgttaacagttttccactatttctctttcttttctattagtgaataaaattttatacaagaagcttttataatgtaactccttgctaccagtaagtaagataatggctattacttctgcattaatttgaatacaggtaggaaaatatcaagaaccaacaagaaaagggcttatctttcttaatgattgaaaatgctatgaagtaatatttatgtagttaaaatgcttcattataactcttttaaatcctttacacactagtaaaacagatattactttaaat

SEQ ID NO: 453219 - DNA, 6932 bp, Homo sapiens
caaacccctgccaggaaaagccccagaaaaagcggagggagtgagagccagaggctgctgctgccgtttgcaagaactgcaggggaggaggacgctgccacccacagcctctagagctcattgcagctgggacagcccggagtgtggttagcagctcggcaagcgctgcccaggtcctggggtggtggcagccagcgggagcaggaaaggaagcatgttcccaggctgcccacgcctctgggtcctggtggtcttgggcaccagctgggtaggctgggggagccaagggacagaagcggcacagctaaggcagttctacgtggctgctcagggcatcagttggagctaccgacctgagcccacaaactcaagtttgaatctttctgtaacttcctttaagaaaattgtctacagagagtatgaaccatattttaagaaagaaaaaccacaatctaccatttcaggacttcttgggcctactttatatgctgaagtcggagacatcataaaagttcactttaaaaataaggcagataagcccttgagcatccatcctcaaggaattaggtacagtaaattatcagaaggtgcttcttaccttgaccacacattccctgcagagaagatggacgacgctgtggctccaggccgagaatacacctatgaatggagtatcagtgaggacagtggacccacccatgatgaccctccatgcctcacacacatctattactcccatgaaaatctgatcgaggatttcaactcggggctgattgggcccctgcttatctgtaaaaaagggaccctaactgagggtgggacacagaagacgtttgacaagcaaatcgtgctactatttgctgtgtttgatgaaagcaagagctggagccagtcatcatccctaatgtacacagtcaatggatatgtgaatgggacaatgccagatataacagtttgtgcccatgaccacatcagctggcatctgctgggaatgagctcggggccagaattattctccattcatttcaacggccaggtcctggagcagaaccatcataaggtctcagccatcacccttgtcagtgctacatccactaccgcaaatatgactgtgggcccagagggaaagtggatcatatcttctctcaccccaaaacatttgcaagctgggatgcaggcttacattgacattaaaaactgcccaaagaaaaccaggaatcttaagaaaataactcgtgagcagaggcggcacatgaagaggtgggaatacttcattgctgcagaggaagtcatttgggactatgcacctgtaataccagcgaatatggacaaaaaatacaggtctcagcatttggataatttctcaaaccaaattggaaaacattataagaaagttatgtacacacagtacgaagatgagtccttcaccaaacatacagtgaatcccaatatgaaagaagatgggattttgggtcctattatcagagcccaggtcagagacacactcaaaatcgtgttcaaaaatatggccagccgcccctatagcatttaccctcatggagtgaccttctcgccttatgaagatgaagtcaactcttctttcacctcaggcaggaacaacaccatgatcagagcagttcaaccaggggaaacctatacttataagtggaacatcttagagtttgatgaacccacagaaaatgatgcccagtgcttaacaagaccatactacagtgacgtggacatcatgagagacatcgcctctgggctaataggactacttctaatctgtaagagcagatccctggacaggcgaggaatacagagggcagcagacatcgaacagcaggctgtgtttgctgtgtttgatgagaacaaaagctggtaccttgaggacaacatcaacaagttttgtgaaaatcctgatgaggtgaaacgtgatgaccccaagttttatgaatcaaacatcatgagcactatcaatggctatgtgcctgagagcataactactcttggattctgctttgatgacactgtccagtggcacttctgtagtgtggggacccagaatgaaattttgaccatccacttcactgggcactcattcatctatggaaagaggcatgaggacaccttgaccctcttccccatgcgtggagaatctgtgacggtcacaatggataatgttggaacttggatgttaacttccatgaattctagtccaagaagcaaaaagctgaggctgaaattcagggatgttaaatgtatcccagatgatgatgaagactcatatgagatttttgaacctccagaatctacagtcatggctacacggaaaatgcatgatcgtttagaacctgaagatgaagagagtgatgctgactatgattaccagaacagactggctgcagcattaggaattaggtcattccgaaactcatcattgaaccaggaagaagaagagttcaatcttactgccctagctctggagaatggcactgaattcgtttcttcgaacacagatataattgttggttcaaattattcttccccaagtaatattagtaagttcactgtcaataaccttgcagaacctcagaaagccccttctcaccaacaagccaccacagctggttccccactgagacacctcattggcaagaactcagttctcaattcttccacagcagagcattccagcccatattctgaagaccctatagaggatcctctacagccagatgtcacagggatacgtctactttcacttggtgctggagaattcaaaagtcaagaacatgctaagcataagggacccaaggtagaaagagatcaagcagcaaagcacaggttctcctggatgaaattactagcacataaagttgggagacacctaagccaagacactggttctccttccggaatgaggccctgggaggaccttcctagccaagacactggttctccttccagaatgaggccctggaaggaccctcctagtgatctgttactcttaaaacaaagtaactcatctaagattttggttgggagatggcatttggcttctgagaaaggtagctatgaaataatccaagatactgatgaagacacagctgttaacaattggctgatcagcccccagaatgcctcacgtgcttggggagaaagcacccctcttgccaacaagcctggaaagcagagtggccacccaaagtttcctagagttagacataaatctctacaagtaagacaggatggaggaaagagtagactgaagaaaagccagtttctcattaagacacgaaaaaagaaaaaagagaagcacacacaccatgctcctttatctccgaggacctttcaccctctaagaagtgaagcctacaacacattttcagaaagaagacttaagcattcgttggtgcttcataaatccaatgaaacatctcttcccacagacctcaatcagacattgccctctatggattttggctggatagcctcacttcctgaccataatcagaattcctcaaatgacactggtcaggcaagctgtcctccaggtctttatcagacagtgcccccagaggaacactatcaaacattccccattcaagaccctgatcaaatgcactctacttcagaccccagtcacagatcctcttctccagagctcagtgaaatgcttgagtatgaccgaagtcacaagtccttccccacagatataagtcaaatgtccccttcctcagaacatgaagtctggcagacagtcatctctccagacctcagccaggtgaccctctctccagaactcagccagacaaacctctctccagacctcagccacacgactctctctccagaactcattcagagaaacctttccccagccctcggtcagatgcccatttctccagacctcagccatacaaccctttctccagacctcagccatacaaccctttctttagacctcagccagacaaacctctctccagaactcagtcagacaaacctttctccagccctcggtcagatgcccctttctccagacctcagccatacaaccctttctctagacttcagccagacaaacctctctccagaactcagccatatgactctctctccagaactcagtcagacaaacctttccccagccctcggtcagatgcccatttctccagacctcagccatacaaccctttctctagacttcagccagacaaacctctctccagaactcagtcaaacaaacctttccccagccctcggtcagatgcccctttctccagaccccagccatacaaccctttctctagacctcagccagacaaacctctctccagaactcagtcagacaaacctttccccagacctcagtgagatgcccctctttgcagatctcagtcaaattccccttaccccagacctcgaccagatgacactttctccagaccttggtgagacagatctttccccaaactttggtcagatgtccctttccccagacctcagccaggtgactctctctccagacatcagtgacaccacccttctcccggatctcagccagatatcacctcctccagaccttgatcagatattctacccttctgaatctagtcagtcattgcttcttcaagaatttaatgagtcttttccttatccagaccttggtcagatgccatctccttcatctcctactctcaatgatacttttctatcaaaggaatttaatccactggttatagtgggcctcagtaaagatggtacagattacattgagatcattccaaaggaagaggtccagagcagtgaagatgactatgctgaaattgattatgtgccctatgatgacccctacacatggtacctccgcagcaacaatggaaacagaagaaattattacattgctgctgaagaaatatcctgggattattcagaatttgtacaaagggaaacagatattgaagactctgatgatattccagaagataccacatataagaaagtagtttttcgaaagtacctcgacagcacttttaccaaacgtgatcctcgaggggagtatgaagagcatctcggaattcttggtcctattatcagagctgaagtggatgatgttatccaagttcgttttaaaaatttagcatccagaccgtattctctacatgcccatggactttcctatgaaaaatcatcagagggaaagacttatgaagatgactctcctgaatggtttaaggaagataatgctgttcagccaaatagcagttatacctacgtatggcatgccactgagcgatcagggccagaaagtcctggctctgcctgtcgggcttgggcctactactcagctgtgaacccagaaaaagatattcactcaggcttgataggtcccctcctaatctgccaaaaaggaatactacataaggacagcaacatgcctgtggacatgagagaatttgtcttactatttatgacctttgatgaaaagaagagctggtactatgaaaagaagtcccgaagttcttggagactcacatcctcagaaatgaaaaaatcccatgagtttcacgccattaatgggatgatctacagcttgcctggcctgaaaatgtatgagcaagagtgggtgaggttacacctgctgaacataggcggctcccaagacattcacgtggttcactttcacggccagaccttgctggaaaatggcaataaacagcaccagttaggggtctggccccttctgcctggttcatttaaaactcttgaaatgaaggcatcaaaacctggctggtggctcctaaacacagaggttggagaaaaccagagagcagggatgcaaacgccatttcttatcatggacagagactgtaggatgccaatgggactaagcactggtatcatatctgattcacagatcaaggcttcagagtttctgggttactgggagcccagattagcaagattaaacaatggtggatcttataatgcttggagtgtagaaaaacttgcagcagaatttgcctctaaaccttggatccaggtggacatgcaaaaggaagtcataatcacagggatccagacccaaggtgccaaacactacctgaagtcctgctataccacagagttctatgtagcttacagttccaaccagatcaactggcagatcttcaaagggaacagcacaaggaatgtgatgtattttaatggcaattcagatgcctctacaataaaagagaatcagtttgacccacctattgtggctagatatattaggatctctccaactcgagcctataacagacctacccttcgattggaactgcaaggttgtgaggtaaatggatgttccacacccctgggtatggaaaatggaaagatagaaaacaagcaaatcacagcttcttcgtttaagaaatcttggtggggagattactgggaacccttccgtgcccgtctgaatgcccagggacgtgtgaatgcctggcaagccaaggcaaacaacaataagcagtggctagaaattgatctactcaagatcaagaagataacggcaattataacacagggctgcaagtctctgtcctctgaaatgtatgtaaagagctataccatccactacagtgagcaatttttgaaggaaatactaataccaaaggacatgtgaagaactttttcaaccccccaatcatttccaggtttatccgtgtcattcctaaaacatggaatcaaagtattgcacttcgcctggaactctttggctgtgatatttactagaattgaacattcaaaaacccctggaagagactctttaagacctcaaaccatttagaatgggcaatgtattttacgctgtgttaaatgttaacagttttccactatttctctttcttttctattagtgaataaaattttatacaaga

SEQ ID NO: 453220 - DNA, 2646 bp, Homo sapiens
tccggcactaggcaagatctcccactcctctgagactatcccaatcgctctcatcgtccatttccctaaccttcaaattccccttaccccagacctcgaccagatgacactttctccagaccttggtgagacagatctttccccaaactttggtcagatgtccctttccccagacctcagccaggtgactctctctccagacatcagtgacaccacccttctcccggatctcagccagatatcacctcctccagaccttgatcagatattctacccttctgaatctagtcagtcattgcttcttcaagaatttaatgagtcttttccttatccagaccttggtcagatgccatctccttcatctcctactctcaatgatacttttctatcaaaggaatttaatccactggttatagtgggcctcagtaaagatggtacagattacattgagatcattccaaaggaagaggtccagagcagtgaagatgactatgctgaaattgattatgtgccctatgatgacccctacacatggtacctccgcagcaacaatggaaacagaagaaattattacattgctgctgaagaaatatcctgggattattcagaatttgtacaaagggaaacagatattgaagactctgatgatattccagaagataccacatataagaaagtagtttttcgaaagtacctcgacagcacttttaccaaacgtgatcctcgaggggagtatgaagagcatctcggaattcttggtcctattatcagagctgaagtggatgatgttatccaagttcgttttaaaaatttagcatccagaccgtattctctacatgcccatggactttcctatgaaaaatcatcagagggaaagacttatgaagatgactctcctgaatggtttaaggaagataatgctgttcagccaaatagcagttatacctacgtatggcatgccactgagcgatcagggccagaaagtcctggctctgcctgtcgggcttgggcctactactcagctgtgaacccagaaaaagatattcactcaggcttgataggtcccctcctaatctgccaaaaaggaatactacataaggacagcaacatgcctgtggacatgagagaatttgtcttactatttatgacctttgatgaaaagaagagctggtactatgaaaagaagtcccgaagttcttggagactcacatcctcagaaatgaaaaaatcccatgagtttcacgccattaatgggatgatctacagcttgcctggcctgaaaatgtatgagcaagagtgggtgaggttacacctgctgaacataggcggctcccaagacattcacgtggttcactttcacggccagaccttgctggaaaatggcaataaacagcaccagttaggggtctggccccttctgcctggttcatttaaaactcttgaaatgaaggcatcaaaacctggctggtggctcctaaacacagaggttggagaaaaccagagagcagggatgcaaacgccatttcttatcatggacagagactgtaggatgccaatgggactaagcactggtatcatatctgattcacagatcaaggcttcagagtttctgggttactgggagcccagattagcaagattaaacaatggtggatcttataatgcttggagtgtagaaaaacttgcagcagaatttgcctctaaaccttggatccaggtggacatgcaaaaggaagtcataatcacagggatccagacccaaggtgccaaacactacctgaagtcctgctataccacagagttctatgtagcttacagttccaaccagatcaactggcagatcttcaaagggaacagcacaaggaatgtgatgtattttaatggcaattcagatgcctctacaataaaagagaatcagtttgacccacctattgtggctagatatattaggatctctccaactcgagcctataacagacctacccttcgattggaactgcaaggttgtgaggtaaatggatgttccacacccctgggtatggaaaatggaaagatagaaaacaagcaaatcacagcttcttcgtttaagaaatcttggtggggagattactgggaacccttccgtgcccgtctgaatgcccagggacgtgtgaatgcctggcaagccaaggcaaacaacaataagcagtggctagaaattgatctactcaagatcaagaagataacggcaattataacacagggctgcaagtctctgtcctctgaaatgtatgtaaagagctataccatccactacagtgagcagggagtggaatggaaaccatacaggctgaaatcctccatggtggacaagatttttgaaggaaatactaataccaaaggacatgtgaagaactttttcaaccccccaatcatttccaggtttatccgtgtcattcctaaaacatggaatcaaagtattgcacttcgcctggaactctttggctgtgatatttactagaattgaacattcaaaaacccctggaagagactctttaagacctcaaaccatttagaatgggcaatgtattttacgctgtgttaaatgttaacagttttccactatttctctttcttttctattagtgaataaaattttatacaaga

SEQ ID NO: 453221 - DNA, 2346 bp, Homo sapiens
agcggactgcagcaccagccgtctgcagctccggccgccacttgcgcctctccagcctccgcaggcccaaccgccgccagcaccatggccagcaccatttccgcctacaaggagaagatgaaggagctgtcggtgctgtcgctcatctgctcctgcttctacacacagccgcaccccaataccgtctaccagtacggggacatggaggtgaagcagctggacaagcgggcctcaggccagagcttcgaggtcatcctcaagtccccttctgacctgtccccagagagccctatgctctcctccccacccaagaagaaggacacctccctggaggagctgcaaaagcggctggaggcagccgaggagcggaggaagacgcaggaggcgcaggtgctgaagcagctggcggagcggcgcgagcacgagcgcgaggtgctgcacaaggcgctggaggagaataacaacttcagccgccaggcggaggagaagctcaactacaagatggagctcagcaaggagatccgcgaggcacacctggccgcactgcgcgagcggctgcgcgagaaggagctgcacgcggccgaggtgcgcaggaacaaggagcagcgagaagagatgtcgggctaagggcccgggacgggcggcgcccatcctgcgacggaacacgttcgggttttggttttgtttcgttcacctctgtctagatgcaacttttgttcctcctcccccaccccagcccccagcttcatgcttctcttccgcactcagccgccctgccctgtcctcgtggtgagtcgctgaccacggcttcccctgcaggagccgccgggcgtgagacgcggtccctcggtgcagacaccaggccgggcgcggctgggtcccccgggggccctgtgagagaggtggtggtgaccgtggtaaacccagggcggtggcgtgggatcacgggtccttacgctgggctgtctggtcagcacgtgcaggtcagggcaggtcctctgagccggcgcccctggccagcaggcgaggctacagtacctgctgtctttccagggggaaggggctccccatgagggaggggcgacgggggaggggggtgatggtgcctgggagcctgcgtgtgcagccggtgcttgttgaactggcaggcgggtgggtgggggctgcagctttccttaatgtggttgcacaggggtcctctgagaccacctggcgtgaggtggacaccctgggccttcctggaagcctgcagttgggggcctgccctgagtctgctggggagtgggcattctctgccaggacccatgagcaggctgcatggtctagaggttgtgggcagcatggacagtcccccactcagaagtgcaagagttccaaagagcctctggcccaggcccctccccaccagggctttgcagatgtccttgaaagacccaccctagagccctttggagtgctggcccctcctgtgccctctgccctggtggaagcggcagccacaagtcctcctcagggagccccaagggggattttgtgggaccgctgcccacagatccaggtgttggaagggcagcgggtaaggttcccaagccagccccaacacccttcccacttggcacccagagggggctgtgggtggaggcctgactccaggcctctcctgcccacaccctctgggctgagttccttctttcccttggacgcccagtgctggccttggaggacggtcagctggaggatggcggtgggggaggctgtctttgtaccactgcagcatcccccacttctccacggaagccccatcccaaagctgctgcctggccccttgctgtaaagtgtgaagggggcggctgagttctcttaggacccagagccagggccctcaacttccatcctgcgggaggccttggccgggcactgccagtgtcttccagagccacacccagggaccacgggaggatcctgacccctgcagggctcaggggtcagcagggacccactgccccatctccctctccccaccaagacagccccagaaggagcagccagctgggatgggaacccaaggctgtccacatctggcttttgtgggactcagaaagggaagcagaactgagggctgggatattcctcatggtggcagcgctcatagcgaaagcctactgtaatatgcacccatctcatccacgtagtaaagtgaacttaaaaattcaatcaaatgaacaattaaataaacacctgtgtgtttaagaaaacttctggaacaaatcaaacagatcagaccagacaaacacaaggctcagactggcaggaaccgaaacagggggggcggccgaacaaaacccc

SEQ ID NO: 453222 - DNA, 2293 bp, Homo sapiens
agcagctggacaagcgggcctcaggccagagcttcacctccgatgtccccgtactggtagacgggtattggggtgcggctgtgtgtagaagcaggagcagatgagcgacagcaccgacagctccttcatcttctccttgtaggcggacatggaggtgaagcagctggacaagcgggcctcaggccagagcttcgaggtcatcctcaagtccccttctgacctgtccccagagagccctatgctctcctccccacccaagaagaaggacacctccctggaggagctgcaaaagcggctggaggcagccgaggagcggaggaagacgcaggaggcgcaggtgctgaagcagctggcggagcggcgcgagcacgagcgcgaggtgctgcacaaggcgctggaggagaataacaacttcagccgccaggcggaggagaagctcaactacaagatggagctcagcaaggagatccgcgaggcacacctggccgcactgcgcgagcggctgcgcgagaaggagctgcacgcggccgaggtgcgcaggaacaaggagcagcgagaagagatgtcgggctaagggcccgggacgggcggcgcccatcctgcgacggaacacgttcgggttttggttttgtttcgttcacctctgtctagatgcaacttttgttcctcctcccccaccccagcccccagcttcatgcttctcttccgcactcagccgccctgccctgtcctcgtggtgagtcgctgaccacggcttcccctgcaggagccgccgggcgtgagacgcggtccctcggtgcagacaccaggccgggcgcggctgggtcccccgggggccctgtgagagaggtggtggtgaccgtggtaaacccagggcggtggcgtgggatcacgggtccttacgctgggctgtctggtcagcacgtgcaggtcagggcaggtcctctgagccggcgcccctggccagcaggcgaggctacagtacctgctgtctttccagggggaaggggctccccatgagggaggggcgacgggggaggggggtgatggtgcctgggagcctgcgtgtgcagccggtgcttgttgaactggcaggcgggtgggtgggggctgcagctttccttaatgtggttgcacaggggtcctctgagaccacctggcgtgaggtggacaccctgggccttcctggaagcctgcagttgggggcctgccctgagtctgctggggagtgggcattctctgccaggacccatgagcaggctgcatggtctagaggttgtgggcagcatggacagtcccccactcagaagtgcaagagttccaaagagcctctggcccaggcccctccccaccagggctttgcagatgtccttgaaagacccaccctagagccctttggagtgctggcccctcctgtgccctctgccctggtggaagcggcagccacaagtcctcctcagggagccccaagggggattttgtgggaccgctgcccacagatccaggtgttggaagggcagcgggtaaggttcccaagccagccccaacacccttcccacttggcacccagagggggctgtgggtggaggcctgactccaggcctctcctgcccacaccctctgggctgagttccttctttcccttggacgcccagtgctggccttggaggacggtcagctggaggatggcggtgggggaggctgtctttgtaccactgcagcatcccccacttctccacggaagccccatcccaaagctgctgcctggccccttgctgtaaagtgtgaagggggcggctgagttctcttaggacccagagccagggccctcaacttccatcctgcgggaggccttggccgggcactgccagtgtcttccagagccacacccagggaccacgggaggatcctgacccctgcagggctcaggggtcagcagggacccactgccccatctccctctccccaccaagacagccccagaaggagcagccagctgggatgggaacccaaggctgtccacatctggcttttgtgggactcagaaagggaagcagaactgagggctgggatattcctcatggtggcagcgctcatagcgaaagcctactgtaatatgcacccatctcatccacgtagtaaagtgaacttaaaaattcaatcaaatgaacaattaaataaacacctgtgtgtttaagaaaacttctggaacaaatcaaacagatcagaccagacaaacacaaggctcagactggcaggaaccgaaacagggggggcggccgaacaaaacccc

SEQ ID NO: 453223 - DNA, 2269 bp, Homo sapiens
  misc_feature (2201)..(2201): n is a, c, g, or t
  misc_feature (2250)..(2250): n is a, c, g, or t
agcggactgcagcaccagccgtctgcagctccggccgccacttgcgcctctccagcctccgcaggcccaaccgccgccagcaccatggccagcaccatttccgcctacaaggagaagatgaaggagctgtcggtgctgtcgctcatctgctcctgcttctacacacagccgcaccccaataccgtctaccagtacggggacatggaggtgaagcagctggacaagcgggcctcaggccagagcttcgaggtcatcctcaagtccccttctgacctgtccccagagagccctatgctctcctccccacccaagaagaaggacacctccctggaggagctgcaaaagcggctggaggcagccgaggagcggaggaagacgcaggaggcgcaggtgctgaagcagctggcggagcggcgcgagcacgagcgcgaggtgctgcacaaggcgctggaggagaataacaacttcagccgccaggcggaggagaagctcaactacaagatggagctcagcaaggagatccgcgaggcacacctggccgcactgcgcgagcggctgcgcgagaaggagctgcacgcggccgaggtgcgcaggaacaaggagcagcgagaagagatgtcgggctaagggcccgggacgggcggcgcccatcctgcgacggaacacgttcgggttttggttttgtttcgttcacctctgtctagatgcaacttttgttcctcctcccccaccccagcccccagcttcatgcttctcttccgcactcagccgccctgccctgtcctcgtggtgagtcgctgaccacggcttcccctgcaggagccgccgggcgtgagacgcggtccctcggtgcagacaccaggccgggcgcggctgggtcccccgggggccctgtgagagaggtggtggtgaccgtggtaaacccagggcggtggcgtgggatcacgggtccttacgctgggctgtctggtcagcacgtgcaggtcagggcaggtcctctgagccggcgcccctggccagcaggcgaggctacagtacctgctgtctttccagggggaaggggctccccatgagggaggggcgacgggggaggggggtgatggtgcctgggagcctgcgtgtgcagccggtgcttgttgaactggcaggcgggtgggtgggggctgcagctttccttaatgtggttgcacaggggtcctctgagaccacctggcgtgaggtggacaccctgggccttcctggaagcctgcagttgggggcctgccctgagtctgctggggagtgggcattctctgccaggacccatgagcaggctgcatggtctagaggttgtgggcagcatggacagtcccccactcagaagtgcaagagttccaaagagcctctggcccaggcccctccccaccagggctttgcagatgtccttgaaagacccaccctagagccctttggagtgctggcccctcctgtgccctctgccctggtggaagcggcagccacaagtcctcctcagggagccccaagggggattttgtgggaccgctgcccacagatccaggtgttggaagggcagcgggtaaggttcccaagccagccccaacacccttcccacttggcacccagagggggctgtgggtggaggcctgactccaggcctctcctgcccacaccctctgggctgagttccttctttcccttggacgcccagtgctggccttggaggacggtcagctggaggatggcggtgggggaggctgtctttgtaccactgcagcatcccccacttctccacggaagccccatcccaaagctgctgcctggccccttgctgtaaagtgtgaagggggcggctgagttctcttaggacccagagccagggccctcaacttccatcctgcgggaggccttggccgggcactgccagtgtcttccagagccacacccagggaccacgggaggatcctgacccctgcagggctcaggggtcagcagggacccactgccccatctccctctccccaccaagacagccccagaaggagcagccagctgggatgggaacccaaggctgtccacatctggcttttgtgggactcagaaagggaagcagaactgagggctgggatattcctcatggtggcagcgctcatagcgaaagcaaggcctggaaatggcaggtctccagcaggtccccgaggtanaaaatctgtcggattggccgttcttcttgatgtgcctggtcgatcatgnacttgcacagggtgaagtc

SEQ ID NO: 453224 - DNA, 2177 bp, Homo sapiens
gtgtgcagtggcggcagggtatggcgggggccctgggcgcagccaggaccgcgggacccgcgcgcgaggcagggacgggggcgggggcggcggatcgcgaccccctggccctgccccgaccacaggccggatggcaggcgagggttcccagggcagcgcccgggggtcccggcgcccaccgaggcctgggcaggtggaggcgccagacgcaggaggcgcaggtgctgaagcagctggcggagcggcgcgagcacgagcgcgaggtgctgcacaaggcgctggaggagaataacaacttcagccgccaggcggaggagaagctcaactacaagatggagctcagcaaggagatccgcgaggcacacctggccgcactgcgcgagcggctgcgcgagaaggagctgcacgcggccgaggtgcgcaggaacaaggagcagcgagaagagatgtcgggctaagggcccgggacgggcggcgcccatcctgcgacggaacacgttcgggttttggttttgtttcgttcacctctgtctagatgcaacttttgttcctcctcccccaccccagcccccagcttcatgcttctcttccgcactcagccgccctgccctgtcctcgtggtgagtcgctgaccacggcttcccctgcaggagccgccgggcgtgagacgcggtccctcggtgcagacaccaggccgggcgcggctgggtcccccgggggccctgtgagagaggtggtggtgaccgtggtaaacccagggcggtggcgtgggatcacgggtccttacgctgggctgtctggtcagcacgtgcaggtcagggcaggtcctctgagccggcgcccctggccagcaggcgaggctacagtacctgctgtctttccagggggaaggggctccccatgagggaggggcgacgggggaggggggtgatggtgcctgggagcctgcgtgtgcagccggtgcttgttgaactggcaggcgggtgggtgggggctgcagctttccttaatgtggttgcacaggggtcctctgagaccacctggcgtgaggtggacaccctgggccttcctggaagcctgcagttgggggcctgccctgagtctgctggggagtgggcattctctgccaggacccatgagcaggctgcatggtctagaggttgtgggcagcatggacagtcccccactcagaagtgcaagagttccaaagagcctctggcccaggcccctccccaccagggctttgcagatgtccttgaaagacccaccctagagccctttggagtgctggcccctcctgtgccctctgccctggtggaagcggcagccacaagtcctcctcagggagccccaagggggattttgtgggaccgctgcccacagatccaggtgttggaagggcagcgggtaaggttcccaagccagccccaacacccttcccacttggcacccagagggggctgtgggtggaggcctgactccaggcctctcctgcccacaccctctgggctgagttccttctttcccttggacgcccagtgctggccttggaggacggtcagctggaggatggcggtgggggaggctgtctttgtaccactgcagcatcccccacttctccacggaagccccatcccaaagctgctgcctggccccttgctgtaaagtgtgaagggggcggctgagttctcttaggacccagagccagggccctcaacttccatcctgcgggaggccttggccgggcactgccagtgtcttccagagccacacccagggaccacgggaggatcctgacccctgcagggctcaggggtcagcagggacccactgccccatctccctctccccaccaagacagccccagaaggagcagccagctgggatgggaacccaaggctgtccacatctggcttttgtgggactcagaaagggaagcagaactgagggctgggatattcctcatggtggcagcgctcatagcgaaagcctactgtaatatgcacccatctcatccacgtagtaaagtgaacttaaaaattcaatcaaatgaacaattaaataaacacctgtgtgtttaagaaaacttctggaacaaatcaaacagatcagaccagacaaacacaaggctcagactggcaggaaccgaaacagggggggcggccgaacaaaacccc

SEQ ID NO: 453225 - DNA, 3170 bp, Homo sapiens
  misc_feature (246)..(246): n is a, c, g, or t
  misc_feature (276)..(276): n is a, c, g, or t
  misc_feature (278)..(279): n is a, c, g, or t
  misc_feature (301)..(301): n is a, c, g, or t
  misc_feature (340)..(340): n is a, c, g, or t
  misc_feature (354)..(354): n is a, c, g, or t
  misc_feature (380)..(380): n is a, c, g, or t
  misc_feature (435)..(437): n is a, c, g, or t
  misc_feature (448)..(450): n is a, c, g, or t
  misc_feature (559)..(559): n is a, c, g, or t
  misc_feature (564)..(564): n is a, c, g, or t
  misc_feature (657)..(658): n is a, c, g, or t
  misc_feature (684)..(684): n is a, c, g, or t
  misc_feature (698)..(699): n is a, c, g, or t
  misc_feature (724)..(724): n is a, c, g, or t
  misc_feature (727)..(728): n is a, c, g, or t
  misc_feature (766)..(766): n is a, c, g, or t
  misc_feature (1736)..(1736): n is a, c, g, or t
attatacccattgttagctgactggattaaagcacatgatagtttaccttttaacagcataatgcaatattagaaatagttgaagaaattggaaggagtttcagaaatgtagctgagtttctcctgggcttaagggactttatagctcatgttcaaatgcaccactgtctctctgaattacagatgatctgtttttctaacaatacgacctgacgattttttttttttttaagagacagggtctcnctctgttgcccagactggagtgtagtggcncnntcttggctcactgcagcctcgncctcctgggctcaagggatcctcttgcctcaccctcccnggtagctgggactncaggtgtgtgctaccatacttggctnattttttaattttttgtagagatggagtctcgctgtattgcccaggctggtctcnnnctcctggcctnnngtgatcctcctgccctggcctcccagcaaattttttaaaataaattggctgggcacggtggctcccacctgtaatcccagcactttgggaggccgaggtgggcggatcncctgnggtcaggaattcgagaccagcctgaccaacatggagaaaccccatctctactaaaaatacaaaattagccgggtgtggtggtgcatgcctgtnntcccagctattcgggaggctgaggcnggagaatcgcttgnncctgggaggtggaggttgtggtgancanngattgctccattgcactccagcctgggcaacaagagcnaaactctgtcaaaaaaaaaaaaaaattctcctggataataaggctctttgaaaggaggattactcattgttttacgtaggaatatatgatgagtattatttagcaagactgttgctaaagaatatctgatgagctgaaaacattcttagtaaattgaataaatgtttaagggaaaaaatacgtagtatttatatttcattgtttcaacttgagaccatttcagatcacttcggaagtaatttaattcatcggagtatttgtaatatatgtttctaaaaaagtttagttctaaagatcagagaaaaagcatgacacaaagcgttttgactattttatgaatatgtgaattgaaagagaatgtacataatcatgtagtttccgttggcattggccggtttgtaatttcacaagagtcagatgaggtcatctacctgcagtatgtgaaggtgaatgtaaagtcatgtgactggacatgatgaagatgaagagggactctcgtttctttctgtttaagccaacacagctcagagtccttataagaaactgaaagaagcattatcgtcagtggaagcttttgaaaaacactacttagtaagtattaacaagtgttcaatgtctgttctgtgaatacctgtctctagaaggctttgctacatggcctgttgagttgggaaggaactggtgtggggggccccttcttgttggttttttttagtttctttggtacctggggagttgtggacaaaacatggagtagttcatcaaatgtgtattagtgcccatggtaccatgctaggcatggaatcatctttgaatatttaccgttttgttcaaattgggtttgctcacacagaaattataagagaggctagtgaatacttttctttgtaaaaaggagtaatttggacttgggcagagctattgtatttgattttgaaagacttaaattagcaaaactttaaaaaacggngtaggcagaagtgtggtgggtcagcgtcattcccgggtcatgggcaacttgagcgtttggtctgcccgtaatggctgtacctcttatacacacaagtatgaaaaatacccagcatgtcacccacgtgcagaaagtccttggaaaagttagatgttttggatgagtttgtgggtttcttttattattatgcttcataatttatacacaggttaccaattttgcttatatattacagaaaaattcacaaaaatagatgcaaaggaaaaaataatgttacattattagcaatgtcttctgcgggctgggcatggtggctcacgcctgtaattcagcactttgggaggctgaggcaggtggatcacttgaggtcaggagtttgagaccagcctagccaacatggtgaaatcctgtctctgctaaagatacaaaaaattagccgggcctggtggcgcctgtagtcccagctacttgggaagctgaggcacaagaatcacttcaacctatgaggcggaggttgcagtgagctgagatctcaccgctgtgctccagcctgggcgatggagcaagactctgtctcaaaacaaaaacccaacaatgtcttttgtgtgagctttaggtgaataaatgtagtatttgtccatcattaaaagttcaagtacataattgtgtttttacttccccacaggatttgtcccatgccaccattgaaatgtatacaagcattgggaggattcgatctgctaagtttgttggaaaagatctggcagagttttacatgtaattgattttgtacttttctttgaattctaaacatacaaataacacgagaagatttgttatatatggagttagtataaagtgcacataaatttgtagactgaaaagtgtagattctcttacccagtcctcataatttttttttcagtttcttctgaaaaccagatggagagattttctgcttgttactcttaataactgttattggtctttgaggttcttttatttaattaaatatatacatttttgtaactaagtttaattaaagaattataagacagtataatggtgagtaaattggcatatagattcttacatattttgttatatagcatttctctaattttatcaagtattaagaggactgaaaaacctcaaggccattgatgtaaagctactgcatgtgtcaggttcatgaaagagggatgatctagggatgactggaagaaggtgtgtacaaagactgcagggtttccattccagctccagctttgaagtttgattccagaaaaactcaaaatttagcgtatttctggtgtgtttcataaaatcagactatcaaagagaagaaaccccagtgggtcatgtggttaccatttcagagtactcaaaggagatacaagctataaggaaaaagatgcttgttttcattttcta

SEQ ID NO: 453226 - DNA, 1315 bp, Homo sapiens
  misc_feature (246)..(246): n is a, c, g, or t
  misc_feature (276)..(276): n is a, c, g, or t
  misc_feature (278)..(279): n is a, c, g, or t
  misc_feature (301)..(301): n is a, c, g, or t
  misc_feature (340)..(340): n is a, c, g, or t
  misc_feature (354)..(354): n is a, c, g, or t
  misc_feature (380)..(380): n is a, c, g, or t
  misc_feature (435)..(437): n is a, c, g, or t
  misc_feature (448)..(450): n is a, c, g, or t
  misc_feature (559)..(559): n is a, c, g, or t
  misc_feature (564)..(564): n is a, c, g, or t
  misc_feature (657)..(658): n is a, c, g, or t
  misc_feature (684)..(684): n is a, c, g, or t
  misc_feature (698)..(699): n is a, c, g, or t
  misc_feature (724)..(724): n is a, c, g, or t
  misc_feature (727)..(728): n is a, c, g, or t
  misc_feature (766)..(766): n is a, c, g, or t
  misc_feature (1283)..(1283): n is a, c, g, or t
attatacccattgttagctgactggattaaagcacatgatagtttaccttttaacagcataatgcaatattagaaatagttgaagaaattggaaggagtttcagaaatgtagctgagtttctcctgggcttaagggactttatagctcatgttcaaatgcaccactgtctctctgaattacagatgatctgtttttctaacaatacgacctgacgattttttttttttttaagagacagggtctcnctctgttgcccagactggagtgtagtggcncnntcttggctcactgcagcctcgncctcctgggctcaagggatcctcttgcctcaccctcccnggtagctgggactncaggtgtgtgctaccatacttggctnattttttaattttttgtagagatggagtctcgctgtattgcccaggctggtctcnnnctcctggcctnnngtgatcctcctgccctggcctcccagcaaattttttaaaataaattggctgggcacggtggctcccacctgtaatcccagcactttgggaggccgaggtgggcggatcncctgnggtcaggaattcgagaccagcctgaccaacatggagaaaccccatctctactaaaaatacaaaattagccgggtgtggtggtgcatgcctgtnntcccagctattcgggaggctgaggcnggagaatcgcttgnncctgggaggtggaggttgtggtgancanngattgctccattgcactccagcctgggcaacaagagcnaaactctgtcaaaaaaaaaaaaaaattctcctggataataaggctctttgaaaggaggattactcattgttttacgtaggaatatatgatgagtattatttagcaagactgttgctaaagaatatctgatgagctgaaaacattcttagtaaattgaataaatgtttaagggaaaaaatacgtagtatttatatttcattgtttcaacttgagaccatttcagatcacttcggaagtaatttaattcatcggagtatttgtaatatatgtttctaaaaaagtttagttctaaagatcagagaaaaagcatgacacaaagcgttttgactattttatgaatatgtgaattgaaagagaatgtacataatcatgtagtttccgttggcattggccggtttgtaatttcacaagagtcagatgaggtcattcaccttcacatactgcaggtagatgacctcatctgactcttgtgaaattacaaaccgccaatccaaccggaacctacatggattattgnattggaaaaggaagggggaaccttccttccgg

SEQ ID NO: 453227 - DNA, 7002 bp, Homo sapiens
aggccggaagtggctgaggccggcagcagcgggcggcagctgcggcgcaaccggctccggagctgcctggcgcggccgggcgggcggcgccgctcaggctcgggctccggctgggcccggcgcggcctcggggctgcccatggggcgcggggggccgggccggtgacgccggacgcccatggacgcctctgaggagccgctgccgccggtgatctacaccatggagaacaagcccatcgtcacctgtgctggagatcagaatttatttacctctgtttatccaacgctctctcagcagcttccaagagaaccaatggaatggagaaggtcctatggccgggctccgaagatgattcacctagagtctaactttgttcaattcaaagaggagctgctgcccaaagaaggaaacaaagctctgctcacgtttcccttcctccatatttactggacagagtgctgtgataccgaagtgtataaagctacagtaaaagatgacctcaccaagtggcagaatgttctgaaggctcatagctctgtggactggttaatagtgatagttgaaaatgatgccaagaaaaaaaacaaaaccaacatccttccccgaacctctattgtggacaaaataagaaatgatttttgtaataaacagagtgacaggtgtgttgtgctctccgaccccttgaaggactcttctcgaactcaggaatcctggaatgccttcctgaccaaactcaggacattgcttcttatgtcttttaccaaaaacctaggcaagtttgaggatgacatgagaaccttgagggagaagaggactgagccaggctggagcttttgtgaatatttcatggttcaggaggagcttgcctttgttttcgagatgctgcagcagttcgaggacgccctggtgcagtacgacgaactggacgccctcttctctcagtatgtggtcaacttcggggccggggatggtgccaactggctgacttttttctgccagccagtgaagagctggaacggattgatcctccgaaaacccatagatatggagaagcgggaatcgatccagaggcgagaagccaccctgttagatctgcgcagttacctgttctctcgccagtgcaccttgctgctcttcctgcagaggccgtgggaggtggcccagcgcgccctagagctgctgcacaactgcgtgcaggaactgaagctcttagaagtctctgtcccacctggtgctctggactgctgggtgtttctgagctgtctggaggtgttgcagaggatagaaggctgctgtgaccgggcacagatcgactcaaacattgcccacactgtggggctatggagctatgccacagaaaagttaaagtccttgggctatctatgtggacttgtgtcagagaaaggacctaactcagaagatctcaacaggacagttgaccttttggcaggtttgggagctgagcgaccagaaacagccaacacagctcagagtccttataagaaactgaaagaagcattatcgtcagtggaagcttttgaaaaacactacttagatttgtcccatgccaccattgaaatgtatacaagcattgggaggattcgatctgctaagtttgttggaaaagatctggcagagttttacatgaggaaaaaggctccacaaaaggcagaaatctatcttcaaggagcactgaaaaactacctggctgagggctgggcactccccatcacacacacaaggaagcagctggccgaatgtcaaaagcaccttggacaaattgaaaactacctgcagaccagcagcctcttagccagtgaccaccacctcactgaagaggagcgcaagcacttctgccaggagatacttgactttgccagccagccgtcagacagcccaggtcataagatagtgctacccatgcattcctttgcacaactgcgagatctccattttgatccctccaatgccgtggtccacgtgggcggcgttttgtgcgttgagataaccatgtacagccagatgcctgtgcctgttcacgtggagcagattgtggtcaatgtccacttcagcattgagaaaaacagctaccggaagactgcggagtggcttaccaagcacaagacgtccaatgggatcattaactttccacccgagaccgcacctttccctgtatcccaaaacagtttgcccgcgctggagttgtatgaaatgtttgagagaagcccatctgataactccttgaacacgactgggattatctgcagaaacgtccacatgctcctgagaaggcaggagagcagctcctctctagagatgccctcaggggtggctctggaggagggtgcccacgtgctgaggtgcagccacgtgaccctggaaccaggggccaaccagataacattcaggactcaggccaaggaacctggaacgtatacactcaggcagctgtgcgcctcggtgggctccgtgtggttcgtcctccctcacatctaccccattgtgcagtacgacgtgtactcacaggagccccagctgcacgtggagccgctggctgatagccttctggcaggcattcctcagagagtcaagttcactgtcactaccggccattatacgataaagaatggagacagcctgcagcttagcaatgccgaagccatgctcatcctgtgccaggcggagagcagggctgtggtctactccaacacgagagaacagtcttctgaggccgcgctccggattcagtcctccgacaaggtcacgagcatcagtctgcctgttgcgcctgcgtaccacgtgatcgaatttgaactggaagttctctctttaccttcagccccagcactcggaggggagagtgacatgctggggatggcagagccccacaggaagcataaggacaaacagagaactggccgctgcatggttaccacagaccacaaagtgtcgattgactgcccgtggtccatctactccacagtcatcgcactgaccttcagcgtacccttcaggaccacacacagcctcctgtcctcaggaacacggaaatatgttcaagtttgtgtccagaatttgtcagaacttgactttcagctgtcagatagttatcttgtagataccggtgatagtaccgacctgcaactagtaccactgaacacgcagtcccagcagcccatctacagcaagcagtcggtgttcttcgtctgggaactcaagtggacagaagagcctcccccttctctgcattgccggttctctgttggattttccccagcttctgaggaacagctgtctatctccttaaagccgtatacttatgaatttaaagtggaaaatttttttacattatacaacgtgaaggctgagatctttcccccttcgggaatggagtattgcagaacaggctccctctgctccctggaggttttgatcacgaggctctcagacctcttggaggtggataaagatgaagcactgactgaatctgatgagcatttttcgacaaagcttatgtatgaagttgtcgacaacagtagcaactgggcagtgtgtgggaaaagctgcggtgtcatctccatgccagtggctgctcgggccactcacagggtccacatggaagtgatgccgctcttcgccgggtatctccccctgcccgacgtcaggctgttcaagtacctcccccatcattctgcacactcctcccaactggacgctgacagctggatagaaaacgacagcctgtcagtagacaagcacggggacgaccagccggacagcagcagcctcaagagcaggggcagcgtgcattcggcctgcagcagcgagcacaaaggcctacccatgccccggctgcaggcactgccggccggccaggtcttcaactccagctcgggcacacaagtcctggtcatccccagccaagatgaccacgtcctggaagtcagtgtaacatgacaacgccagggtgaacacacgccacttcccagctaggagtgcactttatgggactgtgactggactcttccgttctggctccagccagaccttcagtggtcctgcctggccgtggggacatcagagagtgtcatcacgcagctggccagctgagttctgttgttgttttcatgccgcctgtgatctcagattcctgcttttctcaccccgtccccatgctggtgtccgacgccgcttactcagagccctggcctccctccccctacctcacacgctgctcatgaaagtttccacccacgctgtctccacggaacagcctccgtctgctggctcttcgtggaaggccatttgtctttcaggtagacactcagcagccctcacggtcttagtgacgtgtgtgcctttctggtcacacagctgcccagtttcctgatcggggtggatttgtgtcccctaaggggtaaaacagccgtttaccgcagatcctctcattacacccttctaggggaggcgggtgggggagggagggatcataaccccttctgtgccttgggatgccggagctgggggacctggaggcccatcagccggagccacgtgaaaggtactgaagaaagctgagacccggctgtgaggagcgcctcagcggtgaggtggtttagggataaatgtttctggaaccctgtggtcccccataatgttgatagaatatcatatgcactgggagttaaatatatttaatttaatgatcattatatatgtgggggttaatatgttgtttttctgtccctttaaagtctttacatgtaattgtagctgtataatcgttatttttcttttgcatcttaagtcttagaaattaagatattccatcgtgaggatgagagaggtcctcagtgtgtttttggtctggttgtagggaaggactcaagtcctggaatgtcctccactggtctactgagttgcagtcacactgttccaatggattatttgctttcggttgtaaatttaattgtacatatggttgatttattatttttaaaaatacagactaactgatgtaatgtttatgtataagttgcaccaaaaatcaaggacaaaaataagtgtgtttgtttttacaggtgtgaaagtcacagcttgtaaataagtgttgtatgtattaaaccttttccagttctccaaagcgatgtatttttgtacacttgaaatagagtactcttaatttactgggcaaatgtgcttggaattgaacttgacaagattagctcaagcagatagagtcgggtccagcagtgggtggccctcgtgtgaatccccgtggatgtgcaagttgtggagagaaggagcaccgggttcctgcccagcactgtgcttgcgggaggcggtggggcatgggaggaaggaggcacagaccggggaaatatgacagccgtcatttccagtattctctgtgttgtcttttagctcattcaataaataaaggtggtgtgatttttttttcctcctgtctttttcatttgtagaaactggagacgtgtaaagaagataaataattgtgtaattaaactttccagaaatttatcttcctcatgtgcagtttaacaaacttggtcaaactagttagcaaattagaacttcagaatctaatgatagtttagggtttctaaaataaggttttttattgtaaaaattgacgattgccctgcatttctaccaagtcctgtgaataaagagatgggagatttgattccgtcagaagagactgtaatccgtgtcgtcagcctgggagccttccccagtgtaatgtagctttctctcttaccttctggaagagggaatgtttcatttattactgtttgattttcttgtatctggttctactcccaggatgaaattatccaactacatatatatttagaggaagaaagtgaaggggaaatttaaaatgtttacggcgcttaattgcctggaaatgaaatgaaatcaaatttatcagtttttttccccctaattacccaaaagatcttttgcaaactatgttacatgaatgcttctgcctctttaagacaaagaagaatgtcacccaaaattgtcatttttttcttaatgttcatcataaaagtcctaaaagagtaactgtaattggatgtttattgtttttatctaaagtaaggtgtatgtgtttgagacaagctggttttgttgataaagagatgttaaataattgtgaagccagatatgcaatgtgtatctaaaaagcaaggaatttgcagccgttttacaaatatctgtggaacatgtaaatactgtcaaatggaaaataaaataagttataatttttgtgaatttcatgggatgtcctatgattggaaaaattataactcttctgattctaatgtggaaattgttgtatttaatctgaaaatgactttacctacaacagttccattgtcagcacagcctaggagggtcagattcctgtattaattactcttagtggagatgccagatatcccatacagaattagcagagaaaatacacacaggcttctattcaaattttctttagtgcttaaaattaagttttaaaatgaaatcagacactgcaggtttgtatataaaatgaaaagctatactactttttataaaagggcaaactgggctgatgtaaatgttttactttcaactgtgttctttaaaataaatcctacctggtttttaaattttatttttcatgaaaatgctcctttctctacatttattcatcctatatacatcaggctgtaagaccccccccagtcatcattaatacaatgtgttgggattctgtgactggaaaaggtgacaagttggtgactttgacactgcaggtattccattttcatggtttactatgaaaagtcatttttcatattatgtaatatattgttagattaaaaccattgtattaagactttaaaatgtaagcattgtaattctgaaaatacacattttaagaagaaaaaaaaaaagtcgacgcggccgcgaatttaatagtagta

SEQ ID NO: 453228 - DNA, 7018 bp, Homo sapiens
aggccggaagtggctgaggccggcagcagcgggcggcagctgcggcgcaaccggctccggagctgcctggcgcggccgggcgggcggcgccgctcaggctcgggctccggctgggcccggcgcggcctcggggctgcccatggggcgcggggggccgggccggtgacgccggacgcccatggacgcctctgaggagccgctgccgccggtgatctacaccatggagaacaagcccatcgtcacctgtgctggagatcagaatttatttacctctgtttatccaacgctctctcagcagcttccaagagaaccaatggaatggagaaggtcctatggccgggctccgaagatgattcacctagagtctaactttgttcaattcaaagaggagctgctgcccaaagaaggaaacaaagctctgctcacgtttcccttcctccatatttactggacagagtgctgtgataccgaagtgtataaagctacagtaaaagatgacctcaccaagtggcagaatgttctgaaggctcatagctctgtggactggttaatagtgatagttgaaaatgatgccaagaaaaaaaacaaaaccaacatccttccccgaacctctattgtggacaaaataagaaatgatttttgtaataaacagagtgacaggtgtgttgtgctctccgaccccttgaaggactcttctcgaactcaggaatcctggaatgccttcctgaccaaactcaggacattgcttcttatgtcttttaccaaaaacctaggcaagtttgaggatgacatgagaaccttgagggagaagaggactgagccaggctggagcttttgtgaatatttcatggttcaggaggagcttgcctttgttttcgagatgctgcagcagttcgaggacgccctggtgcagtacgacgaactggacgccctcttctctcagtatgtggtcaacttcggggccggggatggtgccaactggctgacttttttctgccagccagtgaagagctggaacggattgatcctccgaaaacccatagatatggagaagcgggaatcgatccagaggcgagaagccaccctgttagatctgcgcagttacctgttctctcgccagtgcaccttgctgctcttcctgcagaggccgtgggaggtggcccagcgcgccctagagctgctgcacaactgcgtgcaggaactgaagctcttagaagtctctgtcccacctggtgctctggactgctgggtgtttctgagctgtctggaggtgttgcagaggatagaaggctgctgtgaccgggcacagatcgactcaaacattgcccacactgtggggctatggagctatgccacagaaaagttaaagtccttgggctatctatgtggacttgtgtcagagaaaggacctaactcagaagatctcaacaggacagttgaccttttggcaggtttgggagctgagcgaccagaaacagccaacacagctcagagtccttataagaaactgaaagaagcattatcgtcagtggaagcttttgaaaaacactacttagatttgtcccatgccaccattgaaatgtatacaagcattgggaggattcgatctgctaagtttgttggaaaagatctggcagagttttacatgaggaaaaaggctccacaaaaggcagaaatctatcttcaaggagcactgaaaaactacctggctgagggctgggcactccccatcacacacacaaggaagcagctggccgaatgtcaaaagcaccttggacaaattgaaaactacctgcagaccagcagcctcttagccagtgaccaccacctcactgaagaggagcgcaagcacttctgccaggagatacttgactttgccagccagccgtcagacagcccaggtcataagatagtgctacccatgcattcctttgcacaactgcgagatctccattttgatccctccaatgccgtggtccacgtgggcggcgttttgtgcgttgagataaccatgtacagccagatgcctgtgcctgttcacgtggagcagattgtggtcaatgtccacttcagcattgagaaaaacagctaccggaagactgcggagtggcttaccaagcacaagacgtccaatgggatcattaactttccacccgagaccgcacctttccctgtatcccaaaacagtttgcccgcgctggagttgtatgaaatgtttgagagaagcccatctgataactccttgaacacgactgggattatctgcagaaacgtccacatgctcctgagaaggcaggagagcagctcctctctagagatgccctcaggggtggctctggaggagggtgcccacgtgctgaggtgcagccacgtgaccctggaaccaggggccaaccagataacattcaggactcaggccaaggaacctggaacgtatacactcaggcagctgtgcgcctcggtgggctccgtgtggttcgtcctccctcacatctaccccattgtgcagtacgacgtgtactcacaggagccccagctgcacgtggagccgctggctgatagccttctggcaggcattcctcagagagtcaagttcactgtcactaccggccattatacgataaagaatggagacagcctgcagcttagcaatgccgaagccatgctcatcctgtgccaggcggagagcagggctgtggtctactccaacacgagagaacagtcttctgaggccgcgctccggattcagtcctccgacaaggtcacgagcatcagtctgcctgttgcgcctgcgtaccacgtgatcgaatttgaactggaagttctctctttaccttcagccccagcactcggaggggagagtgacatgctggggatggcagagccccacaggaagcataaggacaaacagagaactggccgctgcatggttaccacagaccacaaagtgtcgattgactgcccgtggtccatctactccacagtcatcgcactgaccttcagcgtacccttcaggaccacacacagcctcctgtcctcaggaacacggaaatatgttcaagtttgtgtccagaatttgtcagaacttgactttcagctgtcagatagttatcttgtagataccggtgatagtaccgacctgcaactagtaccactgaacacgcagtcccagcagcccatctacagcaagcagtcggtgttcttcgtctgggaactcaagtggacagaagagcctcccccttctctgcattgccggttctctgttggattttccccagcttctgaggaacagctgtctatctccttaaagccgtatacttatgaatttaaagtggaaaatttttttacattatacaacgtgaaggctgagatctttcccccttcgggaatggagtattgcagaacaggctccctctgctccctggaggttttgatcacgaggctctcagacctcttggaggtggataaagatgaagcactgactgaatctgatgagcatttttcgacaaagcttatgtatgaagttgtcgacaacagtagcaactgggcagtgtgtgggaaaagctgcggtgtcatctccatgccagtggctgctcgggccactcacagggtccacatggaagtgatgccgctcttcgccgggtatctccccctgcccgacgtcaggctgttcaagtacctcccccatcattctgcacactcctcccaactggacgctgacagctggatagaaaacgacagcctgtcagtagacaagcacggggacgaccagccggacagcagcagcctcaagagcaggggcagcgtgcattcggcctgcagcagcgagcacaaaggcctacccatgccccggctgcaggcactgccggccggccaggtcttcaactccagctcgggcacacaagtcctggtcatccccagccaagatgaccacgtcctggaagtcagtgtaacatgacaacgccagggtgaacacacgccacttcccagctaggagtgcactttatgggactgtgactggactcttccgttctggctccagccagaccttcagtggtcctgcctggccgtggggacatcagagagtgtcatcacgcagctggccagctgagttctgttgttgttttcatgccgcctgtgatctcagattcctgcttttctcaccccgtccccatgctggtgtccgacgccgcttactcagagccctggcctccctccccctacctcacacgctgctcatgaaagtttccacccacgctgtctccacggaacagcctccgtctgctggctcttcgtggaaggccatttgtctttcaggtagacactcagcagccctcacggtcttagtgacgtgtgtgcctttctggtcacacagctgcccagtttcctgatcggggtggatttgtgtcccctaaggggtaaaacagccgtttaccgcagatcctctcattgtgcttttctagaataacacccttctaggggaggcgggtgggggagggagggatcataaccccttctgtgccttgggatgccggagctgggggacctggaggcccatcagccggagccacgtgaaaggtactgaagaaagctgagacccggctgtgaggagcgcctcagcggtgaggtggtttagggataaatgtttctggaaccctgtggtcccccataatgttgatagaatatcatatgcactgggagttaaatatatttaatttaatgatcattatatatgtgggggttaatatgttgtttttctgtccctttaaagtctttacatgtaattgtagctgtataatcgttatttttcttttgcatcttaagtcttagaaattaagatattccatcgtgaggatgagagaggtcctcagtgtgtttttggtctggttgtagggaaggactcaagtcctggaatgtcctccactggtctactgagttgcagtcacactgttccaatggattatttgctttcggttgtaaatttaattgtacatatggttgatttattatttttaaaaatacagactaactgatgtaatgtttatgtataagttgcaccaaaaatcaaggacaaaaataagtgtgtttgtttttacaggtgtgaaagtcacagcttgtaaataagtgttgtatgtattaaaccttttccagttctccaaagcgatgtatttttgtacacttgaaatagagtactcttaatttactgggcaaatgtgcttggaattgaacttgacaagattagctcaagcagatagagtcgggtccagcagtgggtggccctcgtgtgaatccccgtggatgtgcaagttgtggagagaaggagcaccgggttcctgcccagcactgtgcttgcgggaggcggtggggcatgggaggaaggaggcacagaccggggaaatatgacagccgtcatttccagtattctctgtgttgtcttttagctcattcaataaataaaggtggtgtgatttttttttcctcctgtctttttcatttgtagaaactggagacgtgtaaagaagataaataattgtgtaattaaactttccagaaatttatcttcctcatgtgcagtttaacaaacttggtcaaactagttagcaaattagaacttcagaatctaatgatagtttagggtttctaaaataaggttttttattgtaaaaattgacgattgccctgcatttctaccaagtcctgtgaataaagagatgggagatttgattccgtcagaagagactgtaatccgtgtcgtcagcctgggagccttccccagtgtaatgtagctttctctcttaccttctggaagagggaatgtttcatttattactgtttgattttcttgtatctggttctactcccaggatgaaattatccaactacatatatatttagaggaagaaagtgaaggggaaatttaaaatgtttacggcgcttaattgcctggaaatgaaatgaaatcaaatttatcagtttttttccccctaattacccaaaagatcttttgcaaactatgttacatgaatgcttctgcctctttaagacaaagaagaatgtcacccaaaattgtcatttttttcttaatgttcatcataaaagtcctaaaagagtaactgtaattggatgtttattgtttttatctaaagtaaggtgtatgtgtttgagacaagctggttttgttgataaagagatgttaaataattgtgaagccagatatgcaatgtgtatctaaaaagcaaggaatttgcagccgttttacaaatatctgtggaacatgtaaatactgtcaaatggaaaataaaataagttataatttttgtgaatttcatgggatgtcctatgattggaaaaattataactcttctgattctaatgtggaaattgttgtatttaatctgaaaatgactttacctacaacagttccattgtcagcacagcctaggagggtcagattcctgtattaattactcttagtggagatgccagatatcccatacagaattagcagagaaaatacacacaggcttctattcaaattttctttagtgcttaaaattaagttttaaaatgaaatcagacactgcaggtttgtatataaaatgaaaagctatactactttttataaaagggcaaactgggctgatgtaaatgttttactttcaactgtgttctttaaaataaatcctacctggtttttaaattttatttttcatgaaaatgctcctttctctacatttattcatcctatatacatcaggctgtaagaccccccccagtcatcattaatacaatgtgttgggattctgtgactggaaaaggtgacaagttggtgactttgacactgcaggtattccattttcatggtttactatgaaaagtcatttttcatattatgtaatatattgttagattaaaaccattgtattaagactttaaaatgtaagcattgtaattctgaaaatacacattttaagaagaaaaaaaaaaagtcgacgcggccgcgaatttaatagtagta

SEQ ID NO: 453229 - DNA, 5459 bp, Homo sapiens
ggatggaggccaaagcgggagagatggggtttcagtgtgttgattatccctagctgtaatgaaagctactgtttgttgactttgcaaggaggaaaaaggctccacaaaaggcagaaatctatcttcaaggagcactgaaaaactacctggctgagggctgggcactccccatcacacacacaaggaagcagctggccgaatgtcaaaagcaccttggacaaattgaaaactacctgcagaccagcagcctcttagccagtgaccaccacctcactgaagaggagcgcaagcacttctgccaggagatacttgactttgccagccagccgtcagacagcccaggtcataagatagtgctacccatgcattcctttgcacaactgcgagatctccattttgatccctccaatgccgtggtccacgtgggcggcgttttgtgcgttgagataaccatgtacagccagatgcctgtgcctgttcacgtggagcagattgtggtcaatgtccacttcagcattgagaaaaacagctaccggaagactgcggagtggcttaccaagcacaagacgtccaatgggatcattaactttccacccgagaccgcacctttccctgtatcccaaaacagtttgcccgcgctggagttgtatgaaatgtttgagagaagcccatctgataactccttgaacacgactgggattatctgcagaaacgtccacatgctcctgagaaggcaggagagcagctcctctctagagatgccctcaggggtggctctggaggagggtgcccacgtgctgaggtgcagccacgtgaccctggaaccaggggccaaccagataacattcaggactcaggccaaggaacctggaacgtatacactcaggcagctgtgcgcctcggtgggctccgtgtggttcgtcctccctcacatctaccccattgtgcagtacgacgtgtactcacaggagccccagctgcacgtggagccgctggctgatagccttctggcaggcattcctcagagagtcaagttcactgtcactaccggccattatacgataaagaatggagacagcctgcagcttagcaatgccgaagccatgctcatcctgtgccaggcggagagcagggctgtggtctactccaacacgagagaacagtcttctgaggccgcgctccggattcagtcctccgacaaggtcacgagcatcagtctgcctgttgcgcctgcgtaccacgtgatcgaatttgaactggaagttctctctttaccttcagccccagcactcggaggggagagtgacatgctggggatggcagagccccacaggaagcataaggacaaacagagaactggccgctgcatggttaccacagaccacaaagtgtcgattgactgcccgtggtccatctactccacagtcatcgcactgaccttcagcgtacccttcaggaccacacacagcctcctgtcctcaggaacacggaaatatgttcaagtttgtgtccagaatttgtcagaacttgactttcagctgtcagatagttatcttgtagataccggtgatagtaccgacctgcaactagtaccactgaacacgcagtcccagcagcccatctacagcaagcagtcggtgttcttcgtctgggaactcaagtggacagaagagcctcccccttctctgcattgccggttctctgttggattttccccagcttctgaggaacagctgtctatctccttaaagccgtatacttatgaatttaaagtggaaaatttttttacattatacaacgtgaaggctgagatctttcccccttcgggaatggagtattgcagaacaggctccctctgctccctggaggttttgatcacgaggctctcagacctcttggaggtggataaagatgaagcactgactgaatctgatgagcatttttcgacaaagcttatgtatgaagttgtcgacaacagtagcaactgggcagtgtgtgggaaaagctgcggtgtcatctccatgccagtggctgctcgggccactcacagggtccacatggaagtgatgccgctcttcgccgggtatctccccctgcccgacgtcaggctgttcaagtacctcccccatcattctgcacactcctcccaactggacgctgacagctggatagaaaacgacagcctgtcagtagacaagcacggggacgaccagccggacagcagcagcctcaagagcaggggcagcgtgcattcggcctgcagcagcgagcacaaaggcctacccatgccccggctgcaggcactgccggccggccaggtcttcaactccagctcgggcacacaagtcctggtcatccccagccaagatgaccacgtcctggaagtcagtgtaacatgacaacgccagggtgaacacacgccacttcccagctaggagtgcactttatgggactgtgactggactcttccgttctggctccagccagaccttcagtggtcctgcctggccgtggggacatcagagagtgtcatcacgcagctggccagctgagttctgttgttgttttcatgccgcctgtgatctcagattcctgcttttctcaccccgtccccatgctggtgtccgacgccgcttactcagagccctggcctccctccccctacctcacacgctgctcatgaaagtttccacccacgctgtctccacggaacagcctccgtctgctggctcttcgtggaaggccatttgtctttcaggtagacactcagcagccctcacggtcttagtgacgtgtgtgcctttctggtcacacagctgcccagtttcctgatcggggtggatttgtgtcccctaaggggtaaaacagccgtttaccgcagatcctctcattgtgcttttctagaataacacccttctaggggaggcgggtgggggagggagggatcataaccccttctgtgccttgggatgccggagctgggggacctggaggcccatcagccggagccacgtgaaaggtactgaagaaagctgagacccggctgtgaggagcgcctcagcggtgaggtggtttagggataaatgtttctggaaccctgtggtcccccataatgttgatagaatatcatatgcactgggagttaaatatatttaatttaatgatcattatatatgtgggggttaatatgttgtttttctgtccctttaaagtctttacatgtaattgtagctgtataatcgttatttttcttttgcatcttaagtcttagaaattaagatattccatcgtgaggatgagagaggtcctcagtgtgtttttggtctggttgtagggaaggactcaagtcctggaatgtcctccactggtctactgagttgcagtcacactgttccaatggattatttgctttcggttgtaaatttaattgtacatatggttgatttattatttttaaaaatacagactaactgatgtaatgtttatgtataagttgcaccaaaaatcaaggacaaaaataagtgtgtttgtttttacaggtgtgaaagtcacagcttgtaaataagtgttgtatgtattaaaccttttccagttctccaaagcgatgtatttttgtacacttgaaatagagtactcttaatttactgggcaaatgtgcttggaattgaacttgacaagattagctcaagcagatagagtcgggtccagcagtgggtggccctcgtgtgaatccccgtggatgtgcaagttgtggagagaaggagcaccgggttcctgcccagcactgtgcttgcgggaggcggtggggcatgggaggaaggaggcacagaccggggaaatatgacagccgtcatttccagtattctctgtgttgtcttttagctcattcaataaataaaggtggtgtgatttttttttcctcctgtctttttcatttgtagaaactggagacgtgtaaagaagataaataattgtgtaattaaactttccagaaatttatcttcctcatgtgcagtttaacaaacttggtcaaactagttagcaaattagaacttcagaatctaatgatagtttagggtttctaaaataaggttttttattgtaaaaattgacgattgccctgcatttctaccaagtcctgtgaataaagagatgggagatttgattccgtcagaagagactgtaatccgtgtcgtcagcctgggagccttccccagtgtaatgtagctttctctcttaccttctggaagagggaatgtttcatttattactgtttgattttcttgtatctggttctactcccaggatgaaattatccaactacatatatatttagaggaagaaagtgaaggggaaatttaaaatgtttacggcgcttaattgcctggaaatgaaatgaaatcaaatttatcagtttttttccccctaattacccaaaagatcttttgcaaactatgttacatgaatgcttctgcctctttaagacaaagaagaatgtcacccaaaattgtcatttttttcttaatgttcatcataaaagtcctaaaagagtaactgtaattggatgtttattgtttttatctaaagtaaggtgtatgtgtttgagacaagctggttttgttgataaagagatgttaaataattgtgaagccagatatgcaatgtgtatctaaaaagcaaggaatttgcagccgttttacaaatatctgtggaacatgtaaatactgtcaaatggaaaataaaataagttataatttttgtgaatttcatgggatgtcctatgattggaaaaattataactcttctgattctaatgtggaaattgttgtatttaatctgaaaatgactttacctacaacagttccattgtcagcacagcctaggagggtcagattcctgtattaattactcttagtggagatgccagatatcccatacagaattagcagagaaaatacacacaggcttctattcaaattttctttagtgcttaaaattaagttttaaaatgaaatcagacactgcaggtttgtatataaaatgaaaagctatactactttttataaaagggcaaactgggctgatgtaaatgttttactttcaactgtgttctttaaaataaatcctacctggtttttaaattttatttttcatgaaaatgctcctttctctacatttattcatcctatatacatcaggctgtaagaccccccccagtcatcattaatacaatgtgttgggattctgtgactggaaaaggtgacaagttggtgactttgacactgcaggtattccattttcatggtttactatgaaaagtcatttttcatattatgtaatatattgttagattaaaaccattgtattaagactttaaaatgtaagcattgtaattctgaaaatacacattttaagaagaaaaaaaaaaagtcgacgcggccgcgaatttaatagtagta

SEQ ID NO: 453230 - DNA, 2804 bp, Homo sapiens
aggccggaagtggctgaggccggcagcagcgggcggcagctgcggcgcaaccggctccggagctgcctggcgcggccgggcgggcggcgccgctcaggctcgggctccggctgggcccggcgcggcctcggggctgcccatggggcgcggggggccgggccggtgacgccggacgcccatggacgcctctgaggagccgctgccgccggtgatctacaccatggagaacaagcccatcgtcacctgtgctggagatcagaatttatttacctctgtttatccaacgctctctcagcagcttccaagagaaccaatggaatggagaaggtcctatggccgggctccgaagatgattcacctagagtctaactttgttcaattcaaagaggagctgctgcccaaagaaggaaacaaagctctgctcacgtttcccttcctccatatttactggacagagtgctgtgataccgaagtgtataaagctacagtaaaagatgacctcaccaagtggcagaatgttctgaaggctcatagctctgtggactggttaatagtgatagttgaaaatgatgccaagaaaaaaaacaaaaccaacatccttccccgaacctctattgtggacaaaataagaaatgatttttgtaataaacagagtgacaggtgtgttgtgctctccgaccccttgaaggactcttctcgaactcaggaatcctggaatgccttcctgaccaaactcaggacattgcttcttatgtcttttaccaaaaacctaggcaagtttgaggatgacatgagaaccttgagggagaagaggactgagccaggctggagcttttgtgaatatttcatggttcaggaggagcttgcctttgttttcgagatgctgcagcagttcgaggacgccctggtgcagtacgacgaactggacgccctcttctctcagtatgtggtcaacttcggggccggggatggtgccaactggctgacttttttctgccagccagtgaagagctggaacggattgatcctccgaaaacccatagatatggagaagcgggaatcgatccagaggcgagaagccaccctgttagatctgcgcagttacctgttctctcgccagtgcaccttgctgctcttcctgcagaggccgtgggaggtggcccagcgcgccctagagctgctgcacaactgcgtgcaggaactgaagctcttagaagtctctgtcccacctggtgctctggactgctgggtgtttctgagctgtctggaggtgttgcagaggatagaaggctgctgtgaccgggcacagatcgactcaaacattgcccacactgtggggctatggagctatgccacagaaaagttaaagtccttgggctatctatgtggacttgtgtcagagaaaggacctaactcagaagatctcaacaggacagttgaccttttggcaggtttgggagctgagcgaccagaaacagccaacacagctcagagtccttataagaaactgaaagaagcattatcgtcagtggaagcttttgaaaaacactacttagatttgtcccatgccaccattgaaatgtatacaagcattgggaggattcgatctgctaagtttgttggaaaagatctggcagagttttacatgaggaaaaaggctccacaaaaggcagaaatctatcttcaaggagcactgaaaaactacctggctgagggctgggcactccccatcacacacacaaggaagcagctggccgaatgtcaaaagcaccttggacaaattgaaaactacctgcagaccagcagcctcttagccagtgaccaccacctcactgaagaggagcgcaagcacttctgccaggagatacttgactttgccagccagccgtcagacagcccaggtcataagatagtgctacccatgcattcctttgcacaactgcgagatctccattttgatccctccaatgccgtggtccacgtgggcggcgttttgtgcgttgagataaccatgtacagccagatgcctgtgcctgttcacgtggagcagattgtggtcaatgtccacttcagcattgagaaaaacagctaccggaagactgcggagtggcttaccaagcacaagacgtccaatgggatcattaactttccacccgagaccgcacctttccctgtatcccaaaacagtttgcccgcgctggagttgtatgaaatgtttgagagaagcccatctgataactccttgaacacgactgggattatctgcagaaacgtccacatgctcctgagaaggcaggagagcagctcctctctagagatgccctcaggggtggctctggaggagggtgcccacgtgctgaggtgcagccacgtgaccctggaaccaggggccaaccagataacattcaggactcaggccaaggaacctggaacgtatacactcaggcagctgtgcgcctcggtgggctccgtgtggttcgtcctccctcacatctaccccattgtgcagtacgacgtgtactcacaggagccccagctgcacgtggagccgctggctggtgagtggggtccccagcctttgaggaggcgtgctgctggggcagttctgaggagacctgctgagatgccaggcttctcataagttttagctgtgtctgcctttaagagatattttgggtaacataatggaaattttgcctgggaactagctgactgcctcttttgtttatctgaatgtttgctttcctgtaattgctttttcatgtttaataaacatggtgtatctgaaaataagaaacacagaa

SEQ ID NO: 453231 - DNA, 1864 bp, Homo sapiens
  misc_feature (1856)..(1856): n is a, c, g, or t
aggccggaagtggctgaggccggcagcagcgggcggcagctgcggcgcaaccggctccggagctgcctggcgcggccgggcgggcggcgccgctcaggctcgggctccggctgggcccggcgcggcctcggggctgcccatggggcgcggggggccgggccggtgacgccggacgcccatggacgcctctgaggagccgctgccgccggtgatctacaccatggagaacaagcccatcgtcacctgtgctggagatcagaatttatttacctctgtttatccaacgctctctcagcagcttccaagagaaccaatggaatggagaaggtcctatggccgggctccgaagatgattcacctagagtctaactttgttcaattcaaagaggagctgctgcccaaagaaggaaacaaagctctgctcacgtttcccttcctccatatttactggacagagtgctgtgataccgaagtgtataaagctacagtaaaagatgacctcaccaagtggcagaatgttctgaaggctcatagctctgtggactggttaatagtgatagttgaaaatgatgccaagaaaaaaaacaaaaccaacatccttccccgaacctctattgtggacaaaataagaaatgatttttgtaataaacagagtgacaggtgtgttgtgctctccgaccccttgaaggactcttctcgaactcaggaatcctggaatgccttcctgaccaaactcaggacattgcttcttatgtcttttaccaaaaacctaggcaagtttgaggatgacatgagaaccttgagggagaagaggactgagccaggctggagcttttgtgaatatttcatggttcaggaggagcttgcctttgttttcgagatgctgcagcagttcgaggacgccctggtgcagtacgacgaactggacgccctcttctctcagtatgtggtcaacttcggggccgggggtataaaatgtcctttccacaactcagtggcctgctggtgatgcttcgattctgtccctcgttagaatcagagtggacgtccctttgccttccatccaggggttatctttggaatgctcgagtgctcattgctgtgaacttataaaatgcccttgggtgttcatctttcttttgcacttttaaataatatcttaagctcctttacaattaaagaattagcacagtgaaaccatacacagagagaaacattggttattgtcctcagtgtttttcgctgatacttattttgatgaaagtgataccacgttatatagctgtttctctgtcgctcctttttgttactcacagcccatcctgggcatctctccaggttagcaggtggggtttggagttgtttttgttacaattggtattcctggcttgattccattacctggtgttggacattgggttcttttatgcttcttgccaccacaagcagtgctgtagtgggcatctctgccaggtgttctttttgagaacccttgtcaccatgtgtgaaggaaggagtaattttgaggagccctggtgtcagcaggagaacctggagggagatgaagtgtggggacggtcagttctagctgtgagcactgtcctcactctggaactcatcagtggcgccgatggatactggctcatagtgcttctgaagatcaggtctggatatctcactctcctgagatgccagtatagacacagaaccaaagcaaagtgtttactaagtaaaaaaataaaataaaaaaacacttctatttcttatattttatgtgtcttttttttttttttttttgaaatggagccactgcactccagcctgggccacagagcaaaactctgtctcaaaaaaanagcacgag

SEQ ID NO: 453232 - DNA, 928 bp, Homo sapiens
  misc_feature (920)..(920): n is a, c, g, or t
aataataataatttaaaaaaactgttttccaggtataaaatgtcctttccacaactcagtggcctgctggtgatgcttcgattctgtccctcgttagaatcagagtggacgtccctttgccttccatccaggggttatctttggaatgctcgagtgctcattgctgtgaacttataaaatgcccttgggtgttcatctttcttttgcacttttaaataatatcttaagctcctttacaattaaagaattagcacagtgaaaccatacacagagagaaacattggttattgtcctcagtgtttttcgctgatacttattttgatgaaagtgataccacgttatatagctgtttctctgtcgctcctttttgttactcacagcccatcctgggcatctctccaggttagcaggtggggtttggagttgtttttgttacaattggtattcctggcttgattccattacctggtgttggacattgggttcttttatgcttcttgccaccacaagcagtgctgtagtgggcatctctgccaggtgttctttttgagaacccttgtcaccatgtgtgaaggaaggagtaattttgaggagccctggtgtcagcaggagaacctggagggagatgaagtgtggggacggtcagttctagctgtgagcactgtcctcactctggaactcatcagtggcgccgatggatactggctcatagtgcttctgaagatcaggtctggatatctcactctcctgagatgccagtatagacacagaaccaaagcaaagtgtttactaagtaaaaaaataaaataaaaaaacacttctatttcttatattttatgtgtcttttttttttttttttttgaaatggagccactgcactccagcctgggccacagagcaaaactctgtctcaaaaaaanagcacgag

SEQ ID NO: 453233 - DNA, 1530 bp, Homo sapiens
  misc_feature (1481)..(1481): n is a, c, g, or t
aggccggaagtggctgaggccggcagcagcgggcggcagctgcggcgcaaccggctccggagctgcctggcgcggccgggcgggcggcgccgctcaggctcgggctccggctgggcccggcgcggcctcggggctgcccatggggcgcggggggccgggccggtgacgccggacgcccatggacgcctctgaggagccgctgccgccggtgatctacaccatggagaacaagcccatcgtcacctgtgctggagatcagaatttatttacctctgtttatccaacgctctctcagcagcttccaagagaaccaatggaatggagaaggtcctatggccgggctccgaagatgattcacctagagtctaactttgttcaattcaaagaggagctgctgcccaaagaaggaaacaaagctctgctcacgtttcccttcctccatatttactggacagagtgctgtgataccgaagtgtataaagctacagtaaaagatgacctcaccaagtggcagaatgttctgaaggctcatagctctgtggactggttaatagtgatagttgaaaatgatgccaagaaaaaaaacaaaaccaacatccttccccgaacctctattgtggacaaaataagaaatgatttttgtaataaacagagtgacaggtgtgttgtgctctccgaccccttgaaggactcttctcgaactcaggaatcctggaatgccttcctgaccaaactcaggacattgcttcttatgtcttttaccaaaaacctaggcaagtttgaggatgacatgagaaccttgagggagaagaggactgagccaggctggagcttttgtgaatatttcatggttcaggaggagcttgcctttgttttcgagatgctgcagcagttcgaggacgccctggtgcagtacgacgaactggacgccctcttctctcagtatgtggtcaacttcggggccggggatggtgccaactggctgacttttttctgccagccagtgaagagctggaacggattgatcctccgaaaacccatagatatggagaagcgggaatcgatccagaggcgagaagccaccctgttagatctgcgcagttacctgttctctcgccagtgcaccttgctgctcttcctgcagaggccgtgggaggtggcccagcgcgccctagagctgctgcacaactgcgtgcaggaactgaagctcttagaagtctctgtcccacctggtgctctggactgctgggtgtttctgagctgtctggaggtgttgcagaggatagaaggctgctgtgaccgggcacagatcgactcaaacattgcccacactgtggggctatggagctatgccacagaaaagttaaagtccttgggctatctatgtggacttgtgtcagagaaaggacctaactcagaagatctcaacaggacagttgaccttttggcaggtttgggagctgagcgaccagaaacaggtncctccatgtataggtggtaaaagtaatgagtatgcgacgcagtgcgcgg

SEQ ID NO: 453234 - DNA, 396 bp, Homo sapiens
acatttcctttctattctctccctttcctgcccagacattatacaacgtgaaggctgagatctttcccccttcgggaatggagtattgcagaacaggctccctctgctccctggaggttttgatcacgaggctctcagacctcttggaggtggataaagatgaagcactgactgaatctgatgagcatttttcgacaaagcttatgtatgaaggtaggtggtctcgaacccatgggctcaagcagtcctcccgccttggcctcccagagtgttgggattacaggtgtgaggcactgcactcagcctatcttgcattttgaatggctcttttacccaggcatcatagcgttacaccctgtgccattagtcatgtgggaaacatggtttcctgagttg

SEQ ID NO: 453235 - DNA, 620 bp, Homo sapiens
tcgtggtgctgtgcatggagggtctttcccagatagtctgttcatgtctttgcaggtgtgttgtgctctccgaccccttgaaggactcttctcgaactcaggaatcctggaatgccttcctgaccaaactcaggacattgcttcttatgtcttttaccaaaaacctaggcaagtttgaggatgacatgagaaccttgagggagaagaggactgagccaggctggagcttttgtgaatatttcatggttcaggtacttgactcattacagaactagacagttccttctctccttccctcctttgttccctccctctctcctcctttctttctaagtaaggcacctctcgtggtaatctcattggcagagtttttaaaaacaaaaaacctggaatatctttaggactagaaaggaagtgtatggaagcagatggggcatgaaaaggacacacacactgccccggggagcctctgggggcaaaagctggagcagtttcagtgacagaataaataaggatagagtcgaggtttaacccatggaataaaattaatatccatgagtctgtatcgatagaaatcatcagttaaataaataaatggaggagaagggtcaactcttcca

SEQ ID NO: 453236 - DNA, 435 bp, Homo sapiens
agctaactgcaaaactgggtgacgtggtttcaaatgcctgattctttgactctaggccaaggaacctggaacgtatacactcaggcagctgtgcgcctcggtgggctccgtgtggttcgtcctccctcacatctaccccattgtgcagtacgacgtgtactcacaggagccccagctgcacgtggagccgctggctggtgagtggggtccccagcctttgaggaggcgtgctgctggggcagttctgaggagacctgctgagatgccaggcttctcataagttttagctgtgtctgcctttaagagatattttgggtaacataatggaaattttgcctgggaactagctgactgcctcttttgtttatctgaatgtttgctttcctgtaattgctttttcatgtttaataaacatggtgtatctgaaaataagaa

SEQ ID NO: 453237 - DNA, 6786 bp, Homo sapiens
catgcataccattacattatttgttgttctatttcccctcttctgatgaatgctgtttagttgttttctcagtgacttcaaacaattgtttacaggtcctatggccgggctccgaagatgattcacctagagtctaactttgttcaattcaaagaggagctgctgcccaaagaaggaaacaaagctctgctcacgtttcccttcctccatatttactggacagagtgctgtgataccgaagtgtataaagctacagtaaaagatgacctcaccaagtggcagaatgttctgaaggctcatagctctgtggactggttaatagtgatagttgaaaatgatgccaagaaaaaaaacaaaaccaacatccttccccgaacctctattgtggacaaaataagaaatgatttttgtaataaacagagtgacaggtgtgttgtgctctccgaccccttgaaggactcttctcgaactcaggaatcctggaatgccttcctgaccaaactcaggacattgcttcttatgtcttttaccaaaaacctaggcaagtttgaggatgacatgagaaccttgagggagaagaggactgagccaggctggagcttttgtgaatatttcatggttcaggaggagcttgcctttgttttcgagatgctgcagcagttcgaggacgccctggtgcagtacgacgaactggacgccctcttctctcagtatgtggtcaacttcggggccggggatggtgccaactggctgacttttttctgccagccagtgaagagctggaacggattgatcctccgaaaacccatagatatggagaagcgggaatcgatccagaggcgagaagccaccctgttagatctgcgcagttacctgttctctcgccagtgcaccttgctgctcttcctgcagaggccgtgggaggtggcccagcgcgccctagagctgctgcacaactgcgtgcaggaactgaagctcttagaagtctctgtcccacctggtgctctggactgctgggtgtttctgagctgtctggaggtgttgcagaggatagaaggctgctgtgaccgggcacagatcgactcaaacattgcccacactgtggggctatggagctatgccacagaaaagttaaagtccttgggctatctatgtggacttgtgtcagagaaaggacctaactcagaagatctcaacaggacagttgaccttttggcaggtttgggagctgagcgaccagaaacagccaacacagctcagagtccttataagaaactgaaagaagcattatcgtcagtggaagcttttgaaaaacactacttagatttgtcccatgccaccattgaaatgtatacaagcattgggaggattcgatctgctaagtttgttggaaaagatctggcagagttttacatgaggaaaaaggctccacaaaaggcagaaatctatcttcaaggagcactgaaaaactacctggctgagggctgggcactccccatcacacacacaaggaagcagctggccgaatgtcaaaagcaccttggacaaattgaaaactacctgcagaccagcagcctcttagccagtgaccaccacctcactgaagaggagcgcaagcacttctgccaggagatacttgactttgccagccagccgtcagacagcccaggtcataagatagtgctacccatgcattcctttgcacaactgcgagatctccattttgatccctccaatgccgtggtccacgtgggcggcgttttgtgcgttgagataaccatgtacagccagatgcctgtgcctgttcacgtggagcagattgtggtcaatgtccacttcagcattgagaaaaacagctaccggaagactgcggagtggcttaccaagcacaagacgtccaatgggatcattaactttccacccgagaccgcacctttccctgtatcccaaaacagtttgcccgcgctggagttgtatgaaatgtttgagagaagcccatctgataactccttgaacacgactgggattatctgcagaaacgtccacatgctcctgagaaggcaggagagcagctcctctctagagatgccctcaggggtggctctggaggagggtgcccacgtgctgaggtgcagccacgtgaccctggaaccaggggccaaccagataacattcaggactcaggccaaggaacctggaacgtatacactcaggcagctgtgcgcctcggtgggctccgtgtggttcgtcctccctcacatctaccccattgtgcagtacgacgtgtactcacaggagccccagctgcacgtggagccgctggctgatagccttctggcaggcattcctcagagagtcaagttcactgtcactaccggccattatacgataaagaatggagacagcctgcagcttagcaatgccgaagccatgctcatcctgtgccaggcggagagcagggctgtggtctactccaacacgagagaacagtcttctgaggccgcgctccggattcagtcctccgacaaggtcacgagcatcagtctgcctgttgcgcctgcgtaccacgtgatcgaatttgaactggaagttctctctttaccttcagccccagcactcggaggggagagtgacatgctggggatggcagagccccacaggaagcataaggacaaacagagaactggccgctgcatggttaccacagaccacaaagtgtcgattgactgcccgtggtccatctactccacagtcatcgcactgaccttcagcgtacccttcaggaccacacacagcctcctgtcctcaggaacacggaaatatgttcaagtttgtgtccagaatttgtcagaacttgactttcagctgtcagatagttatcttgtagataccggtgatagtaccgacctgcaactagtaccactgaacacgcagtcccagcagcccatctacagcaagcagtcggtgttcttcgtctgggaactcaagtggacagaagagcctcccccttctctgcattgccggttctctgttggattttccccagcttctgaggaacagctgtctatctccttaaagccgtatacttatgaatttaaagtggaaaatttttttacattatacaacgtgaaggctgagatctttcccccttcgggaatggagtattgcagaacaggctccctctgctccctggaggttttgatcacgaggctctcagacctcttggaggtggataaagatgaagcactgactgaatctgatgagcatttttcgacaaagcttatgtatgaagttgtcgacaacagtagcaactgggcagtgtgtgggaaaagctgcggtgtcatctccatgccagtggctgctcgggccactcacagggtccacatggaagtgatgccgctcttcgccgggtatctccccctgcccgacgtcaggctgttcaagtacctcccccatcattctgcacactcctcccaactggacgctgacagctggatagaaaacgacagcctgtcagtagacaagcacggggacgaccagccggacagcagcagcctcaagagcaggggcagcgtgcattcggcctgcagcagcgagcacaaaggcctacccatgccccggctgcaggcactgccggccggccaggtcttcaactccagctcgggcacacaagtcctggtcatccccagccaagatgaccacgtcctggaagtcagtgtaacatgacaacgccagggtgaacacacgccacttcccagctaggagtgcactttatgggactgtgactggactcttccgttctggctccagccagaccttcagtggtcctgcctggccgtggggacatcagagagtgtcatcacgcagctggccagctgagttctgttgttgttttcatgccgcctgtgatctcagattcctgcttttctcaccccgtccccatgctggtgtccgacgccgcttactcagagccctggcctccctccccctacctcacacgctgctcatgaaagtttccacccacgctgtctccacggaacagcctccgtctgctggctcttcgtggaaggccatttgtctttcaggtagacactcagcagccctcacggtcttagtgacgtgtgtgcctttctggtcacacagctgcccagtttcctgatcggggtggatttgtgtcccctaaggggtaaaacagccgtttaccgcagatcctctcattgtgcttttctagaataacacccttctaggggaggcgggtgggggagggagggatcataaccccttctgtgccttgggatgccggagctgggggacctggaggcccatcagccggagccacgtgaaaggtactgaagaaagctgagacccggctgtgaggagcgcctcagcggtgaggtggtttagggataaatgtttctggaaccctgtggtcccccataatgttgatagaatatcatatgcactgggagttaaatatatttaatttaatgatcattatatatgtgggggttaatatgttgtttttctgtccctttaaagtctttacatgtaattgtagctgtataatcgttatttttcttttgcatcttaagtcttagaaattaagatattccatcgtgaggatgagagaggtcctcagtgtgtttttggtctggttgtagggaaggactcaagtcctggaatgtcctccactggtctactgagttgcagtcacactgttccaatggattatttgctttcggttgtaaatttaattgtacatatggttgatttattatttttaaaaatacagactaactgatgtaatgtttatgtataagttgcaccaaaaatcaaggacaaaaataagtgtgtttgtttttacaggtgtgaaagtcacagcttgtaaataagtgttgtatgtattaaaccttttccagttctccaaagcgatgtatttttgtacacttgaaatagagtactcttaatttactgggcaaatgtgcttggaattgaacttgacaagattagctcaagcagatagagtcgggtccagcagtgggtggccctcgtgtgaatccccgtggatgtgcaagttgtggagagaaggagcaccgggttcctgcccagcactgtgcttgcgggaggcggtggggcatgggaggaaggaggcacagaccggggaaatatgacagccgtcatttccagtattctctgtgttgtcttttagctcattcaataaataaaggtggtgtgatttttttttcctcctgtctttttcatttgtagaaactggagacgtgtaaagaagataaataattgtgtaattaaactttccagaaatttatcttcctcatgtgcagtttaacaaacttggtcaaactagttagcaaattagaacttcagaatctaatgatagtttagggtttctaaaataaggttttttattgtaaaaattgacgattgccctgcatttctaccaagtcctgtgaataaagagatgggagatttgattccgtcagaagagactgtaatccgtgtcgtcagcctgggagccttccccagtgtaatgtagctttctctcttaccttctggaagagggaatgtttcatttattactgtttgattttcttgtatctggttctactcccaggatgaaattatccaactacatatatatttagaggaagaaagtgaaggggaaatttaaaatgtttacggcgcttaattgcctggaaatgaaatgaaatcaaatttatcagtttttttccccctaattacccaaaagatcttttgcaaactatgttacatgaatgcttctgcctctttaagacaaagaagaatgtcacccaaaattgtcatttttttcttaatgttcatcataaaagtcctaaaagagtaactgtaattggatgtttattgtttttatctaaagtaaggtgtatgtgtttgagacaagctggttttgttgataaagagatgttaaataattgtgaagccagatatgcaatgtgtatctaaaaagcaaggaatttgcagccgttttacaaatatctgtggaacatgtaaatactgtcaaatggaaaataaaataagttataatttttgtgaatttcatgggatgtcctatgattggaaaaattataactcttctgattctaatgtggaaattgttgtatttaatctgaaaatgactttacctacaacagttccattgtcagcacagcctaggagggtcagattcctgtattaattactcttagtggagatgccagatatcccatacagaattagcagagaaaatacacacaggcttctattcaaattttctttagtgcttaaaattaagttttaaaatgaaatcagacactgcaggtttgtatataaaatgaaaagctatactactttttataaaagggcaaactgggctgatgtaaatgttttactttcaactgtgttctttaaaataaatcctacctggtttttaaattttatttttcatgaaaatgctcctttctctacatttattcatcctatatacatcaggctgtaagaccccccccagtcatcattaatacaatgtgttgggattctgtgactggaaaaggtgacaagttggtgactttgacactgcaggtattccattttcatggtttactatgaaaagtcatttttcatattatgtaatatattgttagattaaaaccattgtattaagactttaaaatgtaagcattgtaattctgaaaatacacattttaagaagaaaaaaaaaaagtcgacgcggccgcgaatttaatagtagta

SEQ ID NO: 453238 - DNA, 4253 bp, Homo sapiens
ctgggcagcagtggtggtggctgtgctgtccgtcggcgagtggtctgagagtgtctttgtgcttcctcctcaggtgtcgattgactgcccgtggtccatctactccacagtcatcgcactgaccttcagcgtacccttcaggaccacacacagcctcctgtcctcaggaacacggaaatatgttcaagtttgtgtccagaatttgtcagaacttgactttcagctgtcagatagttatcttgtagataccggtgatagtaccgacctgcaactagtaccactgaacacgcagtcccagcagcccatctacagcaagcagtcggtgttcttcgtctgggaactcaagtggacagaagagcctcccccttctctgcattgccggttctctgttggattttccccagcttctgaggaacagctgtctatctccttaaagccgtatacttatgaatttaaagtggaaaatttttttggtggccctggcccccttgccagattccagctggccgtcagtgctcgcgtgtctctctgaagaggctctgcggttctggtccctgtgcctgagctccaggtgccgccagacattatacaacgtgaaggctgagatctttcccccttcgggaatggagtattgcagaacaggctccctctgctccctggaggttttgatcacgaggctctcagacctcttggaggtggataaagatgaagcactgactgaatctgatgagcatttttcgacaaagcttatgtatgaagttgtcgacaacagtagcaactgggcagtgtgtgggaaaagctgcggtgtcatctccatgccagtggctgctcgggccactcacagggtccacatggaagtgatgccgctcttcgccgggtatctccccctgcccgacgtcaggctgttcaagtacctcccccatcattctgcacactcctcccaactggacgctgacagctggatagaaaacgacagcctgtcagtagacaagcacggggacgaccagccggacagcagcagcctcaagagcaggggcagcgtgcattcggcctgcagcagcgagcacaaaggcctacccatgccccggctgcaggcactgccggccggccaggtcttcaactccagctcgggcacacaagtcctggtcatccccagccaagatgaccacgtcctggaagtcagtgtaacatgacaacgccagggtgaacacacgccacttcccagctaggagtgcactttatgggactgtgactggactcttccgttctggctccagccagaccttcagtggtcctgcctggccgtggggacatcagagagtgtcatcacgcagctggccagctgagttctgttgttgttttcatgccgcctgtgatctcagattcctgcttttctcaccccgtccccatgctggtgtccgacgccgcttactcagagccctggcctccctccccctacctcacacgctgctcatgaaagtttccacccacgctgtctccacggaacagcctccgtctgctggctcttcgtggaaggccatttgtctttcaggtagacactcagcagccctcacggtcttagtgacgtgtgtgcctttctggtcacacagctgcccagtttcctgatcggggtggatttgtgtcccctaaggggtaaaacagccgtttaccgcagatcctctcattgtgcttttctagaataacacccttctaggggaggcgggtgggggagggagggatcataaccccttctgtgccttgggatgccggagctgggggacctggaggcccatcagccggagccacgtgaaaggtactgaagaaagctgagacccggctgtgaggagcgcctcagcggtgaggtggtttagggataaatgtttctggaaccctgtggtcccccataatgttgatagaatatcatatgcactgggagttaaatatatttaatttaatgatcattatatatgtgggggttaatatgttgtttttctgtccctttaaagtctttacatgtaattgtagctgtataatcgttatttttcttttgcatcttaagtcttagaaattaagatattccatcgtgaggatgagagaggtcctcagtgtgtttttggtctggttgtagggaaggactcaagtcctggaatgtcctccactggtctactgagttgcagtcacactgttccaatggattatttgctttcggttgtaaatttaattgtacatatggttgatttattatttttaaaaatacagactaactgatgtaatgtttatgtataagttgcaccaaaaatcaaggacaaaaataagtgtgtttgtttttacaggtgtgaaagtcacagcttgtaaataagtgttgtatgtattaaaccttttccagttctccaaagcgatgtatttttgtacacttgaaatagagtactcttaatttactgggcaaatgtgcttggaattgaacttgacaagattagctcaagcagatagagtcgggtccagcagtgggtggccctcgtgtgaatccccgtggatgtgcaagttgtggagagaaggagcaccgggttcctgcccagcactgtgcttgcgggaggcggtggggcatgggaggaaggaggcacagaccggggaaatatgacagccgtcatttccagtattctctgtgttgtcttttagctcattcaataaataaaggtggtgtgatttttttttcctcctgtctttttcatttgtagaaactggagacgtgtaaagaagataaataattgtgtaattaaactttccagaaatttatcttcctcatgtgcagtttaacaaacttggtcaaactagttagcaaattagaacttcagaatctaatgatagtttagggtttctaaaataaggttttttattgtaaaaattgacgattgccctgcatttctaccaagtcctgtgaataaagagatgggagatttgattccgtcagaagagactgtaatccgtgtcgtcagcctgggagccttccccagtgtaatgtagctttctctcttaccttctggaagagggaatgtttcatttattactgtttgattttcttgtatctggttctactcccaggatgaaattatccaactacatatatatttagaggaagaaagtgaaggggaaatttaaaatgtttacggcgcttaattgcctggaaatgaaatgaaatcaaatttatcagtttttttccccctaattacccaaaagatcttttgcaaactatgttacatgaatgcttctgcctctttaagacaaagaagaatgtcacccaaaattgtcatttttttcttaatgttcatcataaaagtcctaaaagagtaactgtaattggatgtttattgtttttatctaaagtaaggtgtatgtgtttgagacaagctggttttgttgataaagagatgttaaataattgtgaagccagatatgcaatgtgtatctaaaaagcaaggaatttgcagccgttttacaaatatctgtggaacatgtaaatactgtcaaatggaaaataaaataagttataatttttgtgaatttcatgggatgtcctatgattggaaaaattataactcttctgattctaatgtggaaattgttgtatttaatctgaaaatgactttacctacaacagttccattgtcagcacagcctaggagggtcagattcctgtattaattactcttagtggagatgccagatatcccatacagaattagcagagaaaatacacacaggcttctattcaaattttctttagtgcttaaaattaagttttaaaatgaaatcagacactgcaggtttgtatataaaatgaaaagctatactactttttataaaagggcaaactgggctgatgtaaatgttttactttcaactgtgttctttaaaataaatcctacctggtttttaaattttatttttcatgaaaatgctcctttctctacatttattcatcctatatacatcaggctgtaagaccccccccagtcatcattaatacaatgtgttgggattctgtgactggaaaaggtgacaagttggtgactttgacactgcaggtattccattttcatggtttactatgaaaagtcatttttcatattatgtaatatattgttagattaaaaccattgtattaagactttaaaatgtaagcattgtaattctgaaaatacacattttaagaagaaaaaaaaaaagtcgacgcggccgcgaatttaatagtagta

SEQ ID NO: 453239 - DNA, 2807 bp, Homo sapiens
aggccggaagtggctgaggccggcagcagcgggcggcagctgcggcgcaaccggctccggagctgcctggcgcggccgggcgggcggcgccgctcaggctcgggctccggctgggcccggcgcggcctcggggctgcccatggggcgcggggggccgggccggtgacgccggacgcccatggacgcctctgaggagccgctgccgccggtgatctacaccatggagaacaagcccatcgtcacctgtgctggagatcagaatttatttacctctgtttatccaacgctctctcagcagcttccaagagaaccaatggaatggagaaggtcctatggccgggctccgaagatgattcacctagagtctaactttgttcaattcaaagaggagctgctgcccaaagaaggaaacaaagctctgctcacgtttcccttcctccatatttactggacagagtgctgtgataccgaagtgtataaagctacagtaaaagatgacctcaccaagtggcagaatgttctgaaggctcatagctctgtggactggttaatagtgatagttgaaaatgatgccaagaaaaaaaacaaaaccaacatccttccccgaacctctattgtggacaaaataagaaatgatttttgtaataaacagagtgacaggtgtgttgtgctctccgaccccttgaaggactcttctcgaactcaggaatcctggaatgccttcctgaccaaactcaggacattgcttcttatgtcttttaccaaaaacctaggcaagtttgaggatgacatgagaaccttgagggagaagaggactgagccaggctggagcttttgtgaatatttcatggttcaggaggagcttgcctttgttttcgagatgctgcagcagttcgaggacgccctggtgcagtacgacgaactggacgccctcttctctcagtatgtggtcaacttcggggccggggatggtgccaactggctgacttttttctgccagccagtgaagagctggaacggattgatcctccgaaaacccatagatatggagaagcgggaatcgatccagaggcgagaagccaccctgttagatctgcgcagttacctgttctctcgccagtgcaccttgctgctcttcctgcagaggccgtgggaggtggcccagcgcgccctagagctgctgcacaactgcgtgcaggaactgaagctcttagaagtctctgtcccacctggtgctctggactgctgggtgtttctgagctgtctggaggtgttgcagaggatagaaggctgctgtgaccgggcacagatcgactcaaacattgcccacactgtggggctatggagctatgccacagaaaagttaaagtccttgggctatctatgtggacttgtgtcagagaaaggacctaactcagaagatctcaacaggacagttgaccttttggcaggtttgggagctgagcgaccagaaacagccaacacagctcagagtccttataagaaactgaaagaagcattatcgtcagtggaagcttttgaaaaacactacttagatttgtcccatgccaccattgaaatgtatacaagcattgggaggattcgatctgctaagtttgttggaaaagatctggcagagttttacatgaggaaaaaggctccacaaaaggcagaaatctatcttcaaggagcactgaaaaactacctggctgagggctgggcactccccatcacacacacaaggaagcagctggccgaatgtcaaaagcaccttggacaaattgaaaactacctgcagaccagcagcctcttagccagtgaccaccacctcactgaagaggagcgcaagcacttctgccaggagatacttgactttgccagccagccgtcagacagcccaggtcataagatagtgctacccatgcattcctttgcacaactgcgagatctccattttgatccctccaatgccgtggtccacgtgggcggcgttttgtgcgttgagataaccatgtacagccagatgcctgtgcctgttcacgtggagcagattgtggtcaatgtccacttcagcattgagaaaaacagctaccggaagactgcggagtggcttaccaagcacaagacgtccaatgggatcattaactttccacccgagaccgcacctttccctgtatcccaaaacagtttgcccgcgctggagttgtatgaaatgtttgagagaagcccatctgataactccttgaacacgactgggattatctgcagaaacgtccacatgctcctgagaaggcaggagagcagctcctctctagagatgccctcaggggtggctctggaggagggtgcccacgtgctgaggtgcagccacgtgaccctggaaccaggggccaaccagataacattcaggactcaggtatgcgttcagggtgggaacttgactttcaagtttgtaaagcagggccgtggagcttacaagaactgtctggagtgtgctgtgaattgagtagagtcctttgttctcctaaccctgtttttgtctctgtccttatacaaaaatacactgatgttttctttcgtgtttaaaacacaaaacacaaaaacaacacaacaaacacaaaaaacacacacaaaacaacaaaaccaaaaaaaacaagacagaaacaacgaaaagataatgacagactagacaaagagagcaaatagaagaatagtataaacaaagaaaagacgcctagagcaacgagggagatataaggatgacggggcgtgaggtggcgcgccccctgtccttcaacaggtttgtg

SEQ ID NO: 453240 - DNA, 423 bp, Homo sapiens
  misc_feature (415)..(415): n is a, c, g, or t
gcggccgcctactactactactactgctcgaattcaagcttctaacgatgtacggggacatgtgtgaaggaaggagtaattttgaggagccctggtgtcagcaggagaacctggagggagatgaagtgtggggacggtcagttctagctgtgagcactgtcctcactctggaactcatcagtggcgccgatggatactggctcatagtgcttctgaagatcaggtctggatatctcactctcctgagatgccagtatagacacagaaccaaagcaaagtgtttactaagtaaaaaaataaaataaaaaaacacttctatttcttatattttatgtgtcttttttttttttttttttgaaatggagccactgcactccagcctgggccacagagcaaaactctgtctcaaaaaaanagcacgag

SEQ ID NO: 453241 - DNA, 416 bp, Homo sapiens
gccgaggccggaagtggctgaggccggcagcagcgggcggcagctgcggcgcaaccggctccggagctgcctggcgcggccgggcgggcggcgccgctcaggctcgggctccggctgggcccggcgcggcctcggggctgcccatggggcgcggggggccgggccggtgacgccggacgcccatggacgcctctgaggagccgctgccgccggtgatctacaccatggagaacaagcccatcgtcacctgtgagtgcccggaggcggggagggcgcggcggtcgttgggcgggcccgggccctggcgttatgcacccggcgcccccagaccttcagcccccggcgcgctccgggctgggccgcttcctggaggtgtgaccagggctgcggctgaggcggggccctctgacttttcg

SEQ ID NO: 453242 - DNA, 8073 bp, Homo sapiens
acgcggcgcggaggctggcccgggacgcgcccggagcccagggaaggagggaggaggggagggtcgcggccggccgccatggggccgggggcccgtggccgccgccgccgccgtcgcccgatgtcgccgccaccgccaccgccacccgtgcgggcgctgcccctgctgctgctgctagcggggccgggggctgcagcccccccttgcctggacggaagcccgtgtgcaaatggaggtcgttgcacccagctgccctcccgggaggctgcctgcctgtgcccgcctggctgggtgggtgagcggtgtcagctggaggacccctgtcactcaggcccctgtgctggccgtggtgtctgccagagttcagtggtggctggcaccgcccgattctcatgccggtgcccccgtggcttccgaggccctgactgctccctgccagatccctgcctcagcagcccttgtgcccacggtgcccgctgctcagtggggcccgatggacgcttcctctgctcctgcccacctggctaccagggccgcagctgccgaagcgacgtggatgagtgccgggtgggtgagccctgccgccatggtggcacctgcctcaacacacctggctccttccgctgccagtgtccagctggctacacagggccactatgtgagaaccccgcggtgccctgtgcgccctcaccatgccgtaacgggggcacctgcaggcagagtggcgacctcacttacgactgtgcctgtcttcctgggtttgagggtcagaattgtgaagtgaacgtggacgactgtccaggacaccgatgtctcaatggggggacatgcgtggatggcgtcaacacctataactgccagtgccctcctgagtggacaggccagttctgcacggaggacgtggatgagtgtcagctgcagcccaacgcctgccacaatgggggtacctgcttcaacacgctgggtggccacagctgcgtgtgtgtcaatggctggacaggtgagagctgcagtcagaatatcgatgactgtgccacagccgtgtgcttccatggggccacctgccatgaccgcgtggcttctttctactgtgcctgccccatgggcaagactggcctcctgtgtcacctggatgacgcctgtgtcagcaacccctgccacgaggatgctatctgtgacacaaatccggtgaacggccgggccatttgcacctgtcctcccggcttcacgggtggggcatgtgaccaggatgtggacgagtgctctatcggcgccaacccctgcgagcacttgggcaggtgcgtgaacacgcagggctccttcctgtgccagtgcggtcgtggctacactggacctcgctgtgagaccgatgtcaacgagtgtctgtcggggccctgccgaaaccaggccacgtgcctcgaccgcataggccagttcacctgtatctgtatggcaggcttcacaggaacctattgcgaggtggacattgacgagtgtcagagtagcccctgtgtcaacggtggggtctgcaaggaccgagtcaatggcttcagctgcacctgcccctcgggcttcagcggctccacgtgtcagctggacgtggacgaatgcgccagcacgccctgcaggaatggcgccaaatgcgtggaccagcccgatggctacgagtgccgctgtgccgagggctttgagggcacgctgtgtgatcgcaacgtggacgactgctcccctgacccatgccaccatggtcgctgcgtggatggcatcgccagcttctcatgtgcctgtgctcctggctacacgggcacacgctgcgagagccaggtggacgaatgccgcagccagccctgccgccatggcggcaaatgcctagacctggtggacaagtacctctgccgctgcccttctgggaccacaggtgtgaactgcgaagtgaacattgacgactgtgccagcaacccctgcacctttggagtctgccgtgatggcatcaaccgctacgactgtgtctgccaacctggcttcacagggcccctttgtaacgtggagatcaatgagtgtgcttccagcccatgcggcgagggaggttcctgtgtggatggggaaaatggcttccgctgcctctgcccgcctggctccttgcccccactctgcctccccccgagccatccctgtgcccatgagccctgcagtcacggcatctgctatgatgcacctggcgggttccgctgtgtgtgtgagcctggctggagtggcccccgctgcagccagagcctggcccgagacgcctgtgagtcccagccgtgcagggccggtgggacatgcagcagcgatggaatgggtttccactgcacctgcccgcctggtgtccagggacgtcagtgtgaactcctctccccctgcaccccgaacccctgtgagcatgggggccgctgcgagtctgcccctggccagctgcctgtctgctcctgcccccagggctggcaaggcccacgatgccagcaggatgtggacgagtgtgctggccccgcaccctgtggccctcatggtatctgcaccaacctggcagggagtttcagctgcacctgccatggagggtacactggcccttcctgtgatcaggacatcaatgactgtgaccccaacccatgcctgaacggtggctcgtgccaagacggcgtgggctccttttcctgctcctgcctccctggtttcgccggcccacgatgcgcccgcgatgtggatgagtgcctgagcaacccctgcggcccgggcacctgtaccgaccacgtggcctccttcacctgcacctgcccgccgggctacggaggcttccactgcgaacaggacctgcccgactgcagccccagctcctgcttcaatggcgggacctgtgtggacggcgtgaactcgttcagctgcctgtgccgtcccggctacacaggagcccactgccaacatgaggcagacccctgcctctcgcggccctgcctacacgggggcgtctgcagcgccgcccaccctggcttccgctgcacctgcctcgagagcttcacgggcccgcagtgccagacgctggtggattggtgcagccgccagccttgtcaaaacgggggtcgctgcgtccagactggggcctattgcctttgtccccctggatggagcggacgcctctgtgacatccgaagcttgccctgcagggaggccgcagcccagatcggggtgcggctggagcagctgtgtcaggcgggtgggcagtgtgtggatgaagacagctcccactactgcgtgtgcccagagggccgtactggtagccactgtgagcaggaggtggacccctgcttggcccagccctgccagcatggggggacctgccgtggctatatggggggctacatgtgtgagtgtcttcctggctacaatggtgataactgtgaggacgacgtggacgagtgtgcctcccagccctgccagcacgggggttcatgcattgacctcgtggcccgctatctctgctcctgtcccccaggaacgctgggggtgctctgcgagattaatgaggatgactgcggcccaggcccaccgctggactcagggccccggtgcctacacaatggcacctgcgtggacctggtgggtggtttccgctgcacctgtcccccaggatacactggtttgcgctgcgaggcagacatcaatgagtgtcgctcaggtgcctgccacgcggcacacacccgggactgcctgcaggacccaggcggaggtttccgttgcctttgtcatgctggcttctcaggtcctcgctgtcagactgtcctgtctccctgcgagtcccagccatgccagcatggaggccagtgccgtcctagcccgggtcctgggggtgggctgaccttcacctgtcactgtgcccagccgttctggggtccgcgttgcgagcgggtggcgcgctcctgccgggagctgcagtgcccggtgggcgtcccatgccagcagacgccccgcgggccgcgctgcgcctgccccccagggttgtcgggaccctcctgccgcagcttcccggggtcgccgccgggggccagcaacgccagctgcgcggccgccccctgtctccacgggggctcctgccgccccgcgccgctcgcgcccttcttccgctgcgcttgcgcgcagggctggaccgggccgcgctgcgaggcgcccgccgcggcacccgaggtctcggaggagccgcggtgcccgcgcgccgcctgccaggccaagcgcggggaccagcgctgcgaccgcgagtgcaacagcccaggctgcggctgggacggcggcgactgctcgctgagcgtgggcgacccctggcggcaatgcgaggcgctgcagtgctggcgcctcttcaacaacagccgctgcgaccccgcctgcagctcgcccgcctgcctctacgacaacttcgactgccacgccggtggccgcgagcgcacttgcaacccggtgtacgagaagtactgcgccgaccactttgccgacggccgctgcgaccagggctgcaacacggaggagtgcggctgggatgggctggattgtgccagcgaggtgccggccctgctggcccgcggcgtgctggtgctcacagtgctgctgccgccggaggagctactgcgttccagcgccgactttctgcagcggctcagcgccatcctgcgcacctcgctgcgcttccgcctggacgcgcacggccaggccatggtcttcccttaccaccggcctagtcctggctccgaaccccgggcccgtcgggagctggcccccgaggtgatcggctcggtagtaatgctggagattgacaaccggctctgcctgcagtcgcctgagaatgatcactgcttccccgatgcccagagcgccgctgactacctgggagcgttgtcagcggtggagcgcctggacttcccgtacccactgcgggacgtgcggggggagccgctggagcctccagaacccagcgtcccgctgctgccactgctagtggcgggcgctgtcttgctgctggtcattctcgtcctgggtgtcatggtggcccggcgcaagcgcgagcacagcaccctctggttccctgagggcttctcactgcacaaggacgtggcctctggtcacaagggccggcgggaacccgtgggccaggacgcgctgggcatgaagaacatggccaagggtgagagcctgatgggggaggtggccacagactggatggacacagagtgcccagaggccaagcggctaaaggtagaggagccaggcatgggggctgaggaggctgtggattgccgtcagtggactcaacaccatctggttgctgctgacatccgcgtggcaccagccatggcactgacaccaccacagggcgacgcagatgctgatggcatggatgtcaatgtgcgtggcccagatggcttcaccccgctaatgctggcttccttctgtgggggggctctggagccaatgccaactgaagaggatgaggcagatgacacatcagctagcatcatctccgacctgatctgccagggggctcagcttggggcacggactgaccgtactggcgagactgctttgcacctggctgcccgttatgcccgtgctgatgcagccaagcggctgctggatgctggggcagacaccaatgcccaggaccactcaggccgcactcccctgcacacagctgtcacagccgatgcccagggtgtcttccagattctcatccgaaaccgctctacagacttggatgcccgcatggcagatggctcaacggcactgatcctggcggcccgcctggcagtagagggcatggtggaagagctcatcgccagccatgctgatgtcaatgctgtggatgagcttgggaaatcagccttacactgggctgcggctgtgaacaacgtggaagccactttggccctgctcaaaaatggagccaataaggacatgcaggatagcaaggaggagacccccctattcctggccgcccgcgagggcagctatgaggctgccaagctgctgttggaccactttgccaaccgtgagatcaccgaccacctggacaggctgccgcgggacgtagcccaggagagactgcaccaggacatcgtgcgcttgctggatcaacccagtgggccccgcagcccccccggtccccacggcctggggcctctgctctgtcctccaggggccttcctccctggcctcaaagcggcacagtcggggtccaagaagagcaggaggccccccgggaaggcggggctggggccgcaggggccccgggggcggggcaagaagctgacgctggcctgcccgggccccctggctgacagctcggtcacgctgtcgcccgtggactcgctggactccccgcggcctttcggtgggccccctgcttcccctggtggcttcccccttgaggggccctatgcagctgccactgccactgcagtgtctctggcacagcttggtggcccaggccgggcgggtctagggcgccagccccctggaggatgtgtactcagcctgggcctgctgaaccctgtggctgtgcccctcgattgggcccggctgcccccacctgcccctccaggcccctcgttcctgctgccactggcgccgggaccccagctgctcaacccagggacccccgtctccccgcaggagcggcccccgccttacctggcagtcccaggacatggcgaggagtacccggtggctggggcacacagcagccccccaaaggcccgcttcctgcgggttcccagtgagcacccttacctgaccccatcccccgaatcccctgagcactgggccagcccctcacctccctccctctcagactggtccgaatccacgcctagcccagccactgccactggggccatggccaccaccactggggcactgcctgcccagccacttcccttgtctgttcccagctcccttgctcaggcccagacccagctggggccccagccggaagttacccccaagaggcaagtgttggcctgagacgctcgtcagttcttagatcttgggggcctaaagagacccccgtcctgcctcctttctttctctgtctcttccttccttttagtctttttcatcctcttctctttccaccaaccctcctgcatccttgccttgcagcgtgaccgagataggtcatcagcccagggcttcagtcttcctttatttataatgggtgggggctaccacccaccctctcagtcttgtgaagagtctgggacctccttcttccccacttctctcttccctcattcctttctctctccttctggcctctcatttccttacactctgacatgaatgaattattattatttttctttttctttttttttttacattttgtatagaaacaaattcatttaaacaaacttattattattattttttacaaaatatatatatggagatgctccctccccctgtgaaccccccagtgcccccgtggggctgagtctgtgggcccattcggccaagctggattctgtgtacctagtacacaggcatgactgggatcccgtgtaccgagtacacgacccaggtatgtaccaagtaggcacccttgggcgcacccactggggccaggggtcgggggagtgttgggagcctcctccccaccccacctccctcacttcactgcattccagattggacatgttccatagccttgctggggaagggcccactgccaactccctctgccccagccccacccttggccatctccctttgggaactagggggctgctggtgggaaatgggagccagggcagatgtatgcattcctttatgtccctgtaaatgtgggactacaagaagaggagctgcctgagtggtactttctcttcctggtaatcctctggcccagccttatggcagaatagaggtatttttaggctatttttgtaatatggcttctggtcaaaatccctgtgtagctgaattcccaagccctgcattgtacagccccccactcccctcaccacctaataaaggaatagttaacactca

SEQ ID NO: 453243 - DNA, 5709 bp, Homo sapiens
caggaattagatcaggcacaattagcagcgtttgcttggcagcttaaagggaccttttggttttcccaacatcctgcccttgccacataggtgaggtttccagataaaggaggggacgaggccacagaaggggatggatttagattcctctgaccaaatgcaccccatcccagttgaacctggtttcctcctgaattcttctcaatccaaggcatatcccagtcagactgggctaatgggggcaaggtaggtgaccagaccgccttcctcctgtccgcagacccatgcctgaacggtggctcgtgccaagacggcgtgggctccttttcctgctcctgcctccctggtttcgccggcccacgatgcgcccgcgatgtggatgagtgcctgagcaacccctgcggcccgggcacctgtaccgaccacgtggcctccttcacctgcacctgcccgccgggctacggaggcttccactgcgaacaggacctgcccgactgcagccccagctcctgcttcaatggcgggacctgtgtggacggcgtgaactcgttcagctgcctgtgccgtcccggctacacaggagcccactgccaacatgaggcagacccctgcctctcgcggccctgcctacacgggggcgtctgcagcgccgcccaccctggcttccgctgcacctgcctcgagagcttcacgggcccgcagtgccagacgctggtggattggtgcagccgccagccttgtcaaaacgggggtcgctgcgtccagactggggcctattgcctttgtccccctggatggagcggacgcctctgtgacatccgaagcttgccctgcagggaggccgcagcccagatcggggtgcggctggagcagctgtgtcaggcgggtgggcagtgtgtggatgaagacagctcccactactgcgtgtgcccagagggccgtactggtagccactgtgagcaggaggtggacccctgcttggcccagccctgccagcatggggggacctgccgtggctatatggggggctacatgtgtgagtgtcttcctggctacaatggtgataactgtgaggacgacgtggacgagtgtgcctcccagccctgccagcacgggggttcatgcattgacctcgtggcccgctatctctgctcctgtcccccaggaacgctgggggtgctctgcgagattaatgaggatgactgcggcccaggcccaccgctggactcagggccccggtgcctacacaatggcacctgcgtggacctggtgggtggtttccgctgcacctgtcccccaggatacactggtttgcgctgcgaggcagacatcaatgagtgtcgctcaggtgcctgccacgcggcacacacccgggactgcctgcaggacccaggcggaggtttccgttgcctttgtcatgctggcttctcaggtcctcgctgtcagactgtcctgtctccctgcgagtcccagccatgccagcatggaggccagtgccgtcctagcccgggtcctgggggtgggctgaccttcacctgtcactgtgcccagccgttctggggtccgcgttgcgagcgggtggcgcgctcctgccgggagctgcagtgcccggtgggcgtcccatgccagcagacgccccgcgggccgcgctgcgcctgccccccagggttgtcgggaccctcctgccgcagcttcccggggtcgccgccgggggccagcaacgccagctgcgcggccgccccctgtctccacgggggctcctgccgccccgcgccgctcgcgcccttcttccgctgcgcttgcgcgcagggctggaccgggccgcgctgcgaggcgcccgccgcggcacccgaggtctcggaggagccgcggtgcccgcgcgccgcctgccaggccaagcgcggggaccagcgctgcgaccgcgagtgcaacagcccaggctgcggctgggacggcggcgactgctcgctgagcgtgggcgacccctggcggcaatgcgaggcgctgcagtgctggcgcctcttcaacaacagccgctgcgaccccgcctgcagctcgcccgcctgcctctacgacaacttcgactgccacgccggtggccgcgagcgcacttgcaacccggtgtacgagaagtactgcgccgaccactttgccgacggccgctgcgaccagggctgcaacacggaggagtgcggctgggatgggctggattgtgccagcgaggtgccggccctgctggcccgcggcgtgctggtgctcacagtgctgctgccgccggaggagctactgcgttccagcgccgactttctgcagcggctcagcgccatcctgcgcacctcgctgcgcttccgcctggacgcgcacggccaggccatggtcttcccttaccaccggcctagtcctggctccgaaccccgggcccgtcgggagctggcccccgaggtgatcggctcggtagtaatgctggagattgacaaccggctctgcctgcagtcgcctgagaatgatcactgcttccccgatgcccagagcgccgctgactacctgggagcgttgtcagcggtggagcgcctggacttcccgtacccactgcgggacgtgcggggggagccgctggagcctccagaacccagcgtcccgctgctgccactgctagtggcgggcgctgtcttgctgctggtcattctcgtcctgggtgtcatggtggcccggcgcaagcgcgagcacagcaccctctggttccctgagggcttctcactgcacaaggacgtggcctctggtcacaagggccggcgggaacccgtgggccaggacgcgctgggcatgaagaacatggccaagggtgagagcctgatgggggaggtggccacagactggatggacacagagtgcccagaggccaagcggctaaaggtagaggagccaggcatgggggctgaggaggctgtggattgccgtcagtggactcaacaccatctggttgctgctgacatccgcgtggcaccagccatggcactgacaccaccacagggcgacgcagatgctgatggcatggatgtcaatgtgcgtggcccagatggcttcaccccgctaatgctggcttccttctgtgggggggctctggagccaatgccaactgaagaggatgaggcagatgacacatcagctagcatcatctccgacctgatctgccagggggctcagcttggggcacggactgaccgtactggcgagactgctttgcacctggctgcccgttatgcccgtgctgatgcagccaagcggctgctggatgctggggcagacaccaatgcccaggaccactcaggccgcactcccctgcacacagctgtcacagccgatgcccagggtgtcttccagattctcatccgaaaccgctctacagacttggatgcccgcatggcagatggctcaacggcactgatcctggcggcccgcctggcagtagagggcatggtggaagagctcatcgccagccatgctgatgtcaatgctgtggatgagcttgggaaatcagccttacactgggctgcggctgtgaacaacgtggaagccactttggccctgctcaaaaatggagccaataaggacatgcaggatagcaaggaggagacccccctattcctggccgcccgcgagggcagctatgaggctgccaagctgctgttggaccactttgccaaccgtgagatcaccgaccacctggacaggctgccgcgggacgtagcccaggagagactgcaccaggacatcgtgcgcttgctggatcaacccagtgggccccgcagcccccccggtccccacggcctggggcctctgctctgtcctccaggggccttcctccctggcctcaaagcggcacagtcggggtccaagaagagcaggaggccccccgggaaggcggggctggggccgcaggggccccgggggcggggcaagaagctgacgctggcctgcccgggccccctggctgacagctcggtcacgctgtcgcccgtggactcgctggactccccgcggcctttcggtgggccccctgcttcccctggtggcttcccccttgaggggccctatgcagctgccactgccactgcagtgtctctggcacagcttggtggcccaggccgggcgggtctagggcgccagccccctggaggatgtgtactcagcctgggcctgctgaaccctgtggctgtgcccctcgattgggcccggctgcccccacctgcccctccaggcccctcgttcctgctgccactggcgccgggaccccagctgctcaacccagggacccccgtctccccgcaggagcggcccccgccttacctggcagtcccaggacatggcgaggagtacccggtggctggggcacacagcagccccccaaaggcccgcttcctgcgggttcccagtgagcacccttacctgaccccatcccccgaatcccctgagcactgggccagcccctcacctccctccctctcagactggtccgaatccacgcctagcccagccactgccactggggccatggccaccaccactggggcactgcctgcccagccacttcccttgtctgttcccagctcccttgctcaggcccagacccagctggggccccagccggaagttacccccaagaggcaagtgttggcctgagacgctcgtcagttcttagatcttgggggcctaaagagacccccgtcctgcctcctttctttctctgtctcttccttccttttagtctttttcatcctcttctctttccaccaaccctcctgcatccttgccttgcagcgtgaccgagataggtcatcagcccagggcttcagtcttcctttatttataatgggtgggggctaccacccaccctctcagtcttgtgaagagtctgggacctccttcttccccacttctctcttccctcattcctttctctctccttctggcctctcatttccttacactctgacatgaatgaattattattatttttctttttctttttttttttacattttgtatagaaacaaattcatttaaacaaacttattattattattttttacaaaatatatatatggagatgctccctccccctgtgaaccccccagtgcccccgtggggctgagtctgtgggcccattcggccaagctggattctgtgtacctagtacacaggcatgactgggatcccgtgtaccgagtacacgacccaggtatgtaccaagtaggcacccttgggcgcacccactggggccaggggtcgggggagtgttgggagcctcctccccaccccacctccctcacttcactgcattccagattggacatgttccatagccttgctggggaagggcccactgccaactccctctgccccagccccacccttggccatctccctttgggaactagggggctgctggtgggaaatgggagccagggcagatgtatgcattcctttatgtccctgtaaatgtgggactacaagaagaggagctgcctgagtggtactttctcttcctggtaatcctctggcccagccttatggcagaatagaggtatttttaggctatttttgtaatatggcttctggtcaaaatccctgtgtagctgaattcccaagccctgcattgtacagccccccactcccctcaccacctaataaaggaatagttaacactca

SEQ ID NO: 453244 - DNA, 4831 bp, Homo sapiens
tctgcccacctcggcctcccaaagtgctgggattacctactggtagtgcgctgaacatctgtgtgtgtccttttgtgctggggttctttgcgtcttcatgggtatgtccaggtgggtctgtgtcccactaagctgagtgggtccctctcttaccccactgaagtgtcttcctggctacaatggtgataactgtgaggacgacgtggacgagtgtgcctcccagccctgccagcacgggggttcatgcattgacctcgtggcccgctatctctgctcctgtcccccaggaacgctgggggtgctctgcgagattaatgaggatgactgcggcccaggcccaccgctggactcagggccccggtgcctacacaatggcacctgcgtggacctggtgggtggtttccgctgcacctgtcccccaggatacactggtttgcgctgcgaggcagacatcaatgagtgtcgctcaggtgcctgccacgcggcacacacccgggactgcctgcaggacccaggcggaggtttccgttgcctttgtcatgctggcttctcaggtcctcgctgtcagactgtcctgtctccctgcgagtcccagccatgccagcatggaggccagtgccgtcctagcccgggtcctgggggtgggctgaccttcacctgtcactgtgcccagccgttctggggtccgcgttgcgagcgggtggcgcgctcctgccgggagctgcagtgcccggtgggcgtcccatgccagcagacgccccgcgggccgcgctgcgcctgccccccagggttgtcgggaccctcctgccgcagcttcccggggtcgccgccgggggccagcaacgccagctgcgcggccgccccctgtctccacgggggctcctgccgccccgcgccgctcgcgcccttcttccgctgcgcttgcgcgcagggctggaccgggccgcgctgcgaggcgcccgccgcggcacccgaggtctcggaggagccgcggtgcccgcgcgccgcctgccaggccaagcgcggggaccagcgctgcgaccgcgagtgcaacagcccaggctgcggctgggacggcggcgactgctcgctgagcgtgggcgacccctggcggcaatgcgaggcgctgcagtgctggcgcctcttcaacaacagccgctgcgaccccgcctgcagctcgcccgcctgcctctacgacaacttcgactgccacgccggtggccgcgagcgcacttgcaacccggtgtacgagaagtactgcgccgaccactttgccgacggccgctgcgaccagggctgcaacacggaggagtgcggctgggatgggctggattgtgccagcgaggtgccggccctgctggcccgcggcgtgctggtgctcacagtgctgctgccgccggaggagctactgcgttccagcgccgactttctgcagcggctcagcgccatcctgcgcacctcgctgcgcttccgcctggacgcgcacggccaggccatggtcttcccttaccaccggcctagtcctggctccgaaccccgggcccgtcgggagctggcccccgaggtgatcggctcggtagtaatgctggagattgacaaccggctctgcctgcagtcgcctgagaatgatcactgcttccccgatgcccagagcgccgctgactacctgggagcgttgtcagcggtggagcgcctggacttcccgtacccactgcgggacgtgcggggggagccgctggagcctccagaacccagcgtcccgctgctgccactgctagtggcgggcgctgtcttgctgctggtcattctcgtcctgggtgtcatggtggcccggcgcaagcgcgagcacagcaccctctggttccctgagggcttctcactgcacaaggacgtggcctctggtcacaagggccggcgggaacccgtgggccaggacgcgctgggcatgaagaacatggccaagggtgagagcctgatgggggaggtggccacagactggatggacacagagtgcccagaggccaagcggctaaaggtagaggagccaggcatgggggctgaggaggctgtggattgccgtcagtggactcaacaccatctggttgctgctgacatccgcgtggcaccagccatggcactgacaccaccacagggcgacgcagatgctgatggcatggatgtcaatgtgcgtggcccagatggcttcaccccgctaatgctggcttccttctgtgggggggctctggagccaatgccaactgaagaggatgaggcagatgacacatcagctagcatcatctccgacctgatctgccagggggctcagcttggggcacggactgaccgtactggcgagactgctttgcacctggctgcccgttatgcccgtgctgatgcagccaagcggctgctggatgctggggcagacaccaatgcccaggaccactcaggccgcactcccctgcacacagctgtcacagccgatgcccagggtgtcttccagattctcatccgaaaccgctctacagacttggatgcccgcatggcagatggctcaacggcactgatcctggcggcccgcctggcagtagagggcatggtggaagagctcatcgccagccatgctgatgtcaatgctgtggatgagcttgggaaatcagccttacactgggctgcggctgtgaacaacgtggaagccactttggccctgctcaaaaatggagccaataaggacatgcaggatagcaaggaggagacccccctattcctggccgcccgcgagggcagctatgaggctgccaagctgctgttggaccactttgccaaccgtgagatcaccgaccacctggacaggctgccgcgggacgtagcccaggagagactgcaccaggacatcgtgcgcttgctggatcaacccagtgggccccgcagcccccccggtccccacggcctggggcctctgctctgtcctccaggggccttcctccctggcctcaaagcggcacagtcggggtccaagaagagcaggaggccccccgggaaggcggggctggggccgcaggggccccgggggcggggcaagaagctgacgctggcctgcccgggccccctggctgacagctcggtcacgctgtcgcccgtggactcgctggactccccgcggcctttcggtgggccccctgcttcccctggtggcttcccccttgaggggccctatgcagctgccactgccactgcagtgtctctggcacagcttggtggcccaggccgggcgggtctagggcgccagccccctggaggatgtgtactcagcctgggcctgctgaaccctgtggctgtgcccctcgattgggcccggctgcccccacctgcccctccaggcccctcgttcctgctgccactggcgccgggaccccagctgctcaacccagggacccccgtctccccgcaggagcggcccccgccttacctggcagtcccaggacatggcgaggagtacccggtggctggggcacacagcagccccccaaaggcccgcttcctgcgggttcccagtgagcacccttacctgaccccatcccccgaatcccctgagcactgggccagcccctcacctccctccctctcagactggtccgaatccacgcctagcccagccactgccactggggccatggccaccaccactggggcactgcctgcccagccacttcccttgtctgttcccagctcccttgctcaggcccagacccagctggggccccagccggaagttacccccaagaggcaagtgttggcctgagacgctcgtcagttcttagatcttgggggcctaaagagacccccgtcctgcctcctttctttctctgtctcttccttccttttagtctttttcatcctcttctctttccaccaaccctcctgcatccttgccttgcagcgtgaccgagataggtcatcagcccagggcttcagtcttcctttatttataatgggtgggggctaccacccaccctctcagtcttgtgaagagtctgggacctccttcttccccacttctctcttccctcattcctttctctctccttctggcctctcatttccttacactctgacatgaatgaattattattatttttctttttctttttttttttacattttgtatagaaacaaattcatttaaacaaacttattattattattttttacaaaatatatatatggagatgctccctccccctgtgaaccccccagtgcccccgtggggctgagtctgtgggcccattcggccaagctggattctgtgtacctagtacacaggcatgactgggatcccgtgtaccgagtacacgacccaggtatgtaccaagtaggcacccttgggcgcacccactggggccaggggtcgggggagtgttgggagcctcctccccaccccacctccctcacttcactgcattccagattggacatgttccatagccttgctggggaagggcccactgccaactccctctgccccagccccacccttggccatctccctttgggaactagggggctgctggtgggaaatgggagccagggcagatgtatgcattcctttatgtccctgtaaatgtgggactacaagaagaggagctgcctgagtggtactttctcttcctggtaatcctctggcccagccttatggcagaatagaggtatttttaggctatttttgtaatatggcttctggtcaaaatccctgtgtagctgaattcccaagccctgcattgtacagccccccactcccctcaccacctaataaaggaatagttaacactca

SEQ ID NO: 453245 - DNA, 8092 bp, Homo sapiens
acgcggcgcggaggctggcccgggacgcgcccggagcccagggaaggagggaggaggggagggtcgcggccggccgccatggggccgggggcccgtggccgccgccgccgccgtcgcccgatgtcgccgccaccgccaccgccacccgtgcgggcgctgcccctgctgctgctgctagcggggccgggggctgcagcccccccttgcctggacggaagcccgtgtgcaaatggaggtcgttgcacccagctgccctcccgggaggctgcctgcctgtgcccgcctggctgggtgggtgagcggtgtcagctggaggacccctgtcactcaggcccctgtgctggccgtggtgtctgccagagttcagtggtggctggcaccgcccgattctcatgccggtgcccccgtggcttccgaggccctgactgctccctgccagatccctgcctcagcagcccttgtgcccacggtgcccgctgctcagtggggcccgatggacgcttcctctgctcctgcccacctggctaccagggccgcagctgccgaagcgacgtggatgagtgccgggtgggtgagccctgccgccatggtggcacctgcctcaacacacctggctccttccgctgccagtgtccagctggctacacagggccactatgtgagaaccccgcggtgccctgtgcgccctcaccatgccgtaacgggggcacctgcaggcagagtggcgacctcacttacgactgtgcctgtcttcctgggtttgagggtcagaattgtgaagtgaacgtggacgactgtccaggacaccgatgtctcaatggggggacatgcgtggatggcgtcaacacctataactgccagtgccctcctgagtggacaggccagttctgcacggaggacgtggatgagtgtcagctgcagcccaacgcctgccacaatgggggtacctgcttcaacacgctgggtggccacagctgcgtgtgtgtcaatggctggacaggtgagagctgcagtcagaatatcgatgactgtgccacagccgtgtgcttccatggggccacctgccatgaccgcgtggcttctttctactgtgcctgccccatgggcaagactggcctcctgtgtcacctggatgacgcctgtgtcagcaacccctgccacgaggatgctatctgtgacacaaatccggtgaacggccgggccatttgcacctgtcctcccggcttcacgggtggggcatgtgaccaggatgtggacgagtgctctatcggcgccaacccctgcgagcacttgggcaggtgcgtgaacacgcagggctccttcctgtgccagtgcggtcgtggctacactggacctcgctgtgagaccgatgtcaacgagtgtctgtcggggccctgccgaaaccaggccacgtgcctcgaccgcataggccagttcacctgtatctgtatggcaggcttcacaggaacctattgcgaggtggacattgacgagtgtcagagtagcccctgtgtcaacggtggggtctgcaaggaccgagtcaatggcttcagctgcacctgcccctcgggcttcagcggctccacgtgtcagctggacgtggacgaatgcgccagcacgccctgcaggaatggcgccaaatgcgtggaccagcccgatggctacgagtgccgctgtgccgagggctttgagggcacgctgtgtgatcgcaacgtggacgactgctcccctgacccatgccaccatggtcgctgcgtggatggcatcgccagcttctcatgtgcctgtgctcctggctacacgggcacacgctgcgagagccaggtggacgaatgccgcagccagccctgccgccatggcggcaaatgcctagacctggtggacaagtacctctgccgctgcccttctgggaccacaggtgtgaactgcgaagtgaacattgacgactgtgccagcaacccctgcacctttggagtctgccgtgatggcatcaaccgctacgactgtgtctgccaacctggcttcacagggcccctttgtaacgtggagatcaatgagtgtgcttccagcccatgcggcgagggaggttcctgtgtggatggggaaaatggcttccgctgcctctgcccgcctggctccttgcccccactctgcctccccccgagccatccctgtgcccatgagccctgcagtcacggcatctgctatgatgcacctggcgggttccgctgtgtgtgtgagcctggctggagtggcccccgctgcagccagagcctggcccgagacgcctgtgagtcccagccgtgcagggccggtgggacatgcagcagcgatggaatgggtttccactgcacctgcccgcctggtgtccagggacgtcagtgtgaactcctctccccctgcaccccgaacccctgtgagcatgggggccgctgcgagtctgcccctggccagctgcctgtctgctcctgcccccagggctggcaagacccatgcctgaacggtggctcgtgccaagacggcgtgggctccttttcctgctcctgcctccctggtttcgccggcccacgatgcgcccgcgatgtggatgagtgcctgagcaacccctgcggcccgggcacctgtaccgaccacgtggcctccttcacctgcacctgcccgccgggctacggaggcttccactgcgaacaggacctgcccgactgcagccccagctcctgcttcaatggcgggacctgtgtggacggcgtgaactcgttcagctgcctgtgccgtcccggctacacaggagcccactgccaacatgaggcagacccctgcctctcgcggccctgcctacacgggggcgtctgcagcgccgcccaccctggcttccgctgcacctgcctcgagagcttcacgggcccgcagtgccagacgctggtggattggtgcagccgccagccttgtcaaaacgggggtcgctgcgtccagactggggcctattgcctttgtccccctggatggagcggacgcctctgtgacatccgaagcttgccctgcagggaggccgcagcccagatcggggtgcggctggagcagctgtgtcaggcgggtgggcagtgtgtggatgaagacagctcccactactgcgtgtgcccagagggccgtactggtagccactgtgagcaggaggtggacccctgcttggcccagccctgccagcatggggggacctgccgtggctatatggggggctacatgtgtgagtgtcttcctggctacaatggtgataactgtgaggacgacgtggacgagtgtgcctcccagccctgccagcacgggggttcatgcattgacctcgtggcccgctatctctgctcctgtcccccaggaacgctgggggtgctctgcgagattaatgaggatgactgcggcccaggcccaccgctggactcagggccccggtgcctacacaatggcacctgcgtggacctggtgggtggtttccgctgcacctgtcccccaggatacactggtttgcgctgcgaggcagacatcaatgagtgtcgctcaggtgcctgccacgcggcacacacccgggactgcctgcaggacccaggcggaggtttccgttgcctttgtcatgctggcttctcaggtcctcgctgtcagactgtcctgtctccctgcgagtcccagccatgccagcatggaggccagtgccgtcctagcccgggtcctgggggtgggctgaccttcacctgtcactgtgcccagccgttctggggtccgcgttgcgagcgggtggcgcgctcctgccgggagctgcagtgcccggtgggcgtcccatgccagcagacgccccgcgggccgcgctgcgcctgccccccagggttgtcgggaccctcctgccgcagcttcccggggtcgccgccgggggccagcaacgccagctgcgcggccgccccctgtctccacgggggctcctgccgccccgcgccgctcgcgcccttcttccgctgcgcttgcgcgcagggctggaccgggccgcgctgcgaggcgcccgccgcggcacccgaggtctcggaggagccgcggtgcccgcgcgccgcctgccaggccaagcgcggggaccagcgctgcgaccgcgagtgcaacagcccaggctgcggctgggacggcggcgactgctcgctgagcgtgggcgacccctggcggcaatgcgaggcgctgcagtgctggcgcctcttcaacaacagccgctgcgaccccgcctgcagctcgcccgcctgcctctacgacaacttcgactgccacgccggtggccgcgagcgcacttgcaacccggtgtacgagaagtactgcgccgaccactttgccgacggccgctgcgaccagggctgcaacacggaggagtgcggctgggatgggctggattgtgccagcgaggtgccggccctgctggcccgcggcgtgctggtgctcacagtgctgctgccgccggaggagctactgcgttccagcgccgactttctgcagcggctcagcgccatcctgcgcacctcgctgcgcttccgcctggacgcgcacggccaggccatggtcttcccttaccaccggcctagtcctggctccgaaccccgggcccgtcgggagctggcccccgaggtgatcggctcggtagtaatgctggagattgacaaccggctctgcctgcagtcgcctgagaatgatcactgcttccccgatgcccagagcgccgctgactacctgggagcgttgtcagcggtggagcgcctggacttcccgtacccactgcgggacgtgcggggggagccgctggagcctccagaacccagcgtcccgctgctgccactgctagtggcgggcgctgtcttgctgctggtcattctcgtcctgggtgtcatggtggcccggcgcaagcgcgagcacagcaccctctggttccctgagggcttctcactgcacaaggacgtggcctctggtcacaagggccggcgggaacccgtgggccaggacgcgctgggcatgaagaacatggccaagggtgagagcctgatgggggaggtggccacagactggatggacacagagtgcccagaggccaagcggctaaaggtagaggagccaggcatgggggctgaggaggctgtggattgccgtcagtggactcaacaccatctggttgctgctgacatccgcgtggcaccagccatggcactgacaccaccacagggcgacgcagatgctgatggcatggatgtcaatgtgcgtggcccagatggcttcaccccgctaatgctggcttccttctgtgggggggctctggagccaatgccaactgaagaggatgaggcagatgacacatcagctagcatcatctccgacctgatctgccagggggctcagcttggggcacggactgaccgtactggcgagactgctttgcacctggctgcccgttatgcccgtgctgatgcagccaagcggctgctggatgctggggcagacaccaatgcccaggaccactcaggccgcactcccctgcacacagctgtcacagccgatgcccagggtgtcttccagattctcatccgaaaccgctctacagacttggatgcccgcatggcagatggctcaacggcactgatcctggcggcccgcctggcagtagagggcatggtggaagagctcatcgccagccatgctgatgtcaatgctgtggatgagcttgggaaatcagccttacactgggctgcggctgtgaacaacgtggaagccactttggccctgctcaaaaatggagccaataaggacatgcaggatagcaaggaggagacccccctattcctggccgcccgcgagggcagctatgaggctgccaagctgctgttggaccactttgccaaccgtgagatcaccgaccacctggacaggctgccgcgggacgtagcccaggagagactgcaccaggacatcgtgcgcttgctggatcaacccagtgggccccgcagcccccccggtccccacggcctggggcctctgctctgtcctccaggggccttcctccctggcctcaaagcggcacagtcggggtccaagaagagcaggaggccccccgggaaggcggggctggggccgcaggggccccgggggcggggcaagaagctgacgctggcctgcccgggccccctggctgacagctcggtcacgctgtcgcccgtggactcgctggactccccgcggcctttcggtgggccccctgcttcccctggtggcttcccccttgaggggccctatgcagctgccactgccactgcagtgtctctggcacagcttggtggcccaggccgggcgggtctagggcgccagccccctggaggatgtgtactcagcctgggcctgctgaaccctgtggctgtgcccctcgattgggcccggctgcccccacctgcccctccaggcccctcgttcctgctgccactggcgccgggaccccagctgctcaacccagggacccccgtctccccgcaggagcggcccccgccttacctggcagtcccaggacatggcgaggagtacccggtggctggggcacacagcagccccccaaaggcccgcttcctgcgggttcccagtgagcacccttacctgaccccatcccccgaatcccctgagcactgggccagcccctcacctccctccctctcagactggtccgaatccacgcctagcccagccactgccactggggccatggccaccaccactggggcactgcctgcccagccacttcccttgtctgttcccagctcccttgctcaggcccagacccagctggggccccagccggaagttacccccaagaggcaagtgttggcctgagacgctcgtcagttcttagatcttgggggcctaaagagacccccgtcctgcctcctttctttctctgtctcttccttccttttagtctttttcatcctcttctctttccaccaaccctcctgcatccttgccttgcagcgtgaccgagataggtcatcagcccagggcttcagtcttcctttatttataatgggtgggggctaccacccaccctctcagtcttgtgaagagtctgggacctccttcttccccacttctctcttccctcattcctttctctctccttctggcctctcatttccttacactctgacatgaatgaattattattatttttctttttctttttttttttacattttgtatagaaacaaattcatttaaacaaacttattattattattttttacaaaatatatatatggagatgctccctccccctgtgaaccccccagtgcccccgtggggctgagtctgtgggcccattcggccaagctggattctgtgtacctagtacacaggcatgactgggatcccgtgtaccgagtacacgacccaggtatgtaccaagtaggcacccttgggcgcacccactggggccaggggtcgggggagtgttgggagcctcctccccaccccacctccctcacttcactgcattccagattggacatgttccatagccttgctggggaagggcccactgccaactccctctgccccagccccacccttggccatctccctttgggaactagggggctgctggtgggaaatgggagccagggcagatgtatgcattcctttatgtccctgtaaatgtgggactacaagaagaggagctgcctgagtggtactttctcttcctggtaatcctctggcccagccttatggcagaatagaggtatttttaggctatttttgtaatatggcttctggtcaaaatccctgtgtagctgaattcccaagccctgcattgtacagccccccactcccctcaccacctaataaaggaatagttaacactcatatgctgtacagcataaactattagtgggagtagagtttgaagtccttgagagaggattatgatgcgactgtgagtgcgttcgtagtttgagtttgctaggcagaatagtaatgaggatgtaagtccgtgggcgattatgagaatgactgcgccggtgaagcttcagggggtttt

SEQ ID NO: 453246 - DNA, 5966 bp, Homo sapiens
acgcggcgcggaggctggcccgggacgcgcccggagcccagggaaggagggaggaggggagggtcgcggccggccgccatggggccgggggcccgtggccgccgccgccgccgtcgcccgatgtcgccgccaccgccaccgccacccgtgcgggcgctgcccctgctgctgctgctagcggggccgggggctgcagcccccccttgcctggacggaagcccgtgtgcaaatggaggtcgttgcacccagctgccctcccgggaggctgcctgcctgtgcccgcctggctgggtgggtgagcggtgtcagctggaggacccctgtcactcaggcccctgtgctggccgtggtgtctgccagagttcagtggtggctggcaccgcccgattctcatgccggtgcccccgtggcttccgaggccctgactgctccctgccagatccctgcctcagcagcccttgtgcccacggtgcccgctgctcagtggggcccgatggacgcttcctctgctcctgcccacctggctaccagggccgcagctgccgaagcgacgtggatgagtgccgggtgggtgagccctgccgccatggtggcacctgcctcaacacacctggctccttccgctgccagtgtccagctggctacacagggccactatgtgagaaccccgcggtgccctgtgcgccctcaccatgccgtaacgggggcacctgcaggcagagtggcgacctcacttacgactgtgcctgtcttcctgggtttgagggtcagaattgtgaagtgaacgtggacgactgtccaggacaccgatgtctcaatggggggacatgcgtggatggcgtcaacacctataactgccagtgccctcctgagtggacaggccagttctgcacggaggacgtggatgagtgtcagctgcagcccaacgcctgccacaatgggggtacctgcttcaacacgctgggtggccacagctgcgtgtgtgtcaatggctggacaggtgagagctgcagtcagaatatcgatgactgtgccacagccgtgtgcttccatggggccacctgccatgaccgcgtggcttctttctactgtgcctgccccatgggcaagactggcctcctgtgtcacctggatgacgcctgtgtcagcaacccctgccacgaggatgctatctgtgacacaaatccggtgaacggccgggccatttgcacctgtcctcccggcttcacgggtggggcatgtgaccaggatgtggacgagtgctctatcggcgccaacccctgcgagcacttgggcaggtgcgtgaacacgcagggctccttcctgtgccagtgcggtcgtggctacactggacctcgctgtgagaccgatgtcaacgagtgtctgtcggggccctgccgaaaccaggccacgtgcctcgaccgcataggccagttcacctgtatctgtatggcaggcttcacaggaacctattgcgaggtggacattgacgagtgtcagagtagcccctgtgtcaacggtggggtctgcaaggaccgagtcaatggcttcagctgcacctgcccctcgggcttcagcggctccacgtgtcagctggacgtggacgaatgcgccagcacgccctgcaggaatggcgccaaatgcgtggaccagcccgatggctacgagtgccgctgtgccgagggctttgagggcacgctgtgtgatcgcaacgtggacgactgctcccctgacccatgccaccatggtcgctgcgtggatggcatcgccagcttctcatgtgcctgtgctcctggctacacgggcacacgctgcgagagccaggtggacgaatgccgcagccagccctgccgccatggcggcaaatgcctagacctggtggacaagtacctctgccgctgcccttctgggaccacaggtgtgaactgcgaagtgaacattgacgactgtgccagcaacccctgcacctttggagtctgccgtgatggcatcaaccgctacgactgtgtctgccaacctggcttcacagggcccctttgtaacgtggagatcaatgagtgtgcttccagcccatgcggcgagggaggttcctgtgtggatggggaaaatggcttccgctgcctctgcccgcctggctccttgcccccactctgcctccccccgagccatccctgtgcccatgagccctgcagtcacggcatctgctatgatgcacctggcgggttccgctgtgtgtgtgagcctggctggagtggcccccgctgcagccagagcctggcccgagacgcctgtgagtcccagccgtgcagggccggtgggacatgcagcagcgatggaatgggtttccactgcacctgcccgcctggtgtccagggacgtcagtgtgaactcctctccccctgcaccccgaacccctgtgagcatgggggccgctgcgagtctgcccctggccagctgcctgtctgctcctgcccccagggctggcaagacccatgcctgaacggtggctcgtgccaagacggcgtgggctccttttcctgctcctgcctccctggtttcgccggcccacgatgcgcccgcgatgtggatgagtgcctgagcaacccctgcggcccgggcacctgtaccgaccacgtggcctccttcacctgcacctgcccgccgggctacggaggcttccactgcgaacaggacctgcccgactgcagccccagctcctgcttcaatggcgggacctgtgtggacggcgtgaactcgttcagctgcctgtgccgtcccggctacacaggagcccactgccaacatgaggcagacccctgcctctcgcggccctgcctacacgggggcgtctgcagcgccgcccaccctggcttccgctgcacctgcctcgagagcttcacgggcccgcagtgccagacgctggtggattggtgcagccgccagccttgtcaaaacgggggtcgctgcgtccagactggggcctattgcctttgtccccctggatggagcggacgcctctgtgacatccgaagcttgccctgcagggaggccgcagcccagatcggggtgcggctggagcagctgtgtcaggcgggtgggcagtgtgtggatgaagacagctcccactactgcgtgtgcccagagggccgtactggtagccactgtgagcaggaggtggacccctgcttggcccagccctgccagcatggggggacctgccgtggctatatggggggctacatgtgtgagtgtcttcctggctacaatggtgataactgtgaggacgacgtggacgagtgtgcctcccagccctgccagcacgggggttcatgcattgacctcgtggcccgctatctctgctcctgtcccccaggaacgctgggggtgctctgcgagattaatgaggatgactgcggcccaggcccaccgctggactcagggccccggtgcctacacaatggcacctgcgtggacctggtgggtggtttccgctgcacctgtcccccaggatacactggtttgcgctgcgaggcagacatcaatgagtgtcgctcaggtgcctgccacgcggcacacacccgggactgcctgcaggacccaggcggaggtttccgttgcctttgtcatgctggcttctcaggtcctcgctgtcagactgtcctgtctccctgcgagtcccagccatgccagcatggaggccagtgccgtcctagcccgggtcctgggggtgggctgaccttcacctgtcactgtgcccagccgttctggggtccgcgttgcgagcgggtggcgcgctcctgccgggagctgcagtgcccggtgggcgtcccatgccagcagacgccccgcgggccgcgctgcgcctgccccccagggttgtcgggaccctcctgccgcagcttcccggggtcgccgccgggggccagcaacgccagctgcgcggccgccccctgtctccacgggggctcctgccgccccgcgccgctcgcgcccttcttccgctgcgcttgcgcgcagggctggaccgggccgcgctgcgaggcgcccgccgcggcacccgaggtctcggaggagccgcggtgcccgcgcgccgcctgccaggccaagcgcggggaccagcgctgcgaccgcgagtgcaacagcccaggctgcggctgggacggcggcgactgctcgctgagcgtgggcgacccctggcggcaatgcgaggcgctgcagtgctggcgcctcttcaacaacagccgctgcgaccccgcctgcagctcgcccgcctgcctctacgacaacttcgactgccacgccggtggccgcgagcgcacttgcaacccggtgtacgagaagtactgcgccgaccactttgccgacggccgctgcgaccagggctgcaacacggaggagtgcggctgggatgggctggattgtgccagcgaggtgccggccctgctggcccgcggcgtgctggtgctcacagtgctgctgccgccggaggagctactgcgttccagcgccgactttctgcagcggctcagcgccatcctgcgcacctcgctgcgcttccgcctggacgcgcacggccaggccatggtcttcccttaccaccggcctagtcctggctccgaaccccgggcccgtcgggagctggcccccgaggtgatcggctcggtagtaatgctggagattgacaaccggctctgcctgcagtcgcctgagaatgatcactgcttccccgatgcccagagcgccgctgactacctgggagcgttgtcagcggtggagcgcctggacttcccgtacccactgcgggacgtgcggggggagccgctggagcctccagaacccagcgtcccgctgctgccactgctagtggcgggcgctgtcttgctgctggtcattctcgtcctgggtgtcatggtggcccggcgcaagcgcgagcacagcaccctctggttccctgagggcttctcactgcacaaggacgtggcctctggtcacaagggccggcgggaacccgtgggccaggacgcgctgggcatgaagaacatggccaagggtgagagcctgatgggggaggtggccacagactggatggacacagagtgcccagaggccaagcggctaaaggtagaggagccaggcatgggggctgaggaggctgtggattgccgtcagtggactcaacaccatctggttgctgctgacatccgcgtggcaccagccatggcactgacaccaccacagggcgacgcagatgctgatggcatggatgtcaatgtgcgtggcccagatggcttcaccccgctaatgctggcttccttctgtgggggggctctggagccaatgccaactgaagaggatgaggcagatgacacatcagctagcatcatctccgacctgatctgccagggggctcagcttggggcacggactgaccgtactggcgagactgctttgcacctggctgcccgttatgcccgtgctgatgcagccaagcggctgctggatgctggggcagacaccaatgcccaggaccactcaggccgcactcccctgcacacagctgtcacagccgatgcccagggtgtcttccagattctcatccgaaaccgctctacagacttggatgcccgcatggcagatggctcaacggcactgatcctggcggcccgcctggcagtagagggcatggtggaagagctcatcgccagccatgctgatgtcaatgctgtggatgagcttgggaaatcagccttacactgggctgcggctgtgaacaacgtggaagccactttggccctgctcaaaaatggagccaataaggacatgcaggatagcaaggtgagccccagcccttggtccactgggtgtcagcagtggcacagtgccattgcaatccagcctgggcaacagagtgagactctctcaaaaaacaaaacaaaataaaaccccaaacattggattaaaatata

SEQ ID NO: 453247 - DNA, 3777 bp, Homo sapiens
acgcggcgcggaggctggcccgggacgcgcccggagcccagggaaggagggaggaggggagggtcgcggccggccgccatggggccgggggcccgtggccgccgccgccgccgtcgcccgatgtcgccgccaccgccaccgccacccgtgcgggcgctgcccctgctgctgctgctagcggggccgggggctgcagcccccccttgcctggacggaagcccgtgtgcaaatggaggtcgttgcacccagctgccctcccgggaggctgcctgcctgtgcccgcctggctgggtgggtgagcggtgtcagctggaggacccctgtcactcaggcccctgtgctggccgtggtgtctgccagagttcagtggtggctggcaccgcccgattctcatgccggtgcccccgtggcttccgaggccctgactgctccctgccagatccctgcctcagcagcccttgtgcccacggtgcccgctgctcagtggggcccgatggacgcttcctctgctcctgcccacctggctaccagggccgcagctgccgaagcgacgtggatgagtgccgggtgggtgagccctgccgccatggtggcacctgcctcaacacacctggctccttccgctgccagtgtccagctggctacacagggccactatgtgagaaccccgcggtgccctgtgcgccctcaccatgccgtaacgggggcacctgcaggcagagtggcgacctcacttacgactgtgcctgtcttcctgggtttgagggtcagaattgtgaagtgaacgtggacgactgtccaggacaccgatgtctcaatggggggacatgcgtggatggcgtcaacacctataactgccagtgccctcctgagtggacaggccagttctgcacggaggacgtggatgagtgtcagctgcagcccaacgcctgccacaatgggggtacctgcttcaacacgctgggtggccacagctgcgtgtgtgtcaatggctggacaggtgagagctgcagtcagaatatcgatgactgtgccacagccgtgtgcttccatggggccacctgccatgaccgcgtggcttctttctactgtgcctgccccatgggcaagactggcctcctgtgtcacctggatgacgcctgtgtcagcaacccctgccacgaggatgctatctgtgacacaaatccggtgaacggccgggccatttgcacctgtcctcccggcttcacgggtggggcatgtgaccaggatgtggacgagtgctctatcggcgccaacccctgcgagcacttgggcaggtgcgtgaacacgcagggctccttcctgtgccagtgcggtcgtggctacactggacctcgctgtgagaccgatgtcaacgagtgtctgtcggggccctgccgaaaccaggccacgtgcctcgaccgcataggccagttcacctgtatctgtatggcaggcttcacaggaacctattgcgaggtggacattgacgagtgtcagagtagcccctgtgtcaacggtggggtctgcaaggaccgagtcaatggcttcagctgcacctgcccctcgggcttcagcggctccacgtgtcagctggacgtggacgaatgcgccagcacgccctgcaggaatggcgccaaatgcgtggaccagcccgatggctacgagtgccgctgtgccgagggctttgagggcacgctgtgtgatcgcaacgtggacgactgctcccctgacccatgccaccatggtcgctgcgtggatggcatcgccagcttctcatgtgcctgtgctcctggctacacgggcacacgctgcgagagccaggtggacgaatgccgcagccagccctgccgccatggcggcaaatgcctagacctggtggacaagtacctctgccgctgcccttctgggaccacaggtgtgaactgcgaagtgaacattgacgactgtgccagcaacccctgcacctttggagtctgccgtgatggcatcaaccgctacgactgtgtctgccaacctggcttcacagggcccctttgtaacgtggagatcaatgagtgtgcttccagcccatgcggcgagggaggttcctgtgtggatggggaaaatggcttccgctgcctctgcccgcctggctccttgcccccactctgcctccccccgagccatccctgtgcccatgagccctgcagtcacggcatctgctatgatgcacctggcgggttccgctgtgtgtgtgagcctggctggagtggcccccgctgcagccagagcctggcccgagacgcctgtgagtcccagccgtgcagggccggtgggacatgcagcagcgatggaatgggtttccactgcacctgcccgcctggtgtccagggacgtcagtgtgaactcctctccccctgcaccccgaacccctgtgagcatgggggccgctgcgagtctgcccctggccagctgcctgtctgctcctgcccccagggctggcaagacccatgcctgaacggtggctcgtgccaagacggcgtgggctccttttcctgctcctgcctccctggtttcgccggcccacgatgcgcccgcgatgtggatgagtgcctgagcaacccctgcggcccgggcacctgtaccgaccacgtggcctccttcacctgcacctgcccgccgggctacggaggcttccactgcgaacaggacctgcccgactgcagccccagctcctgcttcaatggcgggacctgtgtggacggcgtgaactcgttcagctgcctgtgccgtcccggctacacaggagcccactgccaacatgaggcagacccctgcctctcgcggccctgcctacacgggggcgtctgcagcgccgcccaccctggcttccgctgcacctgcctcgagagcttcacgggcccgcagtgccagacgctggtggattggtgcagccgccagccttgtcaaaacgggggtcgctgcgtccagactggggcctattgcctttgtccccctggatggagcggacgcctctgtgacatccgaagcttgccctgcagggaggccgcagcccagatcggggtgcggctggagcagctgtgtcaggcgggtgggcagtgtgtggatgaagacagctcccactactgcgtgtgcccagagggccgtactggtagccactgtgagcaggaggtggacccctgcttggcccagccctgccagcatggggggacctgccgtggctatatggggggctacatgtgtgagtgtcttcctggctacaatggtgataactgtgaggacgacgtggacgagtgtgcctcccagccctgccagcacgggggttcatgcattgacctcgtggcccgctatctctgctcctgtcccccaggaacgctgggggtgctctgcgagattaatgaggatgactgcggcccaggcccaccgctggactcagggccccggtgcctacacaatggcacctgcgtggacctggtgggtggtttccgctgcacctgtcccccaggatacactggtttgcgctgcgaggcagacatcaatgagtgtcgctcaggtgcctgccacgcggcacacacccgggactgcctgcaggacccaggcggaggtttccgttgcctttgtcatgctggcttctcaggtcctcgctgtcagactgtcctgtctccctgcgagtcccagccatgccagcatggaggccagtgccgtcctagcccgggtcctgggggtgggctgaccttcacctgtcactgtgcccaggtaggtgtgggtggcggc

SEQ ID NO: 453248 - DNA, 2782 bp, Homo sapiens
acgcggcgcggaggctggcccgggacgcgcccggagcccagggaaggagggaggaggggagggtcgcggccggccgccatggggccgggggcccgtggccgccgccgccgccgtcgcccgatgtcgccgccaccgccaccgccacccgtgcgggcgctgcccctgctgctgctgctagcggggccgggggctgcagcccccccttgcctggacggaagcccgtgtgcaaatggaggtcgttgcacccagctgccctcccgggaggctgcctgcctgtgcccgcctggctgggtgggtgagcggtgtcagctggaggacccctgtcactcaggcccctgtgctggccgtggtgtctgccagagttcagtggtggctggcaccgcccgattctcatgccggtgcccccgtggcttccgaggccctgactgctccctgccagatccctgcctcagcagcccttgtgcccacggtgcccgctgctcagtggggcccgatggacgcttcctctgctcctgcccacctggctaccagggccgcagctgccgaagcgacgtggatgagtgccgggtgggtgagccctgccgccatggtggcacctgcctcaacacacctggctccttccgctgccagtgtccagctggctacacagggccactatgtgagaaccccgcggtgccctgtgcgccctcaccatgccgtaacgggggcacctgcaggcagagtggcgacctcacttacgactgtgcctgtcttcctgggtttgagggtcagaattgtgaagtgaacgtggacgactgtccaggacaccgatgtctcaatggggggacatgcgtggatggcgtcaacacctataactgccagtgccctcctgagtggacaggccagttctgcacggaggacgtggatgagtgtcagctgcagcccaacgcctgccacaatgggggtacctgcttcaacacgctgggtggccacagctgcgtgtgtgtcaatggctggacaggtgagagctgcagtcagaatatcgatgactgtgccacagccgtgtgcttccatggggccacctgccatgaccgcgtggcttctttctactgtgcctgccccatgggcaagactggcctcctgtgtcacctggatgacgcctgtgtcagcaacccctgccacgaggatgctatctgtgacacaaatccggtgaacggccgggccatttgcacctgtcctcccggcttcacgggtggggcatgtgaccaggatgtggacgagtgctctatcggcgccaacccctgcgagcacttgggcaggtgcgtgaacacgcagggctccttcctgtgccagtgcggtcgtggctacactggacctcgctgtgagaccgatgtcaacgagtgtctgtcggggccctgccgaaaccaggccacgtgcctcgaccgcataggccagttcacctgtatctgtatggcaggcttcacaggaacctattgcgaggtggacattgacgagtgtcagagtagcccctgtgtcaacggtggggtctgcaaggaccgagtcaatggcttcagctgcacctgcccctcgggcttcagcggctccacgtgtcagctggacgtggacgaatgcgccagcacgccctgcaggaatggcgccaaatgcgtggaccagcccgatggctacgagtgccgctgtgccgagggctttgagggcacgctgtgtgatcgcaacgtggacgactgctcccctgacccatgccaccatggtcgctgcgtggatggcatcgccagcttctcatgtgcctgtgctcctggctacacgggcacacgctgcgagagccaggtggacgaatgccgcagccagccctgccgccatggcggcaaatgcctagacctggtggacaagtacctctgccgctgcccttctgggaccacaggtgtgaactgcgaagtgaacattgacgactgtgccagcaacccctgcacctttggagtctgccgtgatggcatcaaccgctacgactgtgtctgccaacctggcttcacagggcccctttgtaacgtggagatcaatgagtgtgcttccagcccatgcggcgagggaggttcctgtgtggatggggaaaatggcttccgctgcctctgcccgcctggctccttgcccccactctgcctccccccgagccatccctgtgcccatgagccctgcagtcacggcatctgctatgatgcacctggcgggttccgctgtgtgtgtgagcctggctggagtggcccccgctgcagccagagcctggcccgagacgcctgtgagtcccagccgtgcagggccggtgggacatgcagcagcgatggaatgggtttccactgcacctgcccgcctggtgtccagggacgtcagtgtgaactcctctccccctgcaccccgaacccctgtgagcatgggggccgctgcgagtctgcccctggccagctgcctgtctgctcctgcccccagggctggcaaggcccacgatgccagcaggatgtggacgagtgtgctggccccgcaccctgtggccctcatggtatctgcaccaacctggcagggagtttcagctgcacctgccatggagggtacactggcccttcctgtgatcaggacatcaatgactgtgaccccagtgagtgcaggggagctcttgggggtgctgctctggggaacacagtcattaagcttgaactgtgtgcctggcactgtgctgtcatttcatcttcacagttatcttacttttcccgttttatttatatggaaactgagg

SEQ ID NO: 453249 - DNA, 7917 bp, Homo sapiens
acgcggcgcggaggctggcccgggacgcgcccggagcccagggaaggagggaggaggggagggtcgcggccggccgccatggggccgggggcccgtggccgccgccgccgccgtcgcccgatgtcgccgccaccgccaccgccacccgtgcgggcgctgcccctgctgctgctgctagcggggccgggggctgcagcccccccttgcctggacggaagcccgtgtgcaaatggaggtcgttgcacccagctgccctcccgggaggctgcctgcctgtgcccgcctggctgggtgggtgagcggtgtcagctggaggacccctgtcactcaggcccctgtgctggccgtggtgtctgccagagttcagtggtggctggcaccgcccgattctcatgccggtgcccccgtggcttccgaggccctgactgctccctgccagatccctgcctcagcagcccttgtgcccacggtgcccgctgctcagtggggcccgatggacgcttcctctgctcctgcccacctggctaccagggccgcagctgccgaagcgacgtggatgagtgccgggtgggtgagccctgccgccatggtggcacctgcctcaacacacctggctccttccgctgccagtgtccagctggctacacagggccactatgtgagaaccccgcggtgccctgtgcgccctcaccatgccgtaacgggggcacctgcaggcagagtggcgacctcacttacgactgtgcctgtcttcctgggtttgagggtcagaattgtgaagtgaacgtggacgactgtccaggacaccgatgtctcaatggggggacatgcgtggatggcgtcaacacctataactgccagtgccctcctgagtggacaggccagttctgcacggaggacgtggatgagtgtcagctgcagcccaacgcctgccacaatgggggtacctgcttcaacacgctgggtggccacagctgcgtgtgtgtcaatggctggacaggtgagagctgcagtcagaatatcgatgactgtgccacagccgtgtgcttccatggggccacctgccatgaccgcgtggcttctttctactgtgcctgccccatgggcaagactggcctcctgtgtcacctggatgacgcctgtgtcagcaacccctgccacgaggatgctatctgtgacacaaatccggtgaacggccgggccatttgcacctgtcctcccggcttcacgggtggggcatgtgaccaggatgtggacgagtgctctatcggcgccaacccctgcgagcacttgggcaggtgcgtgaacacgcagggctccttcctgtgccagtgcggtcgtggctacactggacctcgctgtgagaccgatgtcaacgagtgtctgtcggggccctgccgaaaccaggccacgtgcctcgaccgcataggccagttcacctgtatctgtatggcaggcttcacaggaacctattgcgaggtggacattgacgagtgtcagagtagcccctgtgtcaacggtggggtctgcaaggaccgagtcaatggcttcagctgcacctgcccctcgggcttcagcggctccacgtgtcagctggacgtggacgaatgcgccagcacgccctgcaggaatggcgccaaatgcgtggaccagcccgatggctacgagtgccgctgtgccgagggctttgagggcacgctgtgtgatcgcaacgtggacgactgctcccctgacccatgccaccatggtcgctgcgtggatggcatcgccagcttctcatgtgcctgtgctcctggctacacgggcacacgctgcgagagccaggtggacgaatgccgcagccagccctgccgccatggcggcaaatgcctagacctggtggacaagtacctctgccgctgcccttctgggaccacaggtgtgaactgcgaagtgaacattgacgactgtgccagcaacccctgcacctttggagtctgccgtgatggcatcaaccgctacgactgtgtctgccaacctggcttcacagggcccctttgtaacgtggagatcaatgagtgtgcttccagcccatgcggcgagggaggttcctgtgtggatggggaaaatggcttccgctgcctctgcccgcctggctccttgcccccactctgcctccccccgagccatccctgtgcccatgagccctgcagtcacggcatctgctatgatgcacctggcgggttccgctgtgtgtgtgagcctggctggagtggcccccgctgcagccagagcctggcccgagacgcctgtgagtcccagccgtgcagggccggtgggacatgcagcagcgatggaatgggtttccactgcacctgcccgcctggtgtccagggacgtcagtgtgaactcctctccccctgcaccccgaacccctgtgagcatgggggccgctgcgagtctgcccctggccagctgcctgtctgctcctgcccccagggctggcaagacccatgcctgaacggtggctcgtgccaagacggcgtgggctccttttcctgctcctgcctccctggtttcgccggcccacgatgcgcccgcgatgtggatgagtgcctgagcaacccctgcggcccgggcacctgtaccgaccacgtggcctccttcacctgcacctgcccgccgggctacggaggcttccactgcgaacaggacctgcccgactgcagccccagctcctgcttcaatggcgggacctgtgtggacggcgtgaactcgttcagctgcctgtgccgtcccggctacacaggagcccactgccaacatgaggcagacccctgcctctcgcggccctgcctacacgggggcgtctgcagcgccgcccaccctggcttccgctgcacctgcctcgagagcttcacgggcccgcagtgccagacgctggtggattggtgcagccgccagccttgtcaaaacgggggtcgctgcgtccagactggggcctattgcctttgtccccctggatggagcggacgcctctgtgacatccgaagcttgccctgcagggaggccgcagcccagatcggggtgcggctggagcagctgtgtcaggcgggtgggcagtgtgtggatgaagacagctcccactactgcgtgtgcccagagggccgtactggtagccactgtgagcaggaggtggacccctgcttggcccagccctgccagcatggggggacctgccgtggctatatggggggctacatgtgtgagtgtcttcctggctacaatggtgataactgtgaggacgacgtggacgagtgtgcctcccagccctgccagcacgggggttcatgcattgacctcgtggcccgctatctctgctcctgtcccccaggaacgctgggggtgctctgcgagattaatgaggatgactgcggcccaggcccaccgctggactcagggccccggtgcctacacaatggcacctgcgtggacctggtgggtggtttccgctgcacctgtcccccaggatacactggtttgcgctgcgaggcagacatcaatgagtgtcgctcaggtgcctgccacgcggcacacacccgggactgcctgcaggacccaggcggaggtttccgttgcctttgtcatgctggcttctcaggtcctcgctgtcagactgtcctgtctccctgcgagtcccagccatgccagcatggaggccagtgccgtcctagcccgggtcctgggggtgggctgaccttcacctgtcactgtgcccagccgttctggggtccgcgttgcgagcgggtggcgcgctcctgccgggagctgcagtgcccggtgggcgtcccatgccagcagacgccccgcgggccgcgctgcgcctgccccccagggttgtcgggaccctcctgccgcagcttcccggggtcgccgccgggggccagcaacgccagctgcgcggccgccccctgtctccacgggggctcctgccgccccgcgccgctcgcgcccttcttccgctgcgcttgcgcgcagggctggaccgggccgcgctgcgaggcgcccgccgcggcacccgaggtctcggaggagccgcggtgcccgcgcgccgcctgccaggccaagcgcggggaccagcgctgcgaccgcgagtgcaacagcccaggctgcggctgggacggcggcgactgctcgctgagcgtgggcgacccctggcggcaatgcgaggcgctgcagtgctggcgcctcttcaacaacagccgctgcgaccccgcctgcagctcgcccgcctgcctctacgacaacttcgactgccacgccggtggccgcgagcgcacttgcaacccggtgtacgagaagtactgcgccgaccactttgccgacggccgctgcgaccagggctgcaacacggaggagtgcggctgggatgggctggattgtgccagcgaggtgccggccctgctggcccgcggcgtgctggtgctcacagtgctgctgccgccggaggagctactgcgttccagcgccgactttctgcagcggctcagcgccatcctgcgcacctcgctgcgcttccgcctggacgcgcacggccaggccatggtcttcccttaccaccggcctagtcctggctccgaaccccgggcccgtcgggagctggcccccgaggtgatcggctcggtagtaatgctggagattgacaaccggctctgcctgcagtcgcctgagaatgatcactgcttccccgatgcccagagcgccgctgactacctgggagcgttgtcagcggtggagcgcctggacttcccgtacccactgcgggacgtgcggggggagccgctggagcctccagaacccagcgtcccgctgctgccactgctagtggcgggcgctgtcttgctgctggtcattctcgtcctgggtgtcatggtggcccggcgcaagcgcgagcacagcaccctctggttccctgagggcttctcactgcacaaggacgtggcctctggtcacaagggccggcgggaacccgtgggccaggacgcgctgggcatgaagaacatggccaagggtgagagcctgatgggggaggtggccacagactggatggacacagagtgcccagaggccaagcggctaaaggtagaggagccaggcatgggggctgaggaggctgtggattgccgtcagtggactcaacaccatctggttgctgctgacatccgcgtggcaccagccatggcactgacaccaccacagggcgacgcagatgctgatggcatggatgtcaatgtgcgtggcccagatggcttcaccccgctaatgctggcttccttctgtgggggggctctggagccaatgccaactgaagaggatgaggcagatgacacatcagctagcatcatctccgacctgatctgccagggggctcagcttggggcacggactgaccgtactggcgagactgctttgcacctggctgcccgttatgcccgtgctgatgcagccaagcggctgctggatgctggggcagacaccaatgcccaggaccactcaggccgcactcccctgcacacagctgtcacagccgatgcccagggtgtcttccagattctcatccgaaaccgctctacagacttggatgcccgcatggcagatggctcaacggcactgatcctggcggcccgcctggcagtagagggcatggtggaagagctcatcgccagccatgctgatgtcaatgctgtggatgagcttgggaaatcagccttacactgggctgcggctgtgaacaacgtggaagccactttggccctgctcaaaaatggagccaataaggacatgcaggatagcaaggaggagacccccctattcctggccgcccgcgagggcagctatgaggctgccaagctgctgttggaccactttgccaaccgtgagatcaccgaccacctggacaggctgccgcgggacgtagcccaggagagactgcaccaggacatcgtgcgcttgctggatcaacccagtgggccccgcagcccccccggtccccacggcctggggcctctgctctgtcctccaggggccttcctccctggcctcaaagcggcacagtcggggtccaagaagagcaggaggccccccgggaaggcggggctggggccgcaggggccccgggggcggggcaagaagctgacgctggcctgcccgggccccctggctgacagctcggtcacgctgtcgcccgtggactcgctggactccccgcggcctttcggtgggccccctgcttcccctggtggcttcccccttgaggggccctatgcagctgccactgccactgcagtgtctctggcacagcttggtggcccaggccgggcgggtctagggcgccagccccctggaggatgtgtactcagcctgggcctgctgaaccctgtggctgtgcccctcgattgggcccggctgcccccacctgcccctccaggcccctcgttcctgctgccactggcgccgggaccccagctgctcaacccagggacccccgtctccccgcaggagcggcccccgccttacctggcagtcccaggacatggcgaggagtacccggtggctggggcacacagcagccccccaaaggcccgcttcctgcgggttcccagtgagcacccttacctgaccccatcccccgaatcccctgagcactgggccagcccctcacctccctccctctcagactggtccgaatccacgcctagcccagccactgccactggggccatggccaccaccactggggcactgcctgcccagccacttcccttgtctgttcccagctcccttgctcaggcccagacccagctggggccccagccggaagttacccccaagaggcaagtgttggcctgagacgctcgtcagttcttagatcttgggggcctaaagagacccccgtcctgcctcctttctttctctgtctcttccttccttttagtctttttcatcctcttctctttccaccaaccctcctgcatccttgccttgcagcgtgaccgagataggtcatcagcccagggcttcagtcttcctttatttataatgggtgggggctaccacccaccctctcagtcttgtgaagagtctgggacctccttcttccccacttctctcttccctcattcctttctctctccttctggcctctcatttccttacactctgacatgaatgaattattattatttttctttttctttttttttttacattttgtatagaaacaaattcatttaaacaaacttattattattattttttacaaaatatatatatggagatgctccctccccctgtgaaccccccagtgcccccgtggggctgagtctgtgggcccattcggccaagctggattctgtgtacctagtacacaggcatgactgggatcccgtgtaccgagtacacgacccaggtatgtaccaagtaggcacccttgggcgcacccactggggccaggggtcgggggagtgttgggagcctcctccccaccccacctccctcacttcactgcattccagattggacatgttccatagccttgctggggaagggcccactgccaactccctctgccccagccccacccttggccatctccctttgggaactagggggctgctggtgggaaatgggagccagggcagatgtatgcattcctttatgtccctgtaaatgtgggactacaagaagaggagctgcctgagtggtactttctcttcctggtaatcctctggcccagccttatggcagaatagaggtatttttaggctatttttgtaatatggcttctggtcaaaatccctgtgtagctgaattcccaagccctgcattgtacagccccccactcccctcaccacctaataaaggaatagttaacactca

SEQ ID NO: 453250 - DNA, 4412 bp, Homo sapiens
  misc_feature (14)..(15): n is a, c, g, or t
  misc_feature (110)..(110): n is a, c, g, or t
agtgtcgctcaggnntgcctgccacgcggcacacacccgggactgcagcaggaccagcgaggttttttttcccccccccgggttttttttggggcccccccctttttttnttggggtccatgctggcttctcagggtcctcgctgtcagactgtcctgtctccctgcgagtcccagccatgccagcatggaggccagtgccgtcctagcccgggtcctgggggtgggctgaccttcacctgtcactgtgcccagccgttctggggtccgcgttgcgagcgggtggcgcgctcctgccgggagctgcagtgcccggtgggcgtcccatgccagcagacgccccgcgggccgcgctgcgcctgccccccagggttgtcgggaccctcctgccgcagcttcccggggtcgccgccgggggccagcaacgccagctgcgcggccgccccctgtctccacgggggctcctgccgccccgcgccgctcgcgcccttcttccgctgcgcttgcgcgcagggctggaccgggccgcgctgcgaggcgcccgccgcggcacccgaggtctcggaggagccgcggtgcccgcgcgccgcctgccaggccaagcgcggggaccagcgctgcgaccgcgagtgcaacagcccaggctgcggctgggacggcggcgactgctcgctgagcgtgggcgacccctggcggcaatgcgaggcgctgcagtgctggcgcctcttcaacaacagccgctgcgaccccgcctgcagctcgcccgcctgcctctacgacaacttcgactgccacgccggtggccgcgagcgcacttgcaacccggtgtacgagaagtactgcgccgaccactttgccgacggccgctgcgaccagggctgcaacacggaggagtgcggctgggatgggctggattgtgccagcgaggtgccggccctgctggcccgcggcgtgctggtgctcacagtgctgctgccgccggaggagctactgcgttccagcgccgactttctgcagcggctcagcgccatcctgcgcacctcgctgcgcttccgcctggacgcgcacggccaggccatggtcttcccttaccaccggcctagtcctggctccgaaccccgggcccgtcgggagctggcccccgaggtgatcggctcggtagtaatgctggagattgacaaccggctctgcctgcagtcgcctgagaatgatcactgcttccccgatgcccagagcgccgctgactacctgggagcgttgtcagcggtggagcgcctggacttcccgtacccactgcgggacgtgcggggggagccgctggagcctccagaacccagcgtcccgctgctgccactgctagtggcgggcgctgtcttgctgctggtcattctcgtcctgggtgtcatggtggcccggcgcaagcgcgagcacagcaccctctggttccctgagggcttctcactgcacaaggacgtggcctctggtcacaagggccggcgggaacccgtgggccaggacgcgctgggcatgaagaacatggccaagggtgagagcctgatgggggaggtggccacagactggatggacacagagtgcccagaggccaagcggctaaaggtagaggagccaggcatgggggctgaggaggctgtggattgccgtcagtggactcaacaccatctggttgctgctgacatccgcgtggcaccagccatggcactgacaccaccacagggcgacgcagatgctgatggcatggatgtcaatgtgcgtggcccagatggcttcaccccgctaatgctggcttccttctgtgggggggctctggagccaatgccaactgaagaggatgaggcagatgacacatcagctagcatcatctccgacctgatctgccagggggctcagcttggggcacggactgaccgtactggcgagactgctttgcacctggctgcccgttatgcccgtgctgatgcagccaagcggctgctggatgctggggcagacaccaatgcccaggaccactcaggccgcactcccctgcacacagctgtcacagccgatgcccagggtgtcttccagattctcatccgaaaccgctctacagacttggatgcccgcatggcagatggctcaacggcactgatcctggcggcccgcctggcagtagagggcatggtggaagagctcatcgccagccatgctgatgtcaatgctgtggatgagcttgggaaatcagccttacactgggctgcggctgtgaacaacgtggaagccactttggccctgctcaaaaatggagccaataaggacatgcaggatagcaaggaggagacccccctattcctggccgcccgcgagggcagctatgaggctgccaagctgctgttggaccactttgccaaccgtgagatcaccgaccacctggacaggctgccgcgggacgtagcccaggagagactgcaccaggacatcgtgcgcttgctggatcaacccagtgggccccgcagcccccccggtccccacggcctggggcctctgctctgtcctccaggggccttcctccctggcctcaaagcggcacagtcggggtccaagaagagcaggaggccccccgggaaggcggggctggggccgcaggggccccgggggcggggcaagaagctgacgctggcctgcccgggccccctggctgacagctcggtcacgctgtcgcccgtggactcgctggactccccgcggcctttcggtgggccccctgcttcccctggtggcttcccccttgaggggccctatgcagctgccactgccactgcagtgtctctggcacagcttggtggcccaggccgggcgggtctagggcgccagccccctggaggatgtgtactcagcctgggcctgctgaaccctgtggctgtgcccctcgattgggcccggctgcccccacctgcccctccaggcccctcgttcctgctgccactggcgccgggaccccagctgctcaacccagggacccccgtctccccgcaggagcggcccccgccttacctggcagtcccaggacatggcgaggagtacccggtggctggggcacacagcagccccccaaaggcccgcttcctgcgggttcccagtgagcacccttacctgaccccatcccccgaatcccctgagcactgggccagcccctcacctccctccctctcagactggtccgaatccacgcctagcccagccactgccactggggccatggccaccaccactggggcactgcctgcccagccacttcccttgtctgttcccagctcccttgctcaggcccagacccagctggggccccagccggaagttacccccaagaggcaagtgttggcctgagacgctcgtcagttcttagatcttgggggcctaaagagacccccgtcctgcctcctttctttctctgtctcttccttccttttagtctttttcatcctcttctctttccaccaaccctcctgcatccttgccttgcagcgtgaccgagataggtcatcagcccagggcttcagtcttcctttatttataatgggtgggggctaccacccaccctctcagtcttgtgaagagtctgggacctccttcttccccacttctctcttccctcattcctttctctctccttctggcctctcatttccttacactctgacatgaatgaattattattatttttctttttctttttttttttacattttgtatagaaacaaattcatttaaacaaacttattattattattttttacaaaatatatatatggagatgctccctccccctgtgaaccccccagtgcccccgtggggctgagtctgtgggcccattcggccaagctggattctgtgtacctagtacacaggcatgactgggatcccgtgtaccgagtacacgacccaggtatgtaccaagtaggcacccttgggcgcacccactggggccaggggtcgggggagtgttgggagcctcctccccaccccacctccctcacttcactgcattccagattggacatgttccatagccttgctggggaagggcccactgccaactccctctgccccagccccacccttggccatctccctttgggaactagggggctgctggtgggaaatgggagccagggcagatgtatgcattcctttatgtccctgtaaatgtgggactacaagaagaggagctgcctgagtggtactttctcttcctggtaatcctctggcccagccttatggcagaatagaggtatttttaggctatttttgtaatatggcttctggtcaaaatccctgtgtagctgaattcccaagccctgcattgtacagccccccactcccctcaccacctaataaaggaatagttaacactca

SEQ ID NO: 453251 - DNA, 7301 bp, Homo sapiens
acgcggcgcggaggctggcccgggacgcgcccggagcccagggaaggagggaggaggggagggtcgcggccggccgccatggggccgggggcccgtggccgccgccgccgccgtcgcccgatgtcgccgccaccgccaccgccacccgtgcgggcgctgcccctgctgctgctgctagcggggccgggggctgcagcccccccttgcctggacggaagcccgtgtgcaaatggaggtcgttgcacccagctgccctcccgggaggctgcctgcctgtgcccgcctggctgggtgggtgagcggtgtcagctggaggacccctgtcactcaggcccctgtgctggccgtggtgtctgccagagttcagtggtggctggcaccgcccgattctcatgccggtgcccccgtggcttccgaggccctgactgctccctgccagatccctgcctcagcagcccttgtgcccacggtgcccgctgctcagtggggcccgatggacgcttcctctgctcctgcccacctggctaccagggccgcagctgccgaagcgacgtggatgagtgccgggtgggtgagccctgccgccatggtggcacctgcctcaacacacctggctccttccgctgccagtgtccagctggctacacagggccactatgtgagaaccccgcggtgccctgtgcgccctcaccatgccgtaacgggggcacctgcaggcagagtggcgacctcacttacgactgtgcctgtcttcctgggtttgagggtcagaattgtgaagtgaacgtggacgactgtccaggacaccgatgtctcaatggggggacatgcgtggatggcgtcaacacctataactgccagtgccctcctgagtggacaggccagttctgcacggaggacgtggatgagtgtcagctgcagcccaacgcctgccacaatgggggtacctgcttcaacacgctgggtggccacagctgcgtgtgtgtcaatggctggacaggtgagagctgcagtcagaatatcgatgactgtgccacagccgtgtgcttccatggggccacctgccatgaccgcgtggcttctttctactgtgcctgccccatgggcaagactggcctcctgtgtcacctggatgacgcctgtgtcagcaacccctgccacgaggatgctatctgtgacacaaatccggtgaacggccgggccatttgcacctgtcctcccggcttcacgggtggggcatgtgaccaggatgtggacgagtgctctatcggcgccaacccctgcgagcacttgggcaggtgcgtgaacacgcagggctccttcctgtgccagtgcggtcgtggctacactggacctcgctgtgagaccgatgtcaacgagtgtctgtcggggccctgccgaaaccaggccacgtgcctcgaccgcataggccagttcacctgtatctgtatggcaggcttcacaggaacctattgcgaggtggacattgacgagtgtcagagtagcccctgtgtcaacggtggggtctgcaaggaccgagtcaatggcttcagctgcacctgcccctcgggcttcagcggctccacgtgtcagctggacgtggacgaatgcgccagcacgccctgcaggaatggcgccaaatgcgtggaccagcccgatggctacgagtgccgctgtgccgagggctttgagggcacgctgtgtgatcgcaacgtggacgactgctcccctgacccatgccaccatggtcgctgcgtggatggcatcgccagcttctcatgtgcctgtgctcctggctacacgggcacacgctgcgagagccaggtggacgaatgccgcagccagccctgccgccatggcggcaaatgcctagacctggtggacaagtacctctgccgctgcccttctgggaccacaggtgtgaactgcgaagtgaacattgacgactgtgccagcaacccctgcacctttggagtctgccgtgatggcatcaaccgctacgactgtgtctgccaacctggcttcacagggcccctttgtaacgtggagatcaatgagtgtgcttccagcccatgcggcgagggaggttcctgtgtggatggggaaaatggcttccgctgcctctgcccgcctggctccttgcccccactctgcctccccccgagccatccctgtgcccatgagccctgcagtcacggcatctgctatgatgcacctggcgggttccgctgtgtgtgtgagcctggctggagtggcccccgctgcagccagagcctggcccgagacgcctgtgagtcccagccgtgcagggccggtgggacatgcagcagcgatggaatgggtttccactgcacctgcccgcctggtgtccagggacgtcagtgtgaactcctctccccctgcaccccgaacccctgtgagcatgggggccgctgcgagtctgcccctggccagctgcctgtctgctcctgcccccagggctggcaagacccatgcctgaacggtggctcgtgccaagacggcgtgggctccttttcctgctcctgcctccctggtttcgccggcccacgatgcgcccgcgatgtggatgagtgcctgagcaacccctgcggcccgggcacctgtaccgaccacgtggcctccttcacctgcacctgcccgccgggctacggaggcttccactgcgaacaggacctgcccgactgcagccccagctcctgcttcaatggcgggacctgtgtggacggcgtgaactcgttcagctgcctgtgccgtcccggctacacaggagcccactgccaacatgaggcagacccctgcctctcgcggccctgcctacacgggggcgtctgcagcgccgcccaccctggcttccgctgcacctgcctcgagagcttcacgggcccgcagtgccagacgctggtggattggtgcagccgccagccttgtcaaaacgggggtcgctgcgtccagactggggcctattgcctttgtccccctggatggagcggacgcctctgtgacatccgaagcttgccctgcagggaggccgcagcccagatcggggtgcggctggagcagctgtgtcaggcgggtgggcagtgtgtggatgaagacagctcccactactgcgtgtgcccagagggccgtactggtagccactgtgagcaggaggtggacccctgcttggcccagccctgccagcatggggggacctgccgtggctatatggggggctacatgtgtgagtgtcttcctggctacaatggtgataactgtgaggacgacgtggacgagtgtgcctcccagccctgccagcacgggggttcatgcattgacctcgtggcccgctatctctgctcctgtcccccaggaacgctgggggtgctctgcgagattaatgaggatgactgcggcccaggcccaccgctggactcagggccccggtgcctacacaatggcacctgcgtggacctggtgggtggtttccgctgcacctgtcccccaggatacactggtttgcgctgcgaggcagacatcaatgagtgtcgctcaggtgcctgccacgcggcacacacccgggactgcctgcaggacccaggcggaggtttccgttgcctttgtcatgctggcttctcaggtcctcgctgtcagactgtcctgtctccctgcgagtcccagccatgccagcatggaggccagtgccgtcctagcccgggtcctgggggtgggctgaccttcacctgtcactgtgcccagccgttctggggtccgcgttgcgagcgggtggcgcgctcctgccgggagctgcagtgcccggtgggcgtcccatgccagcagacgccccgcgggccgcgctgcgcctgccccccagggttgtcgggaccctcctgccgcagcttcccggggtcgccgccgggggccagcaacgccagctgcgcggccgccccctgtctccacgggggctcctgccgccccgcgccgctcgcgcccttcttccgctgcgcttgcgcgcagggctggaccgggccgcgctgcgaggcgcccgccgcggcacccgaggtctcggaggagccgcggtgcccgcgcgccgcctgccaggccaagcgcggggaccagcgctgcgaccgcgagtgcaacagcccaggctgcggctgggacggcggcgactgctcgctgagcgtgggcgacccctggcggcaatgcgaggcgctgcagtgctggcgcctcttcaacaacagccgctgcgaccccgcctgcagctcgcccgcctgcctctacgacaacttcgactgccacgccggtggccgcgagcgcacttgcaacccggtgtacgagaagtactgcgccgaccactttgccgacggccgctgcgaccagggctgcaacacggaggagtgcggctgggatgggctggattgtgccagcgaggtgccggccctgctggcccgcggcgtgctggtgctcacagtgctgctgccgccggaggagctactgcgttccagcgccgactttctgcagcggctcagcgccatcctgcgcacctcgctgcgcttccgcctggacgcgcacggccaggccatggtcttcccttaccaccggcctagtcctggctccgaaccccgggcccgtcgggagctggcccccgaggtgatcggctcggtagtaatgctggagattgacaaccggctctgcctgcagtcgcctgagaatgatcactgcttccccgatgcccagagcgccgctgactacctgggagcgttgtcagcggtggagcgcctggacttcccgtacccactgcgggacgtgcggggggagccgctggagcctccagaacccagcgtcccgctgctgccactgctagtggcgggcgctgtcttgctgctggtcattctcgtcctgggtgtcatggtggcccggcgcaagcgcgagcacagcaccctctggttccctgagggcttctcactgcacaaggacgtggcctctggtcacaagggccggcgggaacccgtgggccaggacgcgctgggcatgaagaacatggccaagggtgagagcctgatgggggaggtggccacagactggatggacacagagtgcccagaggccaagcggctaaaggtagaggagccaggcatgggggctgaggaggctgtggattgccgtcagtggactcaacaccatctggttgctgctgacatccgcgtggcaccagccatggcactgacaccaccacagggcgacgcagatgctgatggcatggatgtcaatgtgcgtggcccagatggcttcaccccgctaatgctggcttccttctgtgggggggctctggagccaatgccaactgaagaggatgaggcagatgacacatcagctagcatcatctccgacctgatctgccagggggctcagcttggggcacggactgaccgtactggcgagactgctttgcacctggctgcccgttatgcccgtgctgatgcagccaagcggctgctggatgctggggcagacaccaatgcccaggaccactcaggccgcactcccctgcacacagctgtcacagccgatgcccagggtgtcttccagattctcatccgaaaccgctctacagacttggatgcccgcatggcagatggctcaacggcactgatcctggcggcccgcctggcagtagagggcatggtggaagagctcatcgccagccatgctgatgtcaatgctgtggatgagcttgggaaatcagccttacactgggctgcggctgtgaacaacgtggaagccactttggccctgctcaaaaatggagccaataaggacatgcaggatagcaaggaggagacccccctattcctggccgcccgcgagggcagctatgaggctgccaagctgctgttggaccactttgccaaccgtgagatcaccgaccacctggacaggctgccgcgggacgtagcccaggagagactgcaccaggacatcgtgcgcttgctggatcaacccagtgggccccgcagcccccccggtccccacggcctggggcctctgctctgtcctccaggggccttcctccctggcctcaaagcggcacagtcggggtccaagaagagcaggaggccccccgggaaggcggggctggggccgcaggggccccgggggcggggcaagaagctgacgctggcctgcccgggccccctggctgacagctcggtcacgctgtcgcccgtggactcgctggactccccgcggcctttcggtgggccccctgcttcccctggtggcttcccccttgaggggccctatgcagctgccactgccactgcagtgtctctggcacagcttggtggcccaggccgggcgggtctagggcgccagccccctggaggatgtgtactcagcctgggcctgctgaaccctgtggctgtgcccctcgattgggcccggctgcccccacctgcccctccaggcccctcgttcctgctgccactggcgccgggaccccagctgctcaacccagggacccccgtctccccgcaggagcggcccccgccttacctggcagtcccaggacatggcgaggagtacccggtggctggggcacacagcagccccccaaaggcccgcttcctgcgggttcccagtgagcacccttacctgaccccatcccccgaatcccctgagcactgggccagcccctcacctccctccctctcagactggtccgaatccacgcctagcccagccactgccactggggccatggccaccaccactggggcactgcctgcccagccacttcccttgtctgttcccagctcccttgctcaggcccagacccagctggggccccagccggaagttacccccaagaggcaagtgttggcctgagacgctcgtcagttcttagatcttgggggcctaaagagacccccgtcctgcctcctttctttctctgtctcttccttccttttagtctttttcatcctcttctctttccaccaaccctcctgcatccttgccttgcagcgtgaccgagataggtcatcagcccagggcttcagtcttcctttatttataatgggtgggggctaccacccaccctctcagtcttgtgaagagtctgggacctccttcttccccacttctctcttccctcattcctttctctctccttctggcctctcatttccttacactctgcctcccggattcaatgtgattctccattcctcacgcctcccgatgtagctcgggaacggagaatccacttggaggtacctgacgctcgcaattctgtaata

SEQ ID NO: 453252 - DNA, 5727 bp, Homo sapiens
acgcggcgcggaggctggcccgggacgcgcccggagcccagggaaggagggaggaggggagggtcgcggccggccgccatggggccgggggcccgtggccgccgccgccgccgtcgcccgatgtcgccgccaccgccaccgccacccgtgcgggcgctgcccctgctgctgctgctagcggggccgggggctgcagcccccccttgcctggacggaagcccgtgtgcaaatggaggtcgttgcacccagctgccctcccgggaggctgcctgcctgtgcccgcctggctgggtgggtgagcggtgtcagctggaggacccctgtcactcaggcccctgtgctggccgtggtgtctgccagagttcagtggtggctggcaccgcccgattctcatgccggtgcccccgtggcttccgaggccctgactgctccctgccagatccctgcctcagcagcccttgtgcccacggtgcccgctgctcagtggggcccgatggacgcttcctctgctcctgcccacctggctaccagggccgcagctgccgaagcgacgtggatgagtgccgggtgggtgagccctgccgccatggtggcacctgcctcaacacacctggctccttccgctgccagtgtccagctggctacacagggccactatgtgagaaccccgcggtgccctgtgcgccctcaccatgccgtaacgggggcacctgcaggcagagtggcgacctcacttacgactgtgcctgtcttcctgggtttgagggtcagaattgtgaagtgaacgtggacgactgtccaggacaccgatgtctcaatggggggacatgcgtggatggcgtcaacacctataactgccagtgccctcctgagtggacaggccagttctgcacggaggacgtggatgagtgtcagctgcagcccaacgcctgccacaatgggggtacctgcttcaacacgctgggtggccacagctgcgtgtgtgtcaatggctggacaggtgagagctgcagtcagaatatcgatgactgtgccacagccgtgtgcttccatggggccacctgccatgaccgcgtggcttctttctactgtgcctgccccatgggcaagactggcctcctgtgtcacctggatgacgcctgtgtcagcaacccctgccacgaggatgctatctgtgacacaaatccggtgaacggccgggccatttgcacctgtcctcccggcttcacgggtggggcatgtgaccaggatgtggacgagtgctctatcggcgccaacccctgcgagcacttgggcaggtgcgtgaacacgcagggctccttcctgtgccagtgcggtcgtggctacactggacctcgctgtgagaccgatgtcaacgagtgtctgtcggggccctgccgaaaccaggccacgtgcctcgaccgcataggccagttcacctgtatctgtatggcaggcttcacaggaacctattgcgaggtggacattgacgagtgtcagagtagcccctgtgtcaacggtggggtctgcaaggaccgagtcaatggcttcagctgcacctgcccctcgggcttcagcggctccacgtgtcagctggacgtggacgaatgcgccagcacgccctgcaggaatggcgccaaatgcgtggaccagcccgatggctacgagtgccgctgtgccgagggctttgagggcacgctgtgtgatcgcaacgtggacgactgctcccctgacccatgccaccatggtcgctgcgtggatggcatcgccagcttctcatgtgcctgtgctcctggctacacgggcacacgctgcgagagccaggtggacgaatgccgcagccagccctgccgccatggcggcaaatgcctagacctggtggacaagtacctctgccgctgcccttctgggaccacaggtgtgaactgcgaagtgaacattgacgactgtgccagcaacccctgcacctttggagtctgccgtgatggcatcaaccgctacgactgtgtctgccaacctggcttcacagggcccctttgtaacgtggagatcaatgagtgtgcttccagcccatgcggcgagggaggttcctgtgtggatggggaaaatggcttccgctgcctctgcccgcctggctccttgcccccactctgcctccccccgagccatccctgtgcccatgagccctgcagtcacggcatctgctatgatgcacctggcgggttccgctgtgtgtgtgagcctggctggagtggcccccgctgcagccagagcctggcccgagacgcctgtgagtcccagccgtgcagggccggtgggacatgcagcagcgatggaatgggtttccactgcacctgcccgcctggtgtccagggacgtcagtgtgaactcctctccccctgcaccccgaacccctgtgagcatgggggccgctgcgagtctgcccctggccagctgcctgtctgctcctgcccccagggctggcaagacccatgcctgaacggtggctcgtgccaagacggcgtgggctccttttcctgctcctgcctccctggtttcgccggcccacgatgcgcccgcgatgtggatgagtgcctgagcaacccctgcggcccgggcacctgtaccgaccacgtggcctccttcacctgcacctgcccgccgggctacggaggcttccactgcgaacaggacctgcccgactgcagccccagctcctgcttcaatggcgggacctgtgtggacggcgtgaactcgttcagctgcctgtgccgtcccggctacacaggagcccactgccaacatgaggcagacccctgcctctcgcggccctgcctacacgggggcgtctgcagcgccgcccaccctggcttccgctgcacctgcctcgagagcttcacgggcccgcagtgccagacgctggtggattggtgcagccgccagccttgtcaaaacgggggtcgctgcgtccagactggggcctattgcctttgtccccctggatggagcggacgcctctgtgacatccgaagcttgccctgcagggaggccgcagcccagatcggggtgcggctggagcagctgtgtcaggcgggtgggcagtgtgtggatgaagacagctcccactactgcgtgtgcccagagggccgtactggtagccactgtgagcaggaggtggacccctgcttggcccagccctgccagcatggggggacctgccgtggctatatggggggctacatgtgtgagtgtcttcctggctacaatggtgataactgtgaggacgacgtggacgagtgtgcctcccagccctgccagcacgggggttcatgcattgacctcgtggcccgctatctctgctcctgtcccccaggaacgctgggggtgctctgcgagattaatgaggatgactgcggcccaggcccaccgctggactcagggccccggtgcctacacaatggcacctgcgtggacctggtgggtggtttccgctgcacctgtcccccaggatacactggtttgcgctgcgaggcagacatcaatgagtgtcgctcaggtgcctgccacgcggcacacacccgggactgcctgcaggacccaggcggaggtttccgttgcctttgtcatgctggcttctcaggtcctcgctgtcagactgtcctgtctccctgcgagtcccagccatgccagcatggaggccagtgccgtcctagcccgggtcctgggggtgggctgaccttcacctgtcactgtgcccagccgttctggggtccgcgttgcgagcgggtggcgcgctcctgccgggagctgcagtgcccggtgggcgtcccatgccagcagacgccccgcgggccgcgctgcgcctgccccccagggttgtcgggaccctcctgccgcagcttcccggggtcgccgccgggggccagcaacgccagctgcgcggccgccccctgtctccacgggggctcctgccgccccgcgccgctcgcgcccttcttccgctgcgcttgcgcgcagggctggaccgggccgcgctgcgaggcgcccgccgcggcacccgaggtctcggaggagccgcggtgcccgcgcgccgcctgccaggccaagcgcggggaccagcgctgcgaccgcgagtgcaacagcccaggctgcggctgggacggcggcgactgctcgctgagcgtgggcgacccctggcggcaatgcgaggcgctgcagtgctggcgcctcttcaacaacagccgctgcgaccccgcctgcagctcgcccgcctgcctctacgacaacttcgactgccacgccggtggccgcgagcgcacttgcaacccggtgtacgagaagtactgcgccgaccactttgccgacggccgctgcgaccagggctgcaacacggaggagtgcggctgggatgggctggattgtgccagcgaggtgccggccctgctggcccgcggcgtgctggtgctcacagtgctgctgccgccggaggagctactgcgttccagcgccgactttctgcagcggctcagcgccatcctgcgcacctcgctgcgcttccgcctggacgcgcacggccaggccatggtcttcccttaccaccggcctagtcctggctccgaaccccgggcccgtcgggagctggcccccgaggtgatcggctcggtagtaatgctggagattgacaaccggctctgcctgcagtcgcctgagaatgatcactgcttccccgatgcccagagcgccgctgactacctgggagcgttgtcagcggtggagcgcctggacttcccgtacccactgcgggacgtgcggggggagccgctggagcctccagaacccagcgtcccgctgctgccactgctagtggcgggcgctgtcttgctgctggtcattctcgtcctgggtgtcatggtggcccggcgcaagcgcgagcacagcaccctctggttccctgagggcttctcactgcacaaggacgtggcctctggtcacaagggccggcgggaacccgtgggccaggacgcgctgggcatgaagaacatggccaagggtgagagcctgatgggggaggtggccacagactggatggacacagagtgcccagaggccaagcggctaaaggtagaggagccaggcatgggggctgaggaggctgtggattgccgtcagtggactcaacaccatctggttgctgctgacatccgcgtggcaccagccatggcactgacaccaccacagggcgacgcagatgctgatggcatggatgtcaatgtgcgtggcccagatggcttcaccccgctaatgctggcttccttctgtgggggggctctggagccaatgccaactgaagaggatgaggcagatgacacatcagctagcatcatctccgacctgatctgccagggggctcagcttggggcacggactgaccgtactggcgagactgctttgcacctggctgcccgttatgcccgtgctgatgcagccaagcggctgctggatgctggggcagacaccaatgcccaggaccactcaggccgcactcccctgcacacagctgtcacagccgatgcccagggtgtcttccagattctcatccgaaaccgctctacagacttggatgcccgcatggcagatggctcaacggcactgatcctggcggcccgcctggcccgcacatccgtactggcccgcacatccgatggcccgcacaatccgtactgcccg

SEQ ID NO: 453253 - DNA, 3099 bp, Homo sapiens
  misc_feature (1)..(1): n is a, c, g, or t
ntttttacctaagcaagcctgggcaatggcgggcgtccctcccccagcctcgttgccgccttgcagtttgatctcagactgctgtgctagcaatcagcgagattccgtgggcgtaggaccctctgagccaggtgtgggatatagtctcgtggtgcgccgtttcttaagccggtctgaaaagcgcaatattcggatgggagtgacccgattttccaggaactgaagttaaaagatgaagaatgtgagaggctttcaaaagtgcgagatcaacttggacaggaattggaagaactcacagctagtctatttgaggaagctcataaaatggtgagagaagcaaatatcaagcaggcaacagcagaaaaacagctaaaagaagcacaaggaaaaattgatgtacttcaagctgaagtagctgcattgaagacacttgtattgtccagttctccaacatcacctacgcaggagcctttgccaggtggaaagacaccttttaaaaaggggcatacaagaaataaaagcacaagcagtgctatgagtggcagtcatcaggacctcagtgtgatacagccaattgtaaaagactgcaaagaggctgacttatccttgtataatgaattccgattgtggaaggatgagcccacaatggacaggacgtgtcctttcttagacaaaatctaccaggaagatatctttccatgtttaacattctcaaaaagtgagttggcttcagctgttctggaggctgtggaaaacaatactctaagcattgaaccagtgggattacaacctatccggtttgtgaaagcttctgcagttgaatgcggaggaccaaaaaaatgtgctctcactggccagagtaagtcctgtaaacacagaattaaattaggggactcaagcaactattattatatttctcctttttgcagatacaggatcacttctgtatgtaacttttttacatacattcgatacattcagcagggactcgtgaaacagcaggatgttgatcagatgttttgggaggttatgcagttgagaaaagagatgtcattggcaaagctgggttatttcaaagaggaactctgatgctctgcgtgggaccatgcctgaactccccgaataactgaaaaatggctgaatatttttatggttacttgatatttatttccaaggagtgagcctaagacttttttccccttttgcaaattgctctaagaagtaccatgatttcttttaaactgatctatgctgtgtttgcttattctttagttgaacacactatgaagaattccaggtgtactagtgaatgtaatttatagttgccaaaaaaaaacaaacctgaaataaataaatgttagattgaatgtgtgtacattttctcttctagctctgacatggcatttagggttagcagaatgtattaaatagtaattttcaaactacacagtagcttccttccttgtgagaggcaagaaagaagtctgagtggatagtactcactttccaaggcccccacctctagaatggctttatttttatctgttttctatattgggtttcaaaaaagattttatttgaagaaatacttctgctgctacaaagtttgaaagttactattttaattattctgctctctgtaactgaaagaatccctttattttggttattcattaaaatataatagaaggcagtcagattttatcccagagatgtattcctgagtgtcttgatatagtgtattcatgttttatatgtgttgaccactatattgtcattggagggacatagatgtaaatgagtttgacgtgtgtcaaaggggtttaaaggggtgtggattgaatgaatggtacgtgcgaagtatatgctgattatagaaccacttgatctctgcattccaaattgtaaaactgactcaactggagaaattataacaaagaggtttgtggtagaaatgtaataagtatagaaaagcaaaaagaaaagagaaactgctttagtttctgtttagagaaagctgctgttaatatttttggatagtagcctttcagctttcagatattttctacttacatatgcatatttttgaaacaaaaagtaggctttttttttgctttttaaacctaaacattaaatatattttcccttgggtaaacctacacatcctaatccctgtttatagaattttaacataatttaattgtgtttggagatgaggtggttttcagtttatttttcatattataatgctgtgacgagtatccttatctgtacacttctgaacattgtggagttctttcatgtggatgcctggagataaaattgtgtcgagatatatatgtatttttaaatgtttgatctgcattgctagattgccatccagaaaagttaatcaatttgtattcacagcagcagtgtacaagagggctggttttctgaagataacatttttttcagtcctgttcagaggtttggtcaatcttacctgtagatgacttcagccaccaggctggatgggagcccacagacaaaaggacattggtgtatgttatggtgaaaaccatcagtaccatgcctagctcaagaatgtgaaattgaacctgaaaaaaactttgaacctacaattttatgttctgaaaatagttattctaatgtgagggcattaataagaatatgtaccatcaaagcttcagaagattttccatacaaactaaaatcacttttggagaaagtacctaaataaaaagagaaacaaatccaggagatactgtacggtttgaaagaaaggtaatcaaatactcagaaaaagtttgttgatgacttaaaaaggataaataaaaagtaagactaaagaaaatcagtatacccattaataataaatctttagtaatctataaggggaagaatgcttttcaaccttatacactagaagcatgctctttaaaattaatgcaacaggatgacgacttgatgtagaaactatatgtggaattatagattaaaatgtgattgaaacatatttagaaaatgtgattatcttcctgatcctactccctttaggaagaacttcttaaactggaagcaggaaaaaaaaaaacc

SEQ ID NO: 453254 - DNA, 3624 bp, Homo sapiens
ctcccggctcccggcccccggccccgcttccggcgcaggcgcagtcccgcgttccctcggcggctgccggcgtagtgagcccgccgccgtggagtgtagcggaaagggctcgccgtcctcctccgtttctcgctgcttcgggacgcgctctctgcggctctgtgagcgcccctgagcgccggcagcggccgcggtgggttcttcaggttatcttatgatgaggcttttgctatggctaatgatcccttggaaggcttccatgaagtaaaccttgcttcacctacttctccggaccttcttggtgtgtatgaatcaggaactcaagagcagactacctcaccaagtgtcatctaccggccacacccttcagctttatcctctgtacctatccaggcaaatgcattagatgtttctgaacttcctacacaacccgtgtattcatcccccagacgtttaaattgtgcggaaatatctagtatcagctttcatgttacagacccagccccttgctctacctctggagtcacagctggattaactaaattaactacaagaaaggacaactataatgcagagagagagtttttacagggtgctactataacagaggcttgcgatggcagtgatgatatttttgggttgagtactgatagtctgtctcgtttacgaagcccatctgttttggaagttagagaaaagggctatgaacgattaaaagaagaactcgcaaaagctcagagggaactgaagttaaaagatgaagaatgtgagaggctttcaaaagtgcgagatcaacttggacaggaattggaagaactcacagctagtctatttgaggaagctcataaaatggtgagagaagcaaatatcaagcaggcaacagcagaaaaacagctaaaagaagcacaaggaaaaattgatgtacttcaagctgaagtagctgcattgaagacacttgtattgtccagttctccaacatcacctacgcaggagcctttgccaggtggaaagacaccttttaaaaaggggcatacaagaaataaaagcacaagcagtgctatgagtggcagtcatcaggacctcagtgtgatacagccaattgtaaaagactgcaaagaggctgacttatccttgtataatgaattccgattgtggaaggatgagcccacaatggacaggacgtgtcctttcttagacaaaatctaccaggaagatatctttccatgtttaacattctcaaaaagtgagttggcttcagctgttctggaggctgtggaaaacaatactctaagcattgaaccagtgggattacaacctatccggtttgtgaaagcttctgcagttgaatgcggaggaccaaaaaaatgtgctctcactggccagagtaagtcctgtaaacacagaattaaattaggggactcaagcaactattattatatttctcctttttgcagatacaggatcacttctgtatgtaacttttttacatacattcgatacattcagcagggactcgtgaaacagcaggatgttgatcagatgttttgggaggttatgcagttgagaaaagagatgtcattggcaaagctgggttatttcaaagaggaactctgatgctctgcgtgggaccatgcctgaactccccgaataactgaaaaatggctgaatatttttatggttacttgatatttatttccaaggagtgagcctaagacttttttccccttttgcaaattgctctaagaagtaccatgatttcttttaaactgatctatgctgtgtttgcttattctttagttgaacacactatgaagaattccaggtgtactagtgaatgtaatttatagttgccaaaaaaaaacaaacctgaaataaataaatgttagattgaatgtgtgtacattttctcttctagctctgacatggcatttagggttagcagaatgtattaaatagtaattttcaaactacacagtagcttccttccttgtgagaggcaagaaagaagtctgagtggatagtactcactttccaaggcccccacctctagaatggctttatttttatctgttttctatattgggtttcaaaaaagattttatttgaagaaatacttctgctgctacaaagtttgaaagttactattttaattattctgctctctgtaactgaaagaatccctttattttggttattcattaaaatataatagaaggcagtcagattttatcccagagatgtattcctgagtgtcttgatatagtgtattcatgttttatatgtgttgaccactatattgtcattggagggacatagatgtaaatgagtttgacgtgtgtcaaaggggtttaaaggggtgtggattgaatgaatggtacgtgcgaagtatatgctgattatagaaccacttgatctctgcattccaaattgtaaaactgactcaactggagaaattataacaaagaggtttgtggtagaaatgtaataagtatagaaaagcaaaaagaaaagagaaactgctttagtttctgtttagagaaagctgctgttaatatttttggatagtagcctttcagctttcagatattttctacttacatatgcatatttttgaaacaaaaagtaggctttttttttgctttttaaacctaaacattaaatatattttcccttgggtaaacctacacatcctaatccctgtttatagaattttaacataatttaattgtgtttggagatgaggtggttttcagtttatttttcatattataatgctgtgacgagtatccttatctgtacacttctgaacattgtggagttctttcatgtggatgcctggagataaaattgtgtcgagatatatatgtatttttaaatgtttgatctgcattgctagattgccatccagaaaagttaatcaatttgtattcacagcagcagtgtacaagagggctggttttctgaagataacatttttttcagtcctgttcagaggtttggtcaatcttacctgtagatgacttcagccaccaggctggatgggagcccacagacaaaaggacattggtgtatgttatggtgaaaaccatcagtaccatgcctagctcaagaatgtgaaattgaacctgaaaaaaactttgaacctacaattttatgttctgaaaatagttattctaatgtgagggcattaataagaatatgtaccatcaaagcttcagaagattttccatacaaactaaaatcacttttggagaaagtacctaaataaaaagagaaacaaatccaggagatactgtacggtttgaaagaaaggtaatcaaatactcagaaaaagtttgttgatgacttaaaaaggataaataaaaagtaagactaaagaaaatcagtatacccattaataataaatctttagtaatctataaggggaagaatgcttttcaaccttatacactagaagcatgctctttaaaattaatgcaacaggatgacgacttgatgtagaaactatatgtggaattatagattaaaatgtgattgaaacatatttagaaaatgtgattatcttcctgatcctactccctttaggaagaacttcttaaactggaagcaggaaaaaaaaaaacc

SEQ ID NO: 453255 - DNA, 3145 bp, Homo sapiens
ctcccggctcccggcccccggccccgcttccggcgcaggcgcagtcccgcgttccctcggcggctgccggcgtagtgagcccgccgccgtggagtgtagcggaaagggctcgccgtcctcctccgtttctcgctgcttcgggacgcgctctctgcggctctgtgagcgcccctgagcgccggcagcggccgcggtgggttcttcaggttatcttatgatgaggcttttgctatggctaatgatcccttggaaggcttccatgaagtaaaccttgcttcacctacttctccggaccttcttggtgtgtatgaatcaggaactcaagagcagactacctcaccaagtgtcatctaccggccacacccttcagctttatcctctgtacctatccaggcaaatgcattagatgtttctgaacttcctacacaacccgtgtattcatcccccagacgtttaaattgtgcggaaatatctagtatcagctttcatgttacagacccagccccttgctctacctctggagtcacagctggattaactaaattaactacaagaaaggacaactataatgcagagagagagtttttacagggtgctactataacagaggcttgcgatggcagtgatgatatttttgggttgagtactgatagtctgtctcgtttacgaagcccatctgttttggaagttagagaaaagggctatgaacgattaaaagaagaactcgcaaaagctcagagggaactgaagttaaaagatgaagaatgtgagaggctttcaaaagtgcgagatcaacttggacaggaattggaagaactcacagctagtctatttgaggaagctcataaaatggtgagagaagcaaatatcaagcaggcaacagcagaaaaacagctaaaagaagcacaaggaaaaattgatgtacttcaagctgaagtagctgcattgaagacacttgtattgtccagttctccaacatcacctacgcaggagcctttgccaggtggaaagacaccttttaaaaaggggcatacaagaaataaaagcacaagcagtgctatgagtggcagtcatcaggacctcagtgtgatacagccaattgtaaaagactgcaaagaggctgacttatccttgtataatgaattccgattgtggaaggatgagcccacaatggacaggacgtgtcctttcttagacaaaatctaccaggaagatatctttccatgtttaacattctcaaaaagtgagttggcttcagctgttctggaggctgtggaaaacaatactctaagcattgaaccagtgggattacaacctatccggtttgtgaaagcttctgcagttgaatgcggaggaccaaaaaaatgtgctctcactggccagagtaagtcctgtaaacacagaattaaattaggggactcaagcaactattattatatttctcctttttgcagatacaggatcacttctgtatgtaacttttttacatacattcgatacattcagcagggactcgtgaaacagcaggatgttgatcagatgttttgggaggttatgcagttgagaaaagagatgtcattggcaaagctgggttatttcaaagaggaactctgatgctctgcgtgggaccatgcctgaactccccgaataactgaaaaatggctgaatatttttatggttacttgatatttatttccaaggagtgagcctaagacttttttccccttttgcaaattgctctaagaagtaccatgatttcttttaaactgatctatgctgtgtttgcttattctttagttgaacacactatgaagaattccaggtgtactagtgaatgtaatttatagttgccaaaaaaaaacaaacctgaaataaataaatgttagattgaatgtgtgtacattttctcttctagctctgacatggcatttagggttagcagaatgtattaaatagtaattttcaaactacacagtagcttccttccttgtgagaggcaagaaagaagtctgagtggatagtactcactttccaaggcccccacctctagaatggctttatttttatctgttttctatattgggtttcaaaaaagattttatttgaagaaatacttctgctgctacaaagtttgaaagttactattttaattattctgctctctgtaactgaaagaatccctttattttggttattcattaaaatataatagaaggcagtcagattttatcccagagatgtattcctgagtgtcttgatatagtgtattcatgttttatatgtgttgaccactatattgtcattggagggacatagatgtaaatgagtttgacgtgtgtcaaaggggtttaaaggggtgtggattgaatgaatggtacgtgcgaagtatatgctgattatagaaccacttgatctctgcattccaaattgtaaaactgactcaactggagaaattataacaaagaggtttgtggtagaaatgtaataagtatagaaaagcaaaaagaaaagagaaactgctttagtttctgtttagagaaagctgctgttaatatttttggatagtagcctttcagctttcagatattttctacttacatatgcatatttttgaaacaaaaagtaggctttttttttgctttttaaacctaaacattaaatatattttcccttgggtaaacctacacatcctaatccctgtttatagaattttaacataatttaattgtgtttggagatgaggtggttttcagtttatttttcatattataatgctgtgacgagtatccttatctgtacacttctgaacattgtggagttctttcatgtggatgcctggagataaaattgtgtcgagatatatatgtatttttaaatgtttgatctgcattgctagattgccatccagaaaagttaatcaatttgtattcacagcagcagtgtacaagagggctggttttctgaagataacatttttttcagtcctgttcagaggtttggtcaatcttacctgtagatgacttcagccaccaggctggatgggagcccacagacaaaaggacattggtgaaatgttttttggtggaaaaaccaaattttcttcttaatagtcctctttatactccctctctccatttatttttcg

SEQ ID NO: 453256 - DNA, 3382 bp, Homo sapiens
ctcccggctcccggcccccggccccgcttccggcgcaggcgcagtcccgcgttccctcggcggctgccggcgtagtgagcccgccgccgtggagtgtagcggaaagggctcgccgtcctcctccgtttctcgctgcttcgggacgcgctctctgcggctctgtgagcgcccctgagcgccggcagcggccgcggtgggttcttcaggttatcttatgatgaggcttttgctatggctaatgatcccttggaaggcttccatgaagtaaaccttgcttcacctacttctccggaccttcttggtgtgtatgaatcaggaactcaagagcagactacctcaccaagtgtcatctaccggccacacccttcagctttatcctctgtacctatccaggcaaatgcattagatgtttctgaacttcctacacaacccgtgtattcatcccccagacgtttaaattgtgcggaaatatctagtatcagctttcatgttacagacccagccccttgctctacctctggagtcacagctggattaactaaattaactacaagaaaggacaactataatgcagagagagagtttttacagggtgctactataacagaggcttgcgatggcagtgatgatatttttgggttgagtactgatagtctgtctcgtttacgaagcccatctgttttggaagttagagaaaagggctatgaacgattaaaagaagaactcgcaaaagctcagagggaactgaagttaaaagatgaagaatgtgagaggctttcaaaagtgcgagatcaacttggacaggaattggaagaactcacagctagtctatttgaggaagctcataaaatggtgagagaagcaaatatcaagcaggcaacagcagaaaaacagctaaaagaagcacaaggaaaaattgatgtacttcaagctgaagtagctgcattgaagacacttgtattgtccagttctccaacatcacctacgcaggagcctttgccaggtggaaagacaccttttaaaaaggggcatacaagaaataaaagcacaagcagtgctatgagtggcagtcatcaggacctcagtgtgatacagccaattgtaaaagactgcaaagagaaaatgtgctctcactggccagagtaagtcctgtaaacacagaattaaattaggggactcaagcaactattattatatttctcctttttgcagatacaggatcacttctgtatgtaacttttttacatacattcgatacattcagcagggactcgtgaaacagcaggatgttgatcagatgttttgggaggttatgcagttgagaaaagagatgtcattggcaaagctgggttatttcaaagaggaactctgatgctctgcgtgggaccatgcctgaactccccgaataactgaaaaatggctgaatatttttatggttacttgatatttatttccaaggagtgagcctaagacttttttccccttttgcaaattgctctaagaagtaccatgatttcttttaaactgatctatgctgtgtttgcttattctttagttgaacacactatgaagaattccaggtgtactagtgaatgtaatttatagttgccaaaaaaaaacaaacctgaaataaataaatgttagattgaatgtgtgtacattttctcttctagctctgacatggcatttagggttagcagaatgtattaaatagtaattttcaaactacacagtagcttccttccttgtgagaggcaagaaagaagtctgagtggatagtactcactttccaaggcccccacctctagaatggctttatttttatctgttttctatattgggtttcaaaaaagattttatttgaagaaatacttctgctgctacaaagtttgaaagttactattttaattattctgctctctgtaactgaaagaatccctttattttggttattcattaaaatataatagaaggcagtcagattttatcccagagatgtattcctgagtgtcttgatatagtgtattcatgttttatatgtgttgaccactatattgtcattggagggacatagatgtaaatgagtttgacgtgtgtcaaaggggtttaaaggggtgtggattgaatgaatggtacgtgcgaagtatatgctgattatagaaccacttgatctctgcattccaaattgtaaaactgactcaactggagaaattataacaaagaggtttgtggtagaaatgtaataagtatagaaaagcaaaaagaaaagagaaactgctttagtttctgtttagagaaagctgctgttaatatttttggatagtagcctttcagctttcagatattttctacttacatatgcatatttttgaaacaaaaagtaggctttttttttgctttttaaacctaaacattaaatatattttcccttgggtaaacctacacatcctaatccctgtttatagaattttaacataatttaattgtgtttggagatgaggtggttttcagtttatttttcatattataatgctgtgacgagtatccttatctgtacacttctgaacattgtggagttctttcatgtggatgcctggagataaaattgtgtcgagatatatatgtatttttaaatgtttgatctgcattgctagattgccatccagaaaagttaatcaatttgtattcacagcagcagtgtacaagagggctggttttctgaagataacatttttttcagtcctgttcagaggtttggtcaatcttacctgtagatgacttcagccaccaggctggatgggagcccacagacaaaaggacattggtgtatgttatggtgaaaaccatcagtaccatgcctagctcaagaatgtgaaattgaacctgaaaaaaactttgaacctacaattttatgttctgaaaatagttattctaatgtgagggcattaataagaatatgtaccatcaaagcttcagaagattttccatacaaactaaaatcacttttggagaaagtacctaaataaaaagagaaacaaatccaggagatactgtacggtttgaaagaaaggtaatcaaatactcagaaaaagtttgttgatgacttaaaaaggataaataaaaagtaagactaaagaaaatcagtatacccattaataataaatctttagtaatctataaggggaagaatgcttttcaaccttatacactagaagcatgctctttaaaattaatgcaacaggatgacgacttgatgtagaaactatatgtggaattatagattaaaatgtgattgaaacatatttagaaaatgtgattatcttcctgatcctactccctttaggaagaacttcttaaactggaagcaggaaaaaaaaaaacc

SEQ ID NO: 453257 - DNA, 3524 bp, Homo sapiens
ctcccggctcccggcccccggccccgcttccggcgcaggcgcagtcccgcgttccctcggcggctgccggcgtagtgagcccgccgccgtggagtgtagcggaaagggctcgccgtcctcctccgtttctcgctgcttcgggacgcgctctctgcggctctgtgagcgcccctgagcgccggcagcggccgcggtgggttcttcaggttatcttatgatgaggcttttgctatggctaatgatcccttggaaggcttccatgaagtaaaccttgcttcacctacttctccggaccttcttggtgtgtatgaatcaggaactcaagagcagactacctcaccaagtgtcatctaccggccacacccttcagctttatcctctgtacctatccaggcaaatgcattagatgtttctgaacttcctacacaacccgtgtattcatcccccagacgtttaaattgtgcggaaatatctagtatcagctttcatgttacagacccagccccttgctctacctctggagtcacagctggattaactaaattaactacaagaaaggacaactataatgcagagagagagtttttacagggtgctactataacagaggcttgcgatggcagtgatgatatttttgggttgagtactgatagtctgtctcgtttacgaagcccatctgttttggaagttagagaaaagggctatgaacgattaaaagaagaactcgcaaaagctcagagggaactgaagttaaaagatgaagaatgtgagaggctttcaaaagtgcgagatcaacttggacaggaattggaagaactcacagctagtctatttgaggaagctcataaaatggtgagagaagcaaatatcaagcaggcaacagcagaaaaacagctaaaagaagcacaaggaaaaattgatgtacttcaagctgaagtagctgcattgaagacacttgtattgtccagttctccaacatcacctacgcaggagcctttgccaggtggaaagacaccttttaaaaaggggcatacaagaaataaaagcacaagcagtgctatgagtggcagtcatcaggacctcagtgtgatacagccaattgtaaaagactgcaaagaggctgacttatccttgtataatgaattccgattgtggaaggatgagcccacaatggacaggacgtgtcctttcttagacaaaatctaccaggaagatatctttccatgtttaacattctcaaaaagtgagttggcttcagctgttctggaggctgtggaaaacaatactctaagcattgaaccagtgggattacaacctatccggtttgtgaaagcttctgcagttgaatgcggaggaccaaaatcacttctgtatgtaacttttttacatacattcgatacattcagcagggactcgtgaaacagcaggatgttgatcagatgttttgggaggttatgcagttgagaaaagagatgtcattggcaaagctgggttatttcaaagaggaactctgatgctctgcgtgggaccatgcctgaactccccgaataactgaaaaatggctgaatatttttatggttacttgatatttatttccaaggagtgagcctaagacttttttccccttttgcaaattgctctaagaagtaccatgatttcttttaaactgatctatgctgtgtttgcttattctttagttgaacacactatgaagaattccaggtgtactagtgaatgtaatttatagttgccaaaaaaaaacaaacctgaaataaataaatgttagattgaatgtgtgtacattttctcttctagctctgacatggcatttagggttagcagaatgtattaaatagtaattttcaaactacacagtagcttccttccttgtgagaggcaagaaagaagtctgagtggatagtactcactttccaaggcccccacctctagaatggctttatttttatctgttttctatattgggtttcaaaaaagattttatttgaagaaatacttctgctgctacaaagtttgaaagttactattttaattattctgctctctgtaactgaaagaatccctttattttggttattcattaaaatataatagaaggcagtcagattttatcccagagatgtattcctgagtgtcttgatatagtgtattcatgttttatatgtgttgaccactatattgtcattggagggacatagatgtaaatgagtttgacgtgtgtcaaaggggtttaaaggggtgtggattgaatgaatggtacgtgcgaagtatatgctgattatagaaccacttgatctctgcattccaaattgtaaaactgactcaactggagaaattataacaaagaggtttgtggtagaaatgtaataagtatagaaaagcaaaaagaaaagagaaactgctttagtttctgtttagagaaagctgctgttaatatttttggatagtagcctttcagctttcagatattttctacttacatatgcatatttttgaaacaaaaagtaggctttttttttgctttttaaacctaaacattaaatatattttcccttgggtaaacctacacatcctaatccctgtttatagaattttaacataatttaattgtgtttggagatgaggtggttttcagtttatttttcatattataatgctgtgacgagtatccttatctgtacacttctgaacattgtggagttctttcatgtggatgcctggagataaaattgtgtcgagatatatatgtatttttaaatgtttgatctgcattgctagattgccatccagaaaagttaatcaatttgtattcacagcagcagtgtacaagagggctggttttctgaagataacatttttttcagtcctgttcagaggtttggtcaatcttacctgtagatgacttcagccaccaggctggatgggagcccacagacaaaaggacattggtgtatgttatggtgaaaaccatcagtaccatgcctagctcaagaatgtgaaattgaacctgaaaaaaactttgaacctacaattttatgttctgaaaatagttattctaatgtgagggcattaataagaatatgtaccatcaaagcttcagaagattttccatacaaactaaaatcacttttggagaaagtacctaaataaaaagagaaacaaatccaggagatactgtacggtttgaaagaaaggtaatcaaatactcagaaaaagtttgttgatgacttaaaaaggataaataaaaagtaagactaaagaaaatcagtatacccattaataataaatctttagtaatctataaggggaagaatgcttttcaaccttatacactagaagcatgctctttaaaattaatgcaacaggatgacgacttgatgtagaaactatatgtggaattatagattaaaatgtgattgaaacatatttagaaaatgtgattatcttcctgatcctactccctttaggaagaacttcttaaactggaagcaggaaaaaaaaaaacc

SEQ ID NO: 453258 - DNA, 1971 bp, Homo sapiens
ctcccggctcccggcccccggccccgcttccggcgcaggcgcagtcccgcgttccctcggcggctgccggcgtagtgagcccgccgccgtggagtgtagcggaaagggctcgccgtcctcctccgtttctcgctgcttcgggacgcgctctctgcggctctgtgagcgcccctgagcgccggcagcggccgcggtgggttcttcaggttatcttatgatgaggcttttgctatggctaatgatcccttggaaggcttccatgaagtaaaccttgcttcacctacttctccggaccttcttggtgtgtatgaatcaggaactcaagagcagactacctcaccaagtgtcatctaccggccacacccttcagctttatcctctgtacctatccaggcaaatgcattagatgtttctgaacttcctacacaacccgtgtattcatcccccagacgtttaaattgtgcggaaatatctagtatcagctttcatgttacagacccagccccttgctctacctctggagtcacagctggattaactaaattaactacaagaaaggacaactataatgcagagagagagtttttacagggtgctactataacagaggcttgcgatggcagtgatgatatttttgggttgagtactgatagtctgtctcgtttacgaagcccatctgttttggaagttagagaaaagggctatgaacgattaaaagaagaactcgcaaaagctcagagggaactgaagttaaaagatgaagaatgtgagaggctttcaaaagtgcgagatcaacttggacaggaattggaagaactcacagctagtctatttgaggaagctcataaaatggtgagagaagcaaatatcaagcaggcaacagcagaaaaacagctaaaagaagcacaaggaaaaattgatgtacttcaagctgaagtagctgcattgaagacacttgtattgtccagttctccaacatcacctacgcaggagcctttgccaggtggaaagacaccttttaaaaaggggcatacaagaaataaaagcacaagcagtgctatgagtggcagtcatcaggacctcagtgtgatacagccaattgtaaaagactgcaaagaggctgacttatccttgtataatgaattccgattgtggaaggatgagcccacaatggacaggacgtgtcctttcttagacaaaatctaccaggaagatatctttccatgtttaacattctcaaaaagtgagttggcttcagctgttctggaggctgtggaaaacaatactctaagcattgaaccagtgggattacaacctatccggtttgtgaaagcttctgcagttgaatgcggaggaccaaaatcacttctgtatgtaacttttttacatacattcgatacattcagcagggactcgtgaaacagcaggatgttgatcagatgttttgggaggttatgcagttgagaaaagagatgtcattggcaaagctgggttatttcaaagaggaactctgatgctctgcgtgggaccatgcctgaactccccgaataactgaaaaatggctgaatatttttatggttacttgatatttatttccaaggagtgagcctaagacttttttccccttttgcaaattgctctaagaagtaccatgatttcttttaaactgatctatgctgtgtttgcttattctttagttgaacacactatgaagaattccaggtgtactagtgaatgcgtccgtccgacggacgcattcactgcactcataaggtggtgtgaccagtgtgaactctcttatgaacacagaatgcagtgctgtgggtagatgactgcccataatcactgcattcattatggcctttctcctgtgtgcactctctggtgtgcaatgaggtggtccttcttgctatgtactttctgacaatcctcacactcatatggcttttctccagtgtgaactctgctgta

SEQ ID NO: 453259 - DNA, 3921 bp, Homo sapiens
gcggccgcggcaggtgcaggtgctggcgccgtgcagggcgcggcacgcgggggttcggggggatgcccaggcccggtgagctcgctctccgcctgggcacttgggctccgggcccttgggggcggcgtgtgggggggactttggcgacccgggtcagccggccgccccctgggctgctggtgggcgtcgggcggcggctcctcccccgggcacgggcgcgttacacattaactgcgcggtcccgcgcgcccggggcagggagcccgagtccagcgggttacctggcggcgggcgggcgcggccgggagcggagggccgcggtcgcgaagaggatgaagagagagttcccgaacaagtcggaagcagctcacaacaccggacgccgcgcggcagggctgtggacctggggtggtttcgtgtcccagtcttaggaaactacgcgcgaggcaccgtgctgaggcgtagaggtcaccctcgggaggtttcggtgaaacctggtgggaaattccgggcaggcgcccggagtcgcgcccaagtaggcagctccgtgccgccagacttgtgttcgggggagttgagacgaactgcacgggtgggattgcatggctctgccctcccagcgttgacaactcgccccgaccgcccaggaagcgcgagcttactggctccagaagtgatgatgctgggtggaagtcgcagcatgtgaagagttgccggttgttatgggattaaaaaagatgaaagggttatcttatgatgaggcttttgctatggctaatgatcccttggaaggcttccatgaagtaaaccttgcttcacctacttctccggaccttcttggtgtgtatgaatcaggaactcaagagcagactacctcaccaagtgtcatctaccggccacacccttcagctttatcctctgtacctatccaggcaaatgcattagatgtttctgaacttcctacacaacccgtgtattcatcccccagacgtttaaattgtgcggaaatatctagtatcagctttcatgttacagacccagccccttgctctacctctggagtcacagctggattaactaaattaactacaagaaaggacaactataatgcagagagagagtttttacagggtgctactataacagaggcttgcgatggcagtgatgatatttttgggttgagtactgatagtctgtctcgtttacgaagcccatctgttttggaagttagagaaaagggctatgaacgattaaaagaagaactcgcaaaagctcagagggaactgaagttaaaagatgaagaatgtgagaggctttcaaaagtgcgagatcaacttggacaggaattggaagaactcacagctagtctatttgaggaagctcataaaatggtgagagaagcaaatatcaagcaggcaacagcagaaaaacagctaaaagaagcacaaggaaaaattgatgtacttcaagctgaagtagctgcattgaagacacttgtattgtccagttctccaacatcacctacgcaggagcctttgccaggtggaaagacaccttttaaaaaggggcatacaagaaataaaagcacaagcagtgctatgagtggcagtcatcaggacctcagtgtgatacagccaattgtaaaagactgcaaagagaaaatgtgctctcactggccagagtaagtcctgtaaacacagaattaaattaggggactcaagcaactattattatatttctcctttttgcagatacaggatcacttctgtatgtaacttttttacatacattcgatacattcagcagggactcgtgaaacagcaggatgttgatcagatgttttgggaggttatgcagttgagaaaagagatgtcattggcaaagctgggttatttcaaagaggaactctgatgctctgcgtgggaccatgcctgaactccccgaataactgaaaaatggctgaatatttttatggttacttgatatttatttccaaggagtgagcctaagacttttttccccttttgcaaattgctctaagaagtaccatgatttcttttaaactgatctatgctgtgtttgcttattctttagttgaacacactatgaagaattccaggtgtactagtgaatgtaatttatagttgccaaaaaaaaacaaacctgaaataaataaatgttagattgaatgtgtgtacattttctcttctagctctgacatggcatttagggttagcagaatgtattaaatagtaattttcaaactacacagtagcttccttccttgtgagaggcaagaaagaagtctgagtggatagtactcactttccaaggcccccacctctagaatggctttatttttatctgttttctatattgggtttcaaaaaagattttatttgaagaaatacttctgctgctacaaagtttgaaagttactattttaattattctgctctctgtaactgaaagaatccctttattttggttattcattaaaatataatagaaggcagtcagattttatcccagagatgtattcctgagtgtcttgatatagtgtattcatgttttatatgtgttgaccactatattgtcattggagggacatagatgtaaatgagtttgacgtgtgtcaaaggggtttaaaggggtgtggattgaatgaatggtacgtgcgaagtatatgctgattatagaaccacttgatctctgcattccaaattgtaaaactgactcaactggagaaattataacaaagaggtttgtggtagaaatgtaataagtatagaaaagcaaaaagaaaagagaaactgctttagtttctgtttagagaaagctgctgttaatatttttggatagtagcctttcagctttcagatattttctacttacatatgcatatttttgaaacaaaaagtaggctttttttttgctttttaaacctaaacattaaatatattttcccttgggtaaacctacacatcctaatccctgtttatagaattttaacataatttaattgtgtttggagatgaggtggttttcagtttatttttcatattataatgctgtgacgagtatccttatctgtacacttctgaacattgtggagttctttcatgtggatgcctggagataaaattgtgtcgagatatatatgtatttttaaatgtttgatctgcattgctagattgccatccagaaaagttaatcaatttgtattcacagcagcagtgtacaagagggctggttttctgaagataacatttttttcagtcctgttcagaggtttggtcaatcttacctgtagatgacttcagccaccaggctggatgggagcccacagacaaaaggacattggtgtatgttatggtgaaaaccatcagtaccatgcctagctcaagaatgtgaaattgaacctgaaaaaaactttgaacctacaattttatgttctgaaaatagttattctaatgtgagggcattaataagaatatgtaccatcaaagcttcagaagattttccatacaaactaaaatcacttttggagaaagtacctaaataaaaagagaaacaaatccaggagatactgtacggtttgaaagaaaggtaatcaaatactcagaaaaagtttgttgatgacttaaaaaggataaataaaaagtaagactaaagaaaatcagtatacccattaataataaatctttagtaatctataaggggaagaatgcttttcaaccttatacactagaagcatgctctttaaaattaatgcaacaggatgacgacttgatgtagaaactatatgtggaattatagattaaaatgtgattgaaacatatttagaaaatgtgattatcttcctgatcctactccctttaggaagaacttcttaaactggaagcaggaaaaaaaaaaacc

SEQ ID NO: 453260 - DNA, 4078 bp, Homo sapiens
gcggccgcggcaggtgcaggtgctggcgccgtgcagggcgcggcacgcgggggttcggggggatgcccaggcccggtgagctcgctctccgcctgggcacttgggctccgggcccttgggggcggcgtgtgggggggactttggcgacccgggtcagccggccgccccctgggctgctggtgggcgtcgggcggcggctcctcccccgggcacgggcgcgttacacattaactgcgcggtcccgcgcgcccggggcagggagcccgagtccagcgggttacctggcggcgggcgggcgcggccgggagcggagggccgcggtcgcgaagaggatgaagagagagttcccgaacaagtcggaagcagctcacaacaccggacgccgcgcggcagggctgtggacctggggtggtttcgtgtcccagtcttaggaaactacgcgcgaggcaccgtgctgaggcgtagaggtcaccctcgggaggtttcggtgaaacctggtgggaaattccgggcaggcgcccggagtcgcgcccaagtaggcagctccgtgccgccagacttgtgttcgggggagttgagacgaactgcacgggtgggattgcatggctctgccctcccagcgttgacaactcgccccgaccgcccaggaagcgcgagcttactggctccagaagtgatgatgctgggtggaagtcgcagcatgtgaagagttgccggttgttatgggattaaaaaagatgaaaggtggaaggcttccatgaagtaaaccttgcttcacctacttctccggaccttcttggtgtgtatgaatcaggaactcaagagcagactacctcaccaagtgtcatctaccggccacacccttcagctttatcctctgtacctatccaggcaaatgcattagatgtttctgaacttcctacacaacccgtgtattcatcccccagacgtttaaattgtgcggaaatatctagtatcagctttcatgttacagacccagccccttgctctacctctggagtcacagctggattaactaaattaactacaagaaaggacaactataatgcagagagagagtttttacagggtgctactataacagaggcttgcgatggcagtgatgatatttttgggttgagtactgatagtctgtctcgtttacgaagcccatctgttttggaagttagagaaaagggctatgaacgattaaaagaagaactcgcaaaagctcagagggaactgaagttaaaagatgaagaatgtgagaggctttcaaaagtgcgagatcaacttggacaggaattggaagaactcacagctagtctatttgaggaagctcataaaatggtgagagaagcaaatatcaagcaggcaacagcagaaaaacagctaaaagaagcacaaggaaaaattgatgtacttcaagctgaagtagctgcattgaagacacttgtattgtccagttctccaacatcacctacgcaggagcctttgccaggtggaaagacaccttttaaaaaggggcatacaagaaataaaagcacaagcagtgctatgagtggcagtcatcaggacctcagtgtgatacagccaattgtaaaagactgcaaagaggcccacaatggacaggacgtgtcctttcttagacaaaatctaccaggaagatatctttccatgtttaacattctcaaaaagtgagttggcttcagctgttctggaggctgtggaaaacaatactctaagcattgaaccagtgggattacaacctatccggtttgtgaaagcttctgcagttgaatgcggaggaccaaaaaaatgtgctctcactggccagagtaagtcctgtaaacacagaattaaattaggggactcaagcaactattattatatttctcctttttgcagatacaggatcacttctgtatgtaacttttttacatacattcgatacattcagcagggactcgtgaaacagcaggatgttgatcagatgttttgggaggttatgcagttgagaaaagagatgtcattggcaaagctgggttatttcaaagaggaactctgatgctctgcgtgggaccatgcctgaactccccgaataactgaaaaatggctgaatatttttatggttacttgatatttatttccaaggagtgagcctaagacttttttccccttttgcaaattgctctaagaagtaccatgatttcttttaaactgatctatgctgtgtttgcttattctttagttgaacacactatgaagaattccaggtgtactagtgaatgtaatttatagttgccaaaaaaaaacaaacctgaaataaataaatgttagattgaatgtgtgtacattttctcttctagctctgacatggcatttagggttagcagaatgtattaaatagtaattttcaaactacacagtagcttccttccttgtgagaggcaagaaagaagtctgagtggatagtactcactttccaaggcccccacctctagaatggctttatttttatctgttttctatattgggtttcaaaaaagattttatttgaagaaatacttctgctgctacaaagtttgaaagttactattttaattattctgctctctgtaactgaaagaatccctttattttggttattcattaaaatataatagaaggcagtcagattttatcccagagatgtattcctgagtgtcttgatatagtgtattcatgttttatatgtgttgaccactatattgtcattggagggacatagatgtaaatgagtttgacgtgtgtcaaaggggtttaaaggggtgtggattgaatgaatggtacgtgcgaagtatatgctgattatagaaccacttgatctctgcattccaaattgtaaaactgactcaactggagaaattataacaaagaggtttgtggtagaaatgtaataagtatagaaaagcaaaaagaaaagagaaactgctttagtttctgtttagagaaagctgctgttaatatttttggatagtagcctttcagctttcagatattttctacttacatatgcatatttttgaaacaaaaagtaggctttttttttgctttttaaacctaaacattaaatatattttcccttgggtaaacctacacatcctaatccctgtttatagaattttaacataatttaattgtgtttggagatgaggtggttttcagtttatttttcatattataatgctgtgacgagtatccttatctgtacacttctgaacattgtggagttctttcatgtggatgcctggagataaaattgtgtcgagatatatatgtatttttaaatgtttgatctgcattgctagattgccatccagaaaagttaatcaatttgtattcacagcagcagtgtacaagagggctggttttctgaagataacatttttttcagtcctgttcagaggtttggtcaatcttacctgtagatgacttcagccaccaggctggatgggagcccacagacaaaaggacattggtgtatgttatggtgaaaaccatcagtaccatgcctagctcaagaatgtgaaattgaacctgaaaaaaactttgaacctacaattttatgttctgaaaatagttattctaatgtgagggcattaataagaatatgtaccatcaaagcttcagaagattttccatacaaactaaaatcacttttggagaaagtacctaaataaaaagagaaacaaatccaggagatactgtacggtttgaaagaaaggtaatcaaatactcagaaaaagtttgttgatgacttaaaaaggataaataaaaagtaagactaaagaaaatcagtatacccattaataataaatctttagtaatctataaggggaagaatgcttttcaaccttatacactagaagcatgctctttaaaattaatgcaacaggatgacgacttgatgtagaaactatatgtggaattatagattaaaatgtgattgaaacatatttagaaaatgtgattatcttcctgatcctactccctttaggaagaacttcttaaactggaagcaggaaaaaaaaaaacc

SEQ ID NO: 453261 - DNA, 2576 bp, Homo sapiens
aatggaataaccaatgttaacctgttttaattgaattgcattttgacgaattatcaataaaaatgatgctggctgacttatccttgtataatgaattccgattgtggaaggatgagcccacaatggacaggacgtgtcctttcttagacaaaatctaccaggaagatatctttccatgtttaacattctcaaaaagtgagttggcttcagctgttctggaggctgtggaaaacaatactctaagcattgaaccagtgggattacaacctatccggtttgtgaaagcttctgcagttgaatgcggaggaccaaaaaaatgtgctctcactggccagagtaagtcctgtaaacacagaattaaattaggggactcaagcaactattattatatttctcctttttgcagatacaggatcacttctgtatgtaacttttttacatacattcgatacattcagcagggactcgtgaaacagcaggatgttgatcagatgttttgggaggttatgcagttgagaaaagagatgtcattggcaaagctgggttatttcaaagaggaactctgatgctctgcgtgggaccatgcctgaactccccgaataactgaaaaatggctgaatatttttatggttacttgatatttatttccaaggagtgagcctaagacttttttccccttttgcaaattgctctaagaagtaccatgatttcttttaaactgatctatgctgtgtttgcttattctttagttgaacacactatgaagaattccaggtgtactagtgaatgtaatttatagttgccaaaaaaaaacaaacctgaaataaataaatgttagattgaatgtgtgtacattttctcttctagctctgacatggcatttagggttagcagaatgtattaaatagtaattttcaaactacacagtagcttccttccttgtgagaggcaagaaagaagtctgagtggatagtactcactttccaaggcccccacctctagaatggctttatttttatctgttttctatattgggtttcaaaaaagattttatttgaagaaatacttctgctgctacaaagtttgaaagttactattttaattattctgctctctgtaactgaaagaatccctttattttggttattcattaaaatataatagaaggcagtcagattttatcccagagatgtattcctgagtgtcttgatatagtgtattcatgttttatatgtgttgaccactatattgtcattggagggacatagatgtaaatgagtttgacgtgtgtcaaaggggtttaaaggggtgtggattgaatgaatggtacgtgcgaagtatatgctgattatagaaccacttgatctctgcattccaaattgtaaaactgactcaactggagaaattataacaaagaggtttgtggtagaaatgtaataagtatagaaaagcaaaaagaaaagagaaactgctttagtttctgtttagagaaagctgctgttaatatttttggatagtagcctttcagctttcagatattttctacttacatatgcatatttttgaaacaaaaagtaggctttttttttgctttttaaacctaaacattaaatatattttcccttgggtaaacctacacatcctaatccctgtttatagaattttaacataatttaattgtgtttggagatgaggtggttttcagtttatttttcatattataatgctgtgacgagtatccttatctgtacacttctgaacattgtggagttctttcatgtggatgcctggagataaaattgtgtcgagatatatatgtatttttaaatgtttgatctgcattgctagattgccatccagaaaagttaatcaatttgtattcacagcagcagtgtacaagagggctggttttctgaagataacatttttttcagtcctgttcagaggtttggtcaatcttacctgtagatgacttcagccaccaggctggatgggagcccacagacaaaaggacattggtgtatgttatggtgaaaaccatcagtaccatgcctagctcaagaatgtgaaattgaacctgaaaaaaactttgaacctacaattttatgttctgaaaatagttattctaatgtgagggcattaataagaatatgtaccatcaaagcttcagaagattttccatacaaactaaaatcacttttggagaaagtacctaaataaaaagagaaacaaatccaggagatactgtacggtttgaaagaaaggtaatcaaatactcagaaaaagtttgttgatgacttaaaaaggataaataaaaagtaagactaaagaaaatcagtatacccattaataataaatctttagtaatctataaggggaagaatgcttttcaaccttatacactagaagcatgctctttaaaattaatgcaacaggatgacgacttgatgtagaaactatatgtggaattatagattaaaatgtgattgaaacatatttagaaaatgtgattatcttcctgatcctactccctttaggaagaacttcttaaactggaagcaggaaaaaaaaaaacc

SEQ ID NO: 453262 - DNA, 2634 bp, Homo sapiens
  misc_feature (1)..(1): n is a, c, g, or t
  misc_feature (69)..(69): n is a, c, g, or t
  misc_feature (101)..(102): n is a, c, g, or t
  misc_feature (122)..(122): n is a, c, g, or t
  misc_feature (136)..(136): n is a, c, g, or t
  misc_feature (153)..(153): n is a, c, g, or t
  misc_feature (160)..(160): n is a, c, g, or t
  misc_feature (165)..(165): n is a, c, g, or t
  misc_feature (169)..(169): n is a, c, g, or t
  misc_feature (175)..(175): n is a, c, g, or t
  misc_feature (178)..(178): n is a, c, g, or t
  misc_feature (185)..(185): n is a, c, g, or t
  misc_feature (205)..(205): n is a, c, g, or t
  misc_feature (212)..(212): n is a, c, g, or t
  misc_feature (226)..(227): n is a, c, g, or t
  misc_feature (230)..(230): n is a, c, g, or t
  misc_feature (236)..(236): n is a, c, g, or t
  misc_feature (239)..(239): n is a, c, g, or t
  misc_feature (241)..(241): n is a, c, g, or t
  misc_feature (248)..(249): n is a, c, g, or t
  misc_feature (254)..(255): n is a, c, g, or t
  misc_feature (257)..(259): n is a, c, g, or t
  misc_feature (262)..(263): n is a, c, g, or t
  misc_feature (265)..(266): n is a, c, g, or t
  misc_feature (268)..(268): n is a, c, g, or t
naaaccaccaaaaaccaaaaaggcagcgaaggaaaccgcaacgacagcaaggcaacaaaaggcgaggcnaaacggagaaaaaagaaaagaacaaccacaanngcaaaccgccaaacaaaaangggaaaaaccccanaaaacaaagaaaacaanaacaacncatancacnccaacnaanaaccaantaacgcgcagaaacaaaagncgaaaanaagcaaaacaccannaantataantcnanaagcaannaacanncnnnaannannanaaaaagcccacaatggacaggacgtgtcctttcttagacaaaatctaccaggaagatatctttccatgtttaacattctcaaaaagtgagttggcttcagctgttctggaggctgtggaaaacaatactctaagcattgaaccagtgggattacaacctatccggtttgtgaaagcttctgcagttgaatgcggaggaccaaaatcacttctgtatgtaacttttttacatacattcgatacattcagcagggactcgtgaaacagcaggatgttgatcagatgttttgggaggttatgcagttgagaaaagagatgtcattggcaaagctgggttatttcaaagaggaactctgatgctctgcgtgggaccatgcctgaactccccgaataactgaaaaatggctgaatatttttatggttacttgatatttatttccaaggagtgagcctaagacttttttccccttttgcaaattgctctaagaagtaccatgatttcttttaaactgatctatgctgtgtttgcttattctttagttgaacacactatgaagaattccaggtgtactagtgaatgtaatttatagttgccaaaaaaaaacaaacctgaaataaataaatgttagattgaatgtgtgtacattttctcttctagctctgacatggcatttagggttagcagaatgtattaaatagtaattttcaaactacacagtagcttccttccttgtgagaggcaagaaagaagtctgagtggatagtactcactttccaaggcccccacctctagaatggctttatttttatctgttttctatattgggtttcaaaaaagattttatttgaagaaatacttctgctgctacaaagtttgaaagttactattttaattattctgctctctgtaactgaaagaatccctttattttggttattcattaaaatataatagaaggcagtcagattttatcccagagatgtattcctgagtgtcttgatatagtgtattcatgttttatatgtgttgaccactatattgtcattggagggacatagatgtaaatgagtttgacgtgtgtcaaaggggtttaaaggggtgtggattgaatgaatggtacgtgcgaagtatatgctgattatagaaccacttgatctctgcattccaaattgtaaaactgactcaactggagaaattataacaaagaggtttgtggtagaaatgtaataagtatagaaaagcaaaaagaaaagagaaactgctttagtttctgtttagagaaagctgctgttaatatttttggatagtagcctttcagctttcagatattttctacttacatatgcatatttttgaaacaaaaagtaggctttttttttgctttttaaacctaaacattaaatatattttcccttgggtaaacctacacatcctaatccctgtttatagaattttaacataatttaattgtgtttggagatgaggtggttttcagtttatttttcatattataatgctgtgacgagtatccttatctgtacacttctgaacattgtggagttctttcatgtggatgcctggagataaaattgtgtcgagatatatatgtatttttaaatgtttgatctgcattgctagattgccatccagaaaagttaatcaatttgtattcacagcagcagtgtacaagagggctggttttctgaagataacatttttttcagtcctgttcagaggtttggtcaatcttacctgtagatgacttcagccaccaggctggatgggagcccacagacaaaaggacattggtgtatgttatggtgaaaaccatcagtaccatgcctagctcaagaatgtgaaattgaacctgaaaaaaactttgaacctacaattttatgttctgaaaatagttattctaatgtgagggcattaataagaatatgtaccatcaaagcttcagaagattttccatacaaactaaaatcacttttggagaaagtacctaaataaaaagagaaacaaatccaggagatactgtacggtttgaaagaaaggtaatcaaatactcagaaaaagtttgttgatgacttaaaaaggataaataaaaagtaagactaaagaaaatcagtatacccattaataataaatctttagtaatctataaggggaagaatgcttttcaaccttatacactagaagcatgctctttaaaattaatgcaacaggatgacgacttgatgtagaaactatatgtggaattatagattaaaatgtgattgaaacatatttagaaaatgtgattatcttcctgatcctactccctttaggaagaacttcttaaactggaagcaggaaaaaaaaaaacc

SEQ ID NO: 453263 - DNA, 2156 bp, Homo sapiens
acctcttacctcgccatatatgtacgtataatgatgttaatcattaccgtaattatctgattgtccagcagtttctgggaagtgttatgcagttgagaaaagagatgtcattggcaaagctgggttatttcaaagaggaactctgatgctctgcgtgggaccatgcctgaactccccgaataactgaaaaatggctgaatatttttatggttacttgatatttatttccaaggagtgagcctaagacttttttccccttttgcaaattgctctaagaagtaccatgatttcttttaaactgatctatgctgtgtttgcttattctttagttgaacacactatgaagaattccaggtgtactagtgaatgtaatttatagttgccaaaaaaaaacaaacctgaaataaataaatgttagattgaatgtgtgtacattttctcttctagctctgacatggcatttagggttagcagaatgtattaaatagtaattttcaaactacacagtagcttccttccttgtgagaggcaagaaagaagtctgagtggatagtactcactttccaaggcccccacctctagaatggctttatttttatctgttttctatattgggtttcaaaaaagattttatttgaagaaatacttctgctgctacaaagtttgaaagttactattttaattattctgctctctgtaactgaaagaatccctttattttggttattcattaaaatataatagaaggcagtcagattttatcccagagatgtattcctgagtgtcttgatatagtgtattcatgttttatatgtgttgaccactatattgtcattggagggacatagatgtaaatgagtttgacgtgtgtcaaaggggtttaaaggggtgtggattgaatgaatggtacgtgcgaagtatatgctgattatagaaccacttgatctctgcattccaaattgtaaaactgactcaactggagaaattataacaaagaggtttgtggtagaaatgtaataagtatagaaaagcaaaaagaaaagagaaactgctttagtttctgtttagagaaagctgctgttaatatttttggatagtagcctttcagctttcagatattttctacttacatatgcatatttttgaaacaaaaagtaggctttttttttgctttttaaacctaaacattaaatatattttcccttgggtaaacctacacatcctaatccctgtttatagaattttaacataatttaattgtgtttggagatgaggtggttttcagtttatttttcatattataatgctgtgacgagtatccttatctgtacacttctgaacattgtggagttctttcatgtggatgcctggagataaaattgtgtcgagatatatatgtatttttaaatgtttgatctgcattgctagattgccatccagaaaagttaatcaatttgtattcacagcagcagtgtacaagagggctggttttctgaagataacatttttttcagtcctgttcagaggtttggtcaatcttacctgtagatgacttcagccaccaggctggatgggagcccacagacaaaaggacattggtgtatgttatggtgaaaaccatcagtaccatgcctagctcaagaatgtgaaattgaacctgaaaaaaactttgaacctacaattttatgttctgaaaatagttattctaatgtgagggcattaataagaatatgtaccatcaaagcttcagaagattttccatacaaactaaaatcacttttggagaaagtacctaaataaaaagagaaacaaatccaggagatactgtacggtttgaaagaaaggtaatcaaatactcagaaaaagtttgttgatgacttaaaaaggataaataaaaagtaagactaaagaaaatcagtatacccattaataataaatctttagtaatctataaggggaagaatgcttttcaaccttatacactagaagcatgctctttaaaattaatgcaacaggatgacgacttgatgtagaaactatatgtggaattatagattaaaatgtgattgaaacatatttagaaaatgtgattatcttcctgatcctactccctttaggaagaacttcttaaactggaagcaggaaaaaaaaaaacc

SEQ ID NO: 453264 - DNA, 242 bp, Homo sapiens
cttggacaggaattggaagaactcacagctagtctatttgaggttggtctatttacatcttggccaacagcaacatcttgacttttatatattgacaaaattgtattttgagggaatcttgaaaaatatttgcttagcttcatgtatatttataagtcctctaagcaaaagagaaatctttaagcaatgtagagtttacaacttaagatgatgtgaaaagaaataaaaaacatctatgggcc

SEQ ID NO: 453265 - DNA, 3014 bp, Homo sapiens
  misc_feature (1)..(1): n is a, c, g, or t
ntttttacctaagcaagcctgggcaatggcgggcgtccctcccccagcctcgttgccgccttgcagtttgatctcagactgctgtgctagcaatcagcgagattccgtgggcgtaggaccctctgagccaggaactgaagttaaaagatgaagaatgtgagaggctttcaaaagtgcgagatcaacttggacaggaattggaagaactcacagctagtctatttgaggaagctcataaaatggtgagagaagcaaatatcaagcaggcaacagcagaaaaacagctaaaagaagcacaaggaaaaattgatgtacttcaagctgaagtagctgcattgaagacacttgtattgtccagttctccaacatcacctacgcaggagcctttgccaggtggaaagacaccttttaaaaaggggcatacaagaaataaaagcacaagcagtgctatgagtggcagtcatcaggacctcagtgtgatacagccaattgtaaaagactgcaaagaggctgacttatccttgtataatgaattccgattgtggaaggatgagcccacaatggacaggacgtgtcctttcttagacaaaatctaccaggaagatatctttccatgtttaacattctcaaaaagtgagttggcttcagctgttctggaggctgtggaaaacaatactctaagcattgaaccagtgggattacaacctatccggtttgtgaaagcttctgcagttgaatgcggaggaccaaaaaaatgtgctctcactggccagagtaagtcctgtaaacacagaattaaattaggggactcaagcaactattattatatttctcctttttgcagatacaggatcacttctgtatgtaacttttttacatacattcgatacattcagcagggactcgtgaaacagcaggatgttgatcagatgttttgggaggttatgcagttgagaaaagagatgtcattggcaaagctgggttatttcaaagaggaactctgatgctctgcgtgggaccatgcctgaactccccgaataactgaaaaatggctgaatatttttatggttacttgatatttatttccaaggagtgagcctaagacttttttccccttttgcaaattgctctaagaagtaccatgatttcttttaaactgatctatgctgtgtttgcttattctttagttgaacacactatgaagaattccaggtgtactagtgaatgtaatttatagttgccaaaaaaaaacaaacctgaaataaataaatgttagattgaatgtgtgtacattttctcttctagctctgacatggcatttagggttagcagaatgtattaaatagtaattttcaaactacacagtagcttccttccttgtgagaggcaagaaagaagtctgagtggatagtactcactttccaaggcccccacctctagaatggctttatttttatctgttttctatattgggtttcaaaaaagattttatttgaagaaatacttctgctgctacaaagtttgaaagttactattttaattattctgctctctgtaactgaaagaatccctttattttggttattcattaaaatataatagaaggcagtcagattttatcccagagatgtattcctgagtgtcttgatatagtgtattcatgttttatatgtgttgaccactatattgtcattggagggacatagatgtaaatgagtttgacgtgtgtcaaaggggtttaaaggggtgtggattgaatgaatggtacgtgcgaagtatatgctgattatagaaccacttgatctctgcattccaaattgtaaaactgactcaactggagaaattataacaaagaggtttgtggtagaaatgtaataagtatagaaaagcaaaaagaaaagagaaactgctttagtttctgtttagagaaagctgctgttaatatttttggatagtagcctttcagctttcagatattttctacttacatatgcatatttttgaaacaaaaagtaggctttttttttgctttttaaacctaaacattaaatatattttcccttgggtaaacctacacatcctaatccctgtttatagaattttaacataatttaattgtgtttggagatgaggtggttttcagtttatttttcatattataatgctgtgacgagtatccttatctgtacacttctgaacattgtggagttctttcatgtggatgcctggagataaaattgtgtcgagatatatatgtatttttaaatgtttgatctgcattgctagattgccatccagaaaagttaatcaatttgtattcacagcagcagtgtacaagagggctggttttctgaagataacatttttttcagtcctgttcagaggtttggtcaatcttacctgtagatgacttcagccaccaggctggatgggagcccacagacaaaaggacattggtgtatgttatggtgaaaaccatcagtaccatgcctagctcaagaatgtgaaattgaacctgaaaaaaactttgaacctacaattttatgttctgaaaatagttattctaatgtgagggcattaataagaatatgtaccatcaaagcttcagaagattttccatacaaactaaaatcacttttggagaaagtacctaaataaaaagagaaacaaatccaggagatactgtacggtttgaaagaaaggtaatcaaatactcagaaaaagtttgttgatgacttaaaaaggataaataaaaagtaagactaaagaaaatcagtatacccattaataataaatctttagtaatctataaggggaagaatgcttttcaaccttatacactagaagcatgctctttaaaattaatgcaacaggatgacgacttgatgtagaaactatatgtggaattatagattaaaatgtgattgaaacatatttagaaaatgtgattatcttcctgatcctactccctttaggaagaacttcttaaactggaagcaggaaaaaaaaaaacc

SEQ ID NO: 453266 - DNA, 2090 bp, Homo sapiens
  misc_feature (1982)..(1982): n is a, c, g, or t
ctcccggctcccggcccccggccccgcttccggcgcaggcgcagtcccgcgttccctcggcggctgccggcgtagtgagcccgccgccgtggagtgtagcggaaagggctcgccgtcctcctccgtttctcgctgcttcgggacgcgctctctgcggctctgtgagcgcccctgagcgccggcagcggccgcggtgggttcttcaggttatcttatgatgaggcttttgctatggctaatgatcccttggaaggcttccatgaagtaaaccttgcttcacctacttctccggaccttcttggtgtgtatgaatcaggaactcaagagcagactacctcaccaagtgtcatctaccggccacacccttcagctttatcctctgtacctatccaggcaaatgcattagatgtttctgaacttcctacacaacccgtgtattcatcccccagacgtttaaattgtgcggaaatatctagtatcagctttcatgttacagacccagccccttgctctacctctggagtcacagctggattaactaaattaactacaagaaaggacaactataatgcagagagagagtttttacagggtgctactataacagaggcttgcgatggcagtgatgatatttttgggttgagtactgatagtctgtctcgtttacgaagcccatctgttttggaagttagagaaaagggctatgaacgattaaaagaagaactcgcaaaagctcagagggaactgaagttaaaagatgaagaatgtgagaggctttcaaaagtgcgagatcaacttggacaggaattggaagaactcacagctagtctatttgaggaagctcataaaatggtgagagaagcaaatatcaagcaggcaacagcagaaaaacagctaaaagaagcacaaggaaaaattgatgtacttcaagctgaagtagctgcattgaagacacttgtattgtccagttctccaacatcacctacgcaggagcctttgccaggtggaaagacaccttttaaaaaggggcatacaagaaataaaagcacaagcagtgctatgagtggcagtcatcaggacctcagtgtgatacagccaattgtaaaagactgcaaagaggctgacttatccttgtataatgaattccgattgtggaaggatgagcccacaatggacaggacgtgtcctttcttagacaaaatctaccaggaagatatctttccatgtttaacattctcaaaaagtgagttggcttcagctgttctggaggctgtggaaaacaatactctaagcattgaaccagtgggattacaacctatccggtttgtgaaagcttctgcagttgaatgcggaggaccaaaaaaatgtgctctcactggccagagtaagtcctgtaaacacagaattaaattaggggactcaagcaactattattatatttctcctttttgcagatacaggatcacttctgtatgtaacttttttacatacattcgatacattcagcagggactcgtgaaacagcaggatgttgatcagatgttttgggaggttatgcagttgagaaaagagatgtcattggcaaagctgggttatttcaaagaggaactctgatgctctgcgtgggaccatgcctgaactccccgaataactgaaaaatggctgaatatttttatggttacttgatatttatttccaaggagtgagcctaagacttttttccccttttgcaaattgctctaagaagtaccatgatttcttttaaactgatctatgctgtgtttgcttattctttagttgaacacactatgaagaattccaggtgtactagtgaatgtaatttatagttgccaaaaaaaagtcgacgcggccgcgaatttagtagtagagcgacctggaatccgacggtactgcagcgtacactttctataggagtcgatagagctgcgaacatgtcaagtgttctggtgaatgtacgcgcnatcaccacatcgagcgacataatgtagctggggctagagggcacccatatgctgccatgcgctcatcggactgcggcacgcatagacgcacgcggaagcgtcgatggc

SEQ ID NO: 453267 - DNA, 3580 bp, Homo sapiens
ctcccggctcccggcccccggccccgcttccggcgcaggcgcagtcccgcgttccctcggcggctgccggcgtagtgagcccgccgccgtggagtgtagcggaaagggctcgccgtcctcctccgtttctcgctgcttcgggacgcgctctctgcggctctgtgagcgcccctgagcgccggcagcggccgcggtgggttcttcaggttatcttatgatgaggcttttgctatggctaatgatcccttggaaggcttccatgaagtaaaccttgcttcacctacttctccggaccttcttggtgtgtatgaatcaggaactcaagagcagactacctcaccaagtgtcatctaccggccacacccttcagctttatcctctgtacctatccaggcaaatgcattagatgtttctgaacttcctacacaacccgtgtattcatcccccagacgtttaaattgtgcggaaatatctagtatcagctttcatgttacagacccagccccttgctctacctctggagtcacagctggattaactaaattaactacaagaaaggacaactataatgcagagagagagtttttacagggtgctactataacagaggcttgcgatggcagtgatgatatttttgggttgagtactgatagtctgtctcgtttacgaagcccatctgttttggaagttagagaaaagggctatgaacgattaaaagaagaactcgcaaaagctcagagggaactgaagttaaaagatgaagaatgtgagaggctttcaaaagtgcgagatcaacttggacaggaattggaagaactcacagctagtctatttgaggaagctcataaaatggtgagagaagcaaatatcaagcaggcaacagcagaaaaacagctaaaagaagcacaaggaaaaattgatgtacttcaagctgaagtagctgcattgaagacacttgtattgtccagttctccaacatcacctacgcaggagcctttgccaggtggaaagacaccttttaaaaaggggcatacaagaaataaaagcacaagcagtgctatgagtggcagtcatcaggacctcagtgtgatacagccaattgtaaaagactgcaaagaggcccacaatggacaggacgtgtcctttcttagacaaaatctaccaggaagatatctttccatgtttaacattctcaaaaagtgagttggcttcagctgttctggaggctgtggaaaacaatactctaagcattgaaccagtgggattacaacctatccggtttgtgaaagcttctgcagttgaatgcggaggaccaaaaaaatgtgctctcactggccagagtaagtcctgtaaacacagaattaaattaggggactcaagcaactattattatatttctcctttttgcagatacaggatcacttctgtatgtaacttttttacatacattcgatacattcagcagggactcgtgaaacagcaggatgttgatcagatgttttgggaggttatgcagttgagaaaagagatgtcattggcaaagctgggttatttcaaagaggaactctgatgctctgcgtgggaccatgcctgaactccccgaataactgaaaaatggctgaatatttttatggttacttgatatttatttccaaggagtgagcctaagacttttttccccttttgcaaattgctctaagaagtaccatgatttcttttaaactgatctatgctgtgtttgcttattctttagttgaacacactatgaagaattccaggtgtactagtgaatgtaatttatagttgccaaaaaaaaacaaacctgaaataaataaatgttagattgaatgtgtgtacattttctcttctagctctgacatggcatttagggttagcagaatgtattaaatagtaattttcaaactacacagtagcttccttccttgtgagaggcaagaaagaagtctgagtggatagtactcactttccaaggcccccacctctagaatggctttatttttatctgttttctatattgggtttcaaaaaagattttatttgaagaaatacttctgctgctacaaagtttgaaagttactattttaattattctgctctctgtaactgaaagaatccctttattttggttattcattaaaatataatagaaggcagtcagattttatcccagagatgtattcctgagtgtcttgatatagtgtattcatgttttatatgtgttgaccactatattgtcattggagggacatagatgtaaatgagtttgacgtgtgtcaaaggggtttaaaggggtgtggattgaatgaatggtacgtgcgaagtatatgctgattatagaaccacttgatctctgcattccaaattgtaaaactgactcaactggagaaattataacaaagaggtttgtggtagaaatgtaataagtatagaaaagcaaaaagaaaagagaaactgctttagtttctgtttagagaaagctgctgttaatatttttggatagtagcctttcagctttcagatattttctacttacatatgcatatttttgaaacaaaaagtaggctttttttttgctttttaaacctaaacattaaatatattttcccttgggtaaacctacacatcctaatccctgtttatagaattttaacataatttaattgtgtttggagatgaggtggttttcagtttatttttcatattataatgctgtgacgagtatccttatctgtacacttctgaacattgtggagttctttcatgtggatgcctggagataaaattgtgtcgagatatatatgtatttttaaatgtttgatctgcattgctagattgccatccagaaaagttaatcaatttgtattcacagcagcagtgtacaagagggctggttttctgaagataacatttttttcagtcctgttcagaggtttggtcaatcttacctgtagatgacttcagccaccaggctggatgggagcccacagacaaaaggacattggtgtatgttatggtgaaaaccatcagtaccatgcctagctcaagaatgtgaaattgaacctgaaaaaaactttgaacctacaattttatgttctgaaaatagttattctaatgtgagggcattaataagaatatgtaccatcaaagcttcagaagattttccatacaaactaaaatcacttttggagaaagtacctaaataaaaagagaaacaaatccaggagatactgtacggtttgaaagaaaggtaatcaaatactcagaaaaagtttgttgatgacttaaaaaggataaataaaaagtaagactaaagaaaatcagtatacccattaataataaatctttagtaatctataaggggaagaatgcttttcaaccttatacactagaagcatgctctttaaaattaatgcaacaggatgacgacttgatgtagaaactatatgtggaattatagattaaaatgtgattgaaacatatttagaaaatgtgattatcttcctgatcctactccctttaggaagaacttcttaaactggaagcaggaaaaaaaaaaacc

SEQ ID NO: 453268 - DNA, 4163 bp, Homo sapiens
gcggccgcggcaggtgcaggtgctggcgccgtgcagggcgcggcacgcgggggttcggggggatgcccaggcccggtgagctcgctctccgcctgggcacttgggctccgggcccttgggggcggcgtgtgggggggactttggcgacccgggtcagccggccgccccctgggctgctggtgggcgtcgggcggcggctcctcccccgggcacgggcgcgttacacattaactgcgcggtcccgcgcgcccggggcagggagcccgagtccagcgggttacctggcggcgggcgggcgcggccgggagcggagggccgcggtcgcgaagaggatgaagagagagttcccgaacaagtcggaagcagctcacaacaccggacgccgcgcggcagggctgtggacctggggtggtttcgtgtcccagtcttaggaaactacgcgcgaggcaccgtgctgaggcgtagaggtcaccctcgggaggtttcggtgaaacctggtgggaaattccgggcaggcgcccggagtcgcgcccaagtaggcagctccgtgccgccagacttgtgttcgggggagttgagacgaactgcacgggtgggattgcatggctctgccctcccagcgttgacaactcgccccgaccgcccaggaagcgcgagcttactggctccagaagtgatgatgctgggtggaagtcgcagcatgtgaagagttgccggttgttatgggattaaaaaagatgaaagggttatcttatgatgaggcttttgctatggctaatgatcccttggaaggcttccatgaagtaaaccttgcttcacctacttctccggaccttcttggtgtgtatgaatcaggaactcaagagcagactacctcaccaagtgtcatctaccggccacacccttcagctttatcctctgtacctatccaggcaaatgcattagatgtttctgaacttcctacacaacccgtgtattcatcccccagacgtttaaattgtgcggaaatatctagtatcagctttcatgttacagacccagccccttgctctacctctggagtcacagctggattaactaaattaactacaagaaaggacaactataatgcagagagagagtttttacagggtgctactataacagaggcttgcgatggcagtgatgatatttttgggttgagtactgatagtctgtctcgtttacgaagcccatctgttttggaagttagagaaaagggctatgaacgattaaaagaagaactcgcaaaagctcagagggaactgaagttaaaagatgaagaatgtgagaggctttcaaaagtgcgagatcaacttggacaggaattggaagaactcacagctagtctatttgaggaagctcataaaatggtgagagaagcaaatatcaagcaggcaacagcagaaaaacagctaaaagaagcacaaggaaaaattgatgtacttcaagctgaagtagctgcattgaagacacttgtattgtccagttctccaacatcacctacgcaggagcctttgccaggtggaaagacaccttttaaaaaggggcatacaagaaataaaagcacaagcagtgctatgagtggcagtcatcaggacctcagtgtgatacagccaattgtaaaagactgcaaagaggctgacttatccttgtataatgaattccgattgtggaaggatgagcccacaatggacaggacgtgtcctttcttagacaaaatctaccaggaagatatctttccatgtttaacattctcaaaaagtgagttggcttcagctgttctggaggctgtggaaaacaatactctaagcattgaaccagtgggattacaacctatccggtttgtgaaagcttctgcagttgaatgcggaggaccaaaaaaatgtgctctcactggccagagtaagtcctgtaaacacagaattaaattaggggactcaagcaactattattatatttctcctttttgcagatacaggatcacttctgtatgtaacttttttacatacattcgatacattcagcagggactcgtgaaacagcaggatgttgatcagatgttttgggaggttatgcagttgagaaaagagatgtcattggcaaagctgggttatttcaaagaggaactctgatgctctgcgtgggaccatgcctgaactccccgaataactgaaaaatggctgaatatttttatggttacttgatatttatttccaaggagtgagcctaagacttttttccccttttgcaaattgctctaagaagtaccatgatttcttttaaactgatctatgctgtgtttgcttattctttagttgaacacactatgaagaattccaggtgtactagtgaatgtaatttatagttgccaaaaaaaaacaaacctgaaataaataaatgttagattgaatgtgtgtacattttctcttctagctctgacatggcatttagggttagcagaatgtattaaatagtaattttcaaactacacagtagcttccttccttgtgagaggcaagaaagaagtctgagtggatagtactcactttccaaggcccccacctctagaatggctttatttttatctgttttctatattgggtttcaaaaaagattttatttgaagaaatacttctgctgctacaaagtttgaaagttactattttaattattctgctctctgtaactgaaagaatccctttattttggttattcattaaaatataatagaaggcagtcagattttatcccagagatgtattcctgagtgtcttgatatagtgtattcatgttttatatgtgttgaccactatattgtcattggagggacatagatgtaaatgagtttgacgtgtgtcaaaggggtttaaaggggtgtggattgaatgaatggtacgtgcgaagtatatgctgattatagaaccacttgatctctgcattccaaattgtaaaactgactcaactggagaaattataacaaagaggtttgtggtagaaatgtaataagtatagaaaagcaaaaagaaaagagaaactgctttagtttctgtttagagaaagctgctgttaatatttttggatagtagcctttcagctttcagatattttctacttacatatgcatatttttgaaacaaaaagtaggctttttttttgctttttaaacctaaacattaaatatattttcccttgggtaaacctacacatcctaatccctgtttatagaattttaacataatttaattgtgtttggagatgaggtggttttcagtttatttttcatattataatgctgtgacgagtatccttatctgtacacttctgaacattgtggagttctttcatgtggatgcctggagataaaattgtgtcgagatatatatgtatttttaaatgtttgatctgcattgctagattgccatccagaaaagttaatcaatttgtattcacagcagcagtgtacaagagggctggttttctgaagataacatttttttcagtcctgttcagaggtttggtcaatcttacctgtagatgacttcagccaccaggctggatgggagcccacagacaaaaggacattggtgtatgttatggtgaaaaccatcagtaccatgcctagctcaagaatgtgaaattgaacctgaaaaaaactttgaacctacaattttatgttctgaaaatagttattctaatgtgagggcattaataagaatatgtaccatcaaagcttcagaagattttccatacaaactaaaatcacttttggagaaagtacctaaataaaaagagaaacaaatccaggagatactgtacggtttgaaagaaaggtaatcaaatactcagaaaaagtttgttgatgacttaaaaaggataaataaaaagtaagactaaagaaaatcagtatacccattaataataaatctttagtaatctataaggggaagaatgcttttcaaccttatacactagaagcatgctctttaaaattaatgcaacaggatgacgacttgatgtagaaactatatgtggaattatagattaaaatgtgattgaaacatatttagaaaatgtgattatcttcctgatcctactccctttaggaagaacttcttaaactggaagcaggaaaaaaaaaaacc

SEQ ID NO: 453269 - DNA, 4063 bp, Homo sapiens
gcggccgcggcaggtgcaggtgctggcgccgtgcagggcgcggcacgcgggggttcggggggatgcccaggcccggtgagctcgctctccgcctgggcacttgggctccgggcccttgggggcggcgtgtgggggggactttggcgacccgggtcagccggccgccccctgggctgctggtgggcgtcgggcggcggctcctcccccgggcacgggcgcgttacacattaactgcgcggtcccgcgcgcccggggcagggagcccgagtccagcgggttacctggcggcgggcgggcgcggccgggagcggagggccgcggtcgcgaagaggatgaagagagagttcccgaacaagtcggaagcagctcacaacaccggacgccgcgcggcagggctgtggacctggggtggtttcgtgtcccagtcttaggaaactacgcgcgaggcaccgtgctgaggcgtagaggtcaccctcgggaggtttcggtgaaacctggtgggaaattccgggcaggcgcccggagtcgcgcccaagtaggcagctccgtgccgccagacttgtgttcgggggagttgagacgaactgcacgggtgggattgcatggctctgccctcccagcgttgacaactcgccccgaccgcccaggaagcgcgagcttactggctccagaagtgatgatgctgggtggaagtcgcagcatgtgaagagttgccggttgttatgggattaaaaaagatgaaagggttatcttatgatgaggcttttgctatggctaatgatcccttggaaggcttccatgaagtaaaccttgcttcacctacttctccggaccttcttggtgtgtatgaatcaggaactcaagagcagactacctcaccaagtgtcatctaccggccacacccttcagctttatcctctgtacctatccaggcaaatgcattagatgtttctgaacttcctacacaacccgtgtattcatcccccagacgtttaaattgtgcggaaatatctagtatcagctttcatgttacagacccagccccttgctctacctctggagtcacagctggattaactaaattaactacaagaaaggacaactataatgcagagagagagtttttacagggtgctactataacagaggcttgcgatggcagtgatgatatttttgggttgagtactgatagtctgtctcgtttacgaagcccatctgttttggaagttagagaaaagggctatgaacgattaaaagaagaactcgcaaaagctcagagggaactgaagttaaaagatgaagaatgtgagaggctttcaaaagtgcgagatcaacttggacaggaattggaagaactcacagctagtctatttgaggaagctcataaaatggtgagagaagcaaatatcaagcaggcaacagcagaaaaacagctaaaagaagcacaaggaaaaattgatgtacttcaagctgaagtagctgcattgaagacacttgtattgtccagttctccaacatcacctacgcaggagcctttgccaggtggaaagacaccttttaaaaaggggcatacaagaaataaaagcacaagcagtgctatgagtggcagtcatcaggacctcagtgtgatacagccaattgtaaaagactgcaaagaggctgacttatccttgtataatgaattccgattgtggaaggatgagcccacaatggacaggacgtgtcctttcttagacaaaatctaccaggaagatatctttccatgtttaacattctcaaaaagtgagttggcttcagctgttctggaggctgtggaaaacaatactctaagcattgaaccagtgggattacaacctatccggtttgtgaaagcttctgcagttgaatgcggaggaccaaaatcacttctgtatgtaacttttttacatacattcgatacattcagcagggactcgtgaaacagcaggatgttgatcagatgttttgggaggttatgcagttgagaaaagagatgtcattggcaaagctgggttatttcaaagaggaactctgatgctctgcgtgggaccatgcctgaactccccgaataactgaaaaatggctgaatatttttatggttacttgatatttatttccaaggagtgagcctaagacttttttccccttttgcaaattgctctaagaagtaccatgatttcttttaaactgatctatgctgtgtttgcttattctttagttgaacacactatgaagaattccaggtgtactagtgaatgtaatttatagttgccaaaaaaaaacaaacctgaaataaataaatgttagattgaatgtgtgtacattttctcttctagctctgacatggcatttagggttagcagaatgtattaaatagtaattttcaaactacacagtagcttccttccttgtgagaggcaagaaagaagtctgagtggatagtactcactttccaaggcccccacctctagaatggctttatttttatctgttttctatattgggtttcaaaaaagattttatttgaagaaatacttctgctgctacaaagtttgaaagttactattttaattattctgctctctgtaactgaaagaatccctttattttggttattcattaaaatataatagaaggcagtcagattttatcccagagatgtattcctgagtgtcttgatatagtgtattcatgttttatatgtgttgaccactatattgtcattggagggacatagatgtaaatgagtttgacgtgtgtcaaaggggtttaaaggggtgtggattgaatgaatggtacgtgcgaagtatatgctgattatagaaccacttgatctctgcattccaaattgtaaaactgactcaactggagaaattataacaaagaggtttgtggtagaaatgtaataagtatagaaaagcaaaaagaaaagagaaactgctttagtttctgtttagagaaagctgctgttaatatttttggatagtagcctttcagctttcagatattttctacttacatatgcatatttttgaaacaaaaagtaggctttttttttgctttttaaacctaaacattaaatatattttcccttgggtaaacctacacatcctaatccctgtttatagaattttaacataatttaattgtgtttggagatgaggtggttttcagtttatttttcatattataatgctgtgacgagtatccttatctgtacacttctgaacattgtggagttctttcatgtggatgcctggagataaaattgtgtcgagatatatatgtatttttaaatgtttgatctgcattgctagattgccatccagaaaagttaatcaatttgtattcacagcagcagtgtacaagagggctggttttctgaagataacatttttttcagtcctgttcagaggtttggtcaatcttacctgtagatgacttcagccaccaggctggatgggagcccacagacaaaaggacattggtgtatgttatggtgaaaaccatcagtaccatgcctagctcaagaatgtgaaattgaacctgaaaaaaactttgaacctacaattttatgttctgaaaatagttattctaatgtgagggcattaataagaatatgtaccatcaaagcttcagaagattttccatacaaactaaaatcacttttggagaaagtacctaaataaaaagagaaacaaatccaggagatactgtacggtttgaaagaaaggtaatcaaatactcagaaaaagtttgttgatgacttaaaaaggataaataaaaagtaagactaaagaaaatcagtatacccattaataataaatctttagtaatctataaggggaagaatgcttttcaaccttatacactagaagcatgctctttaaaattaatgcaacaggatgacgacttgatgtagaaactatatgtggaattatagattaaaatgtgattgaaacatatttagaaaatgtgattatcttcctgatcctactccctttaggaagaacttcttaaactggaagcaggaaaaaaaaaaacc

SEQ ID NO: 453270 - DNA, 4027 bp, Homo sapiens
gcggccgcggcaggtgcaggtgctggcgccgtgcagggcgcggcacgcgggggttcggggggatgcccaggcccggtgagctcgctctccgcctgggcacttgggctccgggcccttgggggcggcgtgtgggggggactttggcgacccgggtcagccggccgccccctgggctgctggtgggcgtcgggcggcggctcctcccccgggcacgggcgcgttacacattaactgcgcggtcccgcgcgcccggggcagggagcccgagtccagcgggttacctggcggcgggcgggcgcggccgggagcggagggccgcggtcgcgaagaggatgaagagagagttcccgaacaagtcggaagcagctcacaacaccggacgccgcgcggcagggctgtggacctggggtggtttcgtgtcccagtcttaggaaactacgcgcgaggcaccgtgctgaggcgtagaggtcaccctcgggaggtttcggtgaaacctggtgggaaattccgggcaggcgcccggagtcgcgcccaagtaggcagctccgtgccgccagacttgtgttcgggggagttgagacgaactgcacgggtgggattgcatggctctgccctcccagcgttgacaactcgccccgaccgcccaggaagcgcgagcttactggctccagaagtgatgatgctgggtggaagtcgcagcatgtgaagagttgccggttgttatgggattaaaaaagatgaaagggttatcttatgatgaggcttttgctatggctaatgatcccttggaaggcttccatgaagtaaaccttgcttcacctacttctccggaccttcttggcaaatgcattagatgtttctgaacttcctacacaacccgtgtattcatcccccagacgtttaaattgtgcggaaatatctagtatcagctttcatgttacagacccagccccttgctctacctctggagtcacagctggattaactaaattaactacaagaaaggacaactataatgcagagagagagtttttacagggtgctactataacagaggcttgcgatggcagtgatgatatttttgggttgagtactgatagtctgtctcgtttacgaagcccatctgttttggaagttagagaaaagggctatgaacgattaaaagaagaactcgcaaaagctcagagggaactgaagttaaaagatgaagaatgtgagaggctttcaaaagtgcgagatcaacttggacaggaattggaagaactcacagctagtctatttgaggaagctcataaaatggtgagagaagcaaatatcaagcaggcaacagcagaaaaacagctaaaagaagcacaaggaaaaattgatgtacttcaagctgaagtagctgcattgaagacacttgtattgtccagttctccaacatcacctacgcaggagcctttgccaggtggaaagacaccttttaaaaaggggcatacaagaaataaaagcacaagcagtgctatgagtggcagtcatcaggacctcagtgtgatacagccaattgtaaaagactgcaaagaggcccacaatggacaggacgtgtcctttcttagacaaaatctaccaggaagatatctttccatgtttaacattctcaaaaagtgagttggcttcagctgttctggaggctgtggaaaacaatactctaagcattgaaccagtgggattacaacctatccggtttgtgaaagcttctgcagttgaatgcggaggaccaaaaaaatgtgctctcactggccagagtaagtcctgtaaacacagaattaaattaggggactcaagcaactattattatatttctcctttttgcagatacaggatcacttctgtatgtaacttttttacatacattcgatacattcagcagggactcgtgaaacagcaggatgttgatcagatgttttgggaggttatgcagttgagaaaagagatgtcattggcaaagctgggttatttcaaagaggaactctgatgctctgcgtgggaccatgcctgaactccccgaataactgaaaaatggctgaatatttttatggttacttgatatttatttccaaggagtgagcctaagacttttttccccttttgcaaattgctctaagaagtaccatgatttcttttaaactgatctatgctgtgtttgcttattctttagttgaacacactatgaagaattccaggtgtactagtgaatgtaatttatagttgccaaaaaaaaacaaacctgaaataaataaatgttagattgaatgtgtgtacattttctcttctagctctgacatggcatttagggttagcagaatgtattaaatagtaattttcaaactacacagtagcttccttccttgtgagaggcaagaaagaagtctgagtggatagtactcactttccaaggcccccacctctagaatggctttatttttatctgttttctatattgggtttcaaaaaagattttatttgaagaaatacttctgctgctacaaagtttgaaagttactattttaattattctgctctctgtaactgaaagaatccctttattttggttattcattaaaatataatagaaggcagtcagattttatcccagagatgtattcctgagtgtcttgatatagtgtattcatgttttatatgtgttgaccactatattgtcattggagggacatagatgtaaatgagtttgacgtgtgtcaaaggggtttaaaggggtgtggattgaatgaatggtacgtgcgaagtatatgctgattatagaaccacttgatctctgcattccaaattgtaaaactgactcaactggagaaattataacaaagaggtttgtggtagaaatgtaataagtatagaaaagcaaaaagaaaagagaaactgctttagtttctgtttagagaaagctgctgttaatatttttggatagtagcctttcagctttcagatattttctacttacatatgcatatttttgaaacaaaaagtaggctttttttttgctttttaaacctaaacattaaatatattttcccttgggtaaacctacacatcctaatccctgtttatagaattttaacataatttaattgtgtttggagatgaggtggttttcagtttatttttcatattataatgctgtgacgagtatccttatctgtacacttctgaacattgtggagttctttcatgtggatgcctggagataaaattgtgtcgagatatatatgtatttttaaatgtttgatctgcattgctagattgccatccagaaaagttaatcaatttgtattcacagcagcagtgtacaagagggctggttttctgaagataacatttttttcagtcctgttcagaggtttggtcaatcttacctgtagatgacttcagccaccaggctggatgggagcccacagacaaaaggacattggtgtatgttatggtgaaaaccatcagtaccatgcctagctcaagaatgtgaaattgaacctgaaaaaaactttgaacctacaattttatgttctgaaaatagttattctaatgtgagggcattaataagaatatgtaccatcaaagcttcagaagattttccatacaaactaaaatcacttttggagaaagtacctaaataaaaagagaaacaaatccaggagatactgtacggtttgaaagaaaggtaatcaaatactcagaaaaagtttgttgatgacttaaaaaggataaataaaaagtaagactaaagaaaatcagtatacccattaataataaatctttagtaatctataaggggaagaatgcttttcaaccttatacactagaagcatgctctttaaaattaatgcaacaggatgacgacttgatgtagaaactatatgtggaattatagattaaaatgtgattgaaacatatttagaaaatgtgattatcttcctgatcctactccctttaggaagaacttcttaaactggaagcaggaaaaaaaaaaacc

SEQ ID NO: 453271 - DNA, 1172 bp, Homo sapiens
ctcccggctcccggcccccggccccgcttccggcgcaggcgcagtcccgcgttccctcggcggctgccggcgtagtgagcccgccgccgtggagtgtagcggaaagggctcgccgtcctcctccgtttctcgctgcttcgggacgcgctctctgcggctctgtgagcgcccctgagcgccggcagcggccgcggtgggttcttcaggttatcttatgatgaggcttttgctatggctaatgatcccttggaaggcttccatgaagtaaaccttgcttcacctacttctccggaccttcttggtgtgtatgaatcaggaactcaagagcagactacctcaccaagtgtcatctaccggccacacccttcagctttatcctctgtacctatccaggcaaatgcattagatgtttctgaacttcctacacaacccgtgtattcatcccccagacgtttaaattgtgcggaaatatctagtatcagctttcatgttacagacccagccccttgctctacctctggagtcacagctggattaactaaattaactacaagaaaggacaactataatgcagagagagagtttttacagggtgctactataacagaggcttgcgatggcagtgatgatatttttgggttgagtactgatagtctgtctcgtttacgaagcccatctgttttggaagttagagaaaagggctatgaacgattaaaagaagaactcgcaaaagctcagagggaactgaagttaaaagatgaagaatgtgagaggctttcaaaagtgcgagatcaacttggacaggaattggaagaactcacagctagtctatttgaggaagctcataaaatggtgagagaagcaaatatcaagcaggcaacagcagaaaaacagctaaaagaagcacaaggaaaaattgatgtacttcaagctgaagtagctgcattgaagacacttgtattgtccagttctccaacatcacctacgcaggagcctttgccaggtggaaagacaccttttaaaaaggggcatacaagaaataaaagcacaagcagtgctatgagtggcagtcatcaggacctcagtgtgatacagccaattgtaaaagactgcaaagaggtaactcatcaaggactgtcccctctgactctgttgatacttgttagttctca

SEQ ID NO: 453272 - DNA, 516 bp, Homo sapiens
caggatcgagctcggtacccaattcatagatgcccacggattctcaagattccttatttgcctcgagaaccttgtttaaaagcagaagactgcaagattccttcgcctcagaaaccaatctagattttagaagtgggctggctatagtgagccaacatgatttagaccagcttcaggctgatgcaatcaacgcttttggagaatcactacaaaagaaacttctggacattgaaggattatattcaaaagttcgatctcgatatagtttcatacaggctcttgtcagacgtatccgtggcctctatgatttagaggccacggaggatcactttgtgaggcttgccaatgcattgcctttgtttttctgaccagatgcagataaggctactcgtattccaggaactgtttgtgatagaacagcaagtacccttcgctgtccaggacgtacttgatgctggccttggtgatgatggaatcgtcacacttgaaccactggtctatgtgctgccggataaa

SEQ ID NO: 453273 - DNA, 543 bp, Homo sapiens
ccaaaaaattctaaggtagaaaatgtgaatgtttagttaatttagtaacacattacaaaaattcaaaagtatttacattgaaagaaccacattacaaaaattctaaagtgttttaaattggaagacttagaataaaagaaatatttgagacaacaattttaacaaaatgtcttttgtgtcaccgctagcttcaggctgatgcaatcaacgcttttggagaatcactacaaaagaaacttctggacattgaaggattatattcaaaagttcgatctcgatatagtttcatacaggctcttgtcagacgtatccgtggcctcttgaggatatcaaggaactgagagcccgtgcttatgctcttctatgagagagatgaattggggagaattgtctccattttatagattagtttctttctaaattatgaccaaaaatattttgctatttctttctttgtatatggacatcttttctgtaaacttcttcccctagttccatcctcactagtaaaaaataaatactttttaaaaaaacaaaaaaaat

SEQ ID NO: 453274 - DNA, 951 bp, Homo sapiens
ggcgtccttgtgaactttccgcttggatcctgactctgctgttagtagcctatgaccttggatgaaatgtaagggaatagaaactgaagctatctgtaaagtgaaagagctggtgcctgccttattgggagcctctgggtttatgtatgagtcagatgcgtagagttgctcaccatggagggcccaggcagttgtgaaaaacttcaggacaaaaatgtttcatttaaggacttgtgctgctaagttgaggccattgacggcttcccagactgttaagacattttcacaaaacagaccagcagcagctaggacatttcaacagattcggtgctattctgcacctgttgctgctgagccctttctcagtgggactagttcgaactatgtggaggagatgtactgtgcttggctggaaaaccccaaaagtgtacataagaaggtaaggctcgcagggctgtgggtctgcctcatgttggtgtgttggcctgttcctgactggtcaccaggtaagtgtgtgcgtcctgaggagtcagcgggcagacaggcagctggagcgccataccaaccaccgtatctgtatcggacccagcatagccccagcagaagccatggtccctggattggcgtccagcagtagacactgtgcttaactctgcgaggatgtgaagaagcatgtgtgtgaccctccagcatctccgcaagggctgcttcaggatgaagccgctgaagaaagaagaaagaaagaaagtgtgtggaaaagagcaggacctcaggaagctcctccattctaactgtctggagaggatactttcatttgtaacatgccgtagtcacctcatgtaatttctgtatgaatggccttttagctcattatgttcgtatttttttcctgtttgtttctaacttctctgtattacatataagggcattttctaaacttttcaccacatg

SEQ ID NO: 453275 - DNA, 1136 bp, Homo sapiens
acgccatacgccggggcggggccgagagtttggagccccggagtggggtgtcggcgcctcattcgggtggagctgagccggagacagggtaaccgtgcgctgtcgccgcgcccgtcccagtgccgggtgtcgcggcgcttggcggcccggggttggagatcgcggtaaagggggaggccgccgcgcccttggtgctgcgggcgccgcggtgacaggggagtggagctggatggagtggggctcacggagggtggtaggagggacgggacctgatggatggccgtggcagccaatggagccgcggggcttgcccggcgggcggagattggcgggtacgggcgggctccgaggtcgcgcggggcgcggagcgacgcgccattggcggtgggcgagcggggggcgggcgcggcggcggatgtgagggagagggcggtgcgtccgcaggggtgacccccaaggtcgccgcgggcgtcacgtggttaggccgctctccgacggcgtccttcccgaccgggacgcactctccttcccgcctgtgaggaccgcgtcgctttgtccgaaagacagtgtggcctgctcgagttgcgtcggagcatctagctttggggtggccctgggtgggacttgcctgtttgggattaccgcgcagaccttggcgccccccccacacctgctgccagaagttgggtcgaacagattgaccgagatgaagcttatttctcgtagaaacatctttcaagcaccattttccctcgaaaatatatcagacattggatatgagttgtaatctactgagatttaatagaaaacttgccgcgccctcgccctgacctgggtgcgtcccacctgccatccccatccctttgcccagaacataggacttcgtgttagggtttccttgtgccttgtcttgcagtccgtactttgaggctgatttccaggtacactgctctgaacagctgggtttaggatgggtggcatgggataaagcctttttttgtaaggcagcactagttgcaacagtcaaactgtactttgccgtgtagacctaggagagtatgtaacactattgtagttttgtaaattagctgaggactggatcttgggaagttgaataaagatcactgtatgctcat

SEQ ID NO: 453276 - DNA, 442 bp, Homo sapiens
cgactctagaggtaccccgaggtgtctcagagcgcacgcttttggaaaatctcctgaaattgctgcttccctctggcagtcattggaatacactcagatactgcagaccgtgaggattccaagccaaaggcaagctattggtattgaggttgaactaaatgaaatagaatcccggtgtgaagaatacccattgactcgggccttttgccagcttattagtactctggtggagagctcatttccttctaatttgggtgctggacttgcggccccctggctttgacccttatttgcagttccttagagactctgtgtttctacgattccgtacaagagcttaccggagagcagctgaaaaggttatgttcagagaaaagcttttttctccttatgcatttactgctttttcttttatcaaaagtatatggtgctaaattcatgt

SEQ ID NO: 453277 - DNA, 450 bp, Homo sapiens
ctctctctgtgggggatttggccgggtcatgggaccatagtggagggaaggtcagccggaaggagctggaacagatcttctgtcaattcgattcaaagctggaggcagctgatgagggctccggagatgtgaagtaccacctgggcatgtatcaccgcaggatcaatcgtgtcaccgacaggaacattaccttgtccttggtggccaacccccccccccgagagagcgtcgacgctctctctgtggggggcctgcccccgctaaccggctttttgccccaatgggccattatcgaagaattcaccaaaaaccatagcctcatcatccccaccatcatagccaccatcaccctccttaacctctacttctacctacgcctaatctactccacctccatacactatctccccacacgagagagcgtcgggatcctctagatcacccagcacc
